United States Patent Application Publication US 2020/0392482 A1 - sequence listing, part 3

SEQ ID NO: 835 - DNA, 4000 bp, Escherichia coli
  misc_feature (1)..(1): n is a, c, g, or t
  misc_feature (3)..(3): n is a, c, g, or t
  misc_feature (5)..(7): n is a, c, g, or t
  misc_feature (9)..(13): n is a, c, g, or t
  misc_feature (17)..(18): n is a, c, g, or t
  misc_feature (21)..(22): n is a, c, g, or t
  misc_feature (24)..(24): n is a, c, g, or t
  misc_feature (28)..(32): n is a, c, g, or t
  misc_feature (34)..(34): n is a, c, g, or t
  misc_feature (41)..(41): n is a, c, g, or t
  misc_feature (45)..(45): n is a, c, g, or t
  misc_feature (47)..(51): n is a, c, g, or t
  misc_feature (56)..(57): n is a, c, g, or t
  misc_feature (59)..(61): n is a, c, g, or t
  misc_feature (63)..(64): n is a, c, g, or t
  misc_feature (66)..(67): n is a, c, g, or t
  misc_feature (70)..(70): n is a, c, g, or t
  misc_feature (74)..(75): n is a, c, g, or t
  misc_feature (80)..(80): n is a, c, g, or t
  misc_feature (82)..(83): n is a, c, g, or t
  misc_feature (87)..(87): n is a, c, g, or t
  misc_feature (89)..(92): n is a, c, g, or t
  misc_feature (94)..(99): n is a, c, g, or t
  misc_feature (102)..(102): n is a, c, g, or t
  misc_feature (105)..(105): n is a, c, g, or t
  misc_feature (108)..(112): n is a, c, g, or t
  misc_feature (114)..(119): n is a, c, g, or t
  misc_feature (123)..(123): n is a, c, g, or t
  misc_feature (128)..(128): n is a, c, g, or t
  misc_feature (131)..(135): n is a, c, g, or t
  misc_feature (138)..(138): n is a, c, g, or t
  misc_feature (140)..(141): n is a, c, g, or t
  misc_feature (143)..(143): n is a, c, g, or t
  misc_feature (145)..(146): n is a, c, g, or t
  misc_feature (148)..(150): n is a, c, g, or t
  misc_feature (152)..(152): n is a, c, g, or t
  misc_feature (154)..(154): n is a, c, g, or t
  misc_feature (158)..(158): n is a, c, g, or t
  misc_feature (160)..(164): n is a, c, g, or t
  misc_feature (166)..(166): n is a, c, g, or t
  misc_feature (172)..(173): n is a, c, g, or t
  misc_feature (176)..(179): n is a, c, g, or t
  misc_feature (181)..(182): n is a, c, g, or t
  misc_feature (185)..(186): n is a, c, g, or t
  misc_feature (188)..(192): n is a, c, g, or t
  misc_feature (194)..(194): n is a, c, g, or t
  misc_feature (197)..(198): n is a, c, g, or t
  misc_feature (201)..(203): n is a, c, g, or t
  misc_feature (207)..(209): n is a, c, g, or t
  misc_feature (211)..(211): n is a, c, g, or t
  misc_feature (213)..(213): n is a, c, g, or t
  misc_feature (216)..(226): n is a, c, g, or t
  misc_feature (228)..(233): n is a, c, g, or t
  misc_feature (237)..(238): n is a, c, g, or t
  misc_feature (242)..(243): n is a, c, g, or t
  misc_feature (248)..(248): n is a, c, g, or t
  misc_feature (250)..(250): n is a, c, g, or t
  misc_feature (252)..(252): n is a, c, g, or t
  misc_feature (257)..(263): n is a, c, g, or t
  misc_feature (265)..(265): n is a, c, g, or t
  misc_feature (267)..(268): n is a, c, g, or t
  misc_feature (270)..(272): n is a, c, g, or t
  misc_feature (275)..(278): n is a, c, g, or t
  misc_feature (281)..(281): n is a, c, g, or t
  misc_feature (285)..(285): n is a, c, g, or t
  misc_feature (291)..(291): n is a, c, g, or t
  misc_feature (293)..(293): n is a, c, g, or t
  misc_feature (296)..(297): n is a, c, g, or t
  misc_feature (300)..(300): n is a, c, g, or t
  misc_feature (302)..(303): n is a, c, g, or t
  misc_feature (305)..(306): n is a, c, g, or t
  misc_feature (308)..(311): n is a, c, g, or t
  misc_feature (313)..(313): n is a, c, g, or t
  misc_feature (315)..(316): n is a, c, g, or t
  misc_feature (318)..(320): n is a, c, g, or t
  misc_feature (324)..(324): n is a, c, g, or t
  misc_feature (328)..(328): n is a, c, g, or t
  misc_feature (333)..(333): n is a, c, g, or t
  misc_feature (335)..(340): n is a, c, g, or t
  misc_feature (349)..(349): n is a, c, g, or t
  misc_feature (351)..(351): n is a, c, g, or t
  misc_feature (353)..(359): n is a, c, g, or t
  misc_feature (362)..(362): n is a, c, g, or t
  misc_feature (364)..(368): n is a, c, g, or t
  misc_feature (370)..(371): n is a, c, g, or t
  misc_feature (373)..(376): n is a, c, g, or t
  misc_feature (381)..(381): n is a, c, g, or t
  misc_feature (385)..(385): n is a, c, g, or t
  misc_feature (388)..(388): n is a, c, g, or t
  misc_feature (390)..(390): n is a, c, g, or t
  misc_feature (393)..(393): n is a, c, g, or t
  misc_feature (395)..(395): n is a, c, g, or t
  misc_feature (398)..(398): n is a, c, g, or t
  misc_feature (402)..(402): n is a, c, g, or t
  misc_feature (404)..(410): n is a, c, g, or t
  misc_feature (412)..(414): n is a, c, g, or t
  misc_feature (423)..(424): n is a, c, g, or t
  misc_feature (439)..(439): n is a, c, g, or t
  misc_feature (464)..(464): n is a, c, g, or t
  misc_feature (537)..(537): n is a, c, g, or t
  misc_feature (580)..(582): n is a, c, g, or t
  misc_feature (586)..(586): n is a, c, g, or t
  misc_feature (830)..(830): n is a, c, g, or t
  misc_feature (1950)..(1950): n is a, c, g, or t
  misc_feature (1987)..(1987): n is a, c, g, or t
  misc_feature (2389)..(2389): n is a, c, g, or t
  misc_feature (3856)..(3856): n is a, c, g, or t
nancnnnannnnntttnngcnntngaannnnntnttttttnctgnannnnngcttnncnnntnntnnttnaggnntaaancnnttancnnnnannnnnnaanganttnnnnntnnnnnnggcnatacnatnnnnnttnannancnntnnnantntccnannnnntntttttnnatnnnntnnaanntnnnnnanggnnaannnaaannntngntgnnnnnnnnnnnannnnnngaanncatnnaaaananantttgnnnnnnntnannannnaannnnggntgcngttttnanaanncantnnannannnnancnncnnnaaanaacnaaccnannnnnnaaaacaaangntnnnnnnnttngnnnnntnngnnnnaaatntttnagnanttncnccnacanannnnnnntnnncccccttcnnaaccaaaattaggtncagccttctaaaccttcttttcagnaacttttacacgttagtagcctataatgataagcgtaaaatgcttacattaagaaaggcgaaaactgctatgngcaaattagatatctataacgaacgtttcagatatctgtcgtnnncgtntcagatatctgtcgcaatcgtttcagatatctgtttttttcgtattgctcgaaacaggaataaacaaaaaatattcatcgtttcgttgatatctattaacaatattaaatttgcttgtttcagagctatttgctatctttgcaacaaagagaaaattaaaaacaaacatattgcaggcgttttactaacactattaaagcataccaatatattgctcggaaatatactggaacagacgcacaanaaacgtgatgcaatgttttacgagtattgaaaagaaacaataatagcgaagtatttaaaaagttgtagaacgctgctatattgaaatttagaaccttatacaacaaaacagcttacaaagcatctgtttttttgaaatacagaagaatatacatttatgacaaatatagatactacaaatatgtgctctcaccttaaaaagaagctgtttgaggctgatggcatataccattctgtttgggaagcaatacaaaaagacgaagaacttagtgccgttgttcgctctcggcagttgcacatttaccgaaatggtaagaaaataatggtgttagctggtaaggcagcacctaaacttatatgcaatgataggcttaaccagctaatagaaaggggtggtaaatgaaaagggctattgttatgggtgccagtagtggcattgggcacgaagtggcacaactgcttattgccgatgggtggactgtaggtgtggctgcacggcatatcgacaaattagccgacttacaaaatgttgctcccgaacgtgtggttgttgctaaaattgatgttactgacaacaacgccgaaacaaactttcgccaacttattgagcgcataggagggttaaatctttactttcactcagcaggaatagggtggcaaaacacaactttagaccccgacaaagaaattaaaacaatggaaaccaacgccacagcatttacacgaatggtgggtgcagcatatcgatactttactgagaatggtggcggacatattgcctgtatcacttcaattgcaggaacaaagggacttggtgtggctccagcatatagcgcaacaaaggctttgcagaatgtttatattcaggctctggaacaattggctattacaaagcatcagaatatatgctttacagatatccgaccaggctttgttgatactcccctactcgctggtgctgctcattttcctatgctaatgacaaccaaatatgttgcacaccgcattatgaaagccattaaaaaacataaacacatttgtgttatagacacccgttggcacattcttaccttcttttggcaatacattcccaactgcatttggaggcatattccacttgntcgcacataaagaatatgcaatataaatggttacgcngtagggttgtttattgttttgtatgggcttaatgaccacattggattaaacaatacacaaaaaaccgccactgcaattaaatgcaatggcggaagagatgaaaaagattaattaccagagagttatcacaacccccttgcctttagcaaaccagacgcatctggtgccttaaggcccgtaaaattggagaatatctccattaagtccattgtatttccacgactcagcactttattcctaaagtcatcgcccacttttctggtcaatgcgccgtgctttgcaaagtagtcagcaatattaacagctaatacttcagaccacaaatagctataatatcctgctgcgtaaccgcctccccaaacatggttgaaatacgatgtagaatatcgtggaggaatttgnttgttaagcaatccaacatcgtttagagcctttacttcgaagtttttagcttcggtagcagtaggaacattcttagtatcgagcatgtgccaagccatatctacgcacgttgcgccaagattttcgcctaaggcgtatgcagcctgatagtttatagatttcaacatacggtcgcacaagtcggcaggcataggctggttggttttgtaatgttttgcataatgattgaacacctctggtatgcttgcaaaactctcgttaaattgtgatggcatctccacgaaatcgcgtgccacagctgtaccacttagtgtgttgtagtagcagttcgacaacattccgtgcagcgcatgaccaaactcatggaacatagtagacacctcatcccatgttaaaagagtaggctgtccgtctggtgcctttgcataattgcacacattatatataagaggtatctgctggcgcattttgctttgctttgcaaaagcactcatccacgctccgccacgctttgaaggacgacggaaataatcgcaatagaatagtgccaactgtttaccattattgtctattacatcgaacaccttcatatctgggtgataagtaggtatgtctttgcgttccttaaaagttaaaccatataccttatttgcagcataaaaaataccattaataagaacagaatcgatattgaagtatggtttcacttcatcgtcagcaaagttaaagtgttctttcttcatctttgcagagtaatagaatctatcgtaaggttgcaaactaaagtcggctccttgtgttttgcgcgcatacgcctctatatctgccgtttctgcagcagccttaggttggtattcctttataagttggttaagaaaagcatacacattatcggtattcttcgccattacattcgataaggcatacgatgcataattcttatagcccataagttgagccttttcggcacgtaacttagcaatctccacaattataggaaaggtgttgtattctcctgttccatcggtgcgatgaatagaagcattgtaaacacgttcacgaagttggcggttttcgagattagcaagtataggctgttgtgtggtattagtaataacaatgcaataaggggctttcccgccacgactttcagcgtctttcttacattgtgcaatagcgccttcgctaagtccagcaagttctttcacatcgtttacccatacagttgatgctacagaggctttaggaagcatatttccaaagtcttgctgcaactgtgctaacttagtgtttatttctttcatacgagccattttatcttttggcaacaatgcgcctgagcgtacaaagttcttgtatatttcttccagtagcactttgtcttcgcccttcaagctgttccgctcatggtcgtacacatattttacacgttcaaaaaacttctgattaaagcttatttcgttctcnaagtttgtaagtaatggtgttacttccttttctgctgcttctatctcgggtgttttattagcttcggtaacacagaaaaatatgtttttcactctatcgagtagtaatccactcttttcgtaagccaatattgtattcttaaaa

SEQ ID NO: 836 - DNA, 4000 bp, Escherichia coli
  misc_feature (921)..(921): n is a, c, g, or t
  misc_feature (1547)..(1547): n is a, c, g, or t
  misc_feature (1989)..(1989): n is a, c, g, or t
  misc_feature (2965)..(2965): n is a, c, g, or t
gaacatggcagtgcgtgatcattatgccaatcagaagatagatgttgatgaactgatcaagacacatagtgatttggtccggaaaattgcttggcaaattcacggccgcacgcgccatacaactgaaatcgaagatgtcatgcaggttggctttaccggtctggtcaacgccgcccagcaatatacgcgcaaagaaggtgccagctttggcacctatgccagcatccgtattaagggtgcgattatcgattatcttcgcaaaagctcaaatctttgccgcacaacgattcagatgaaaaagcgctataatgtggtgcaaagccagcttcaaagtaaattgatgcgcaagccaactgttaccgaactcagcgttgccatgaacatgtctgaaactgagcttcaagaatgggaacatgcttttcaggcaaatgcacatgaatcgcttgatagcgtttatgatcaatattcgatctggtatgcctcaagtgaagattcacccgaagaaaagctgaaccaagatcaactcaaagggttgctgaaattagcgctccttgaacttagcgaaaaagaagcgctggtaatccagctctattatgtcgaagaattgaacgtttttgagattgctgctgtgctagaagtttcgactggtcgcgtctcgcagatcaaaaaatcagcgattgccaatctgcgttcctgtatttccaaatcacagcatattgattgatcatggccgaatctggatttaatgaaatcaccgaaattcagatgtcattgcagcttgccgaacatcagctgcagcataacccttttcaagaacagctgcatctatcattatctttgatatcgattgcgcgcgggtcatgcaaaatgatcatccgccccgatcggcaaagcgcgccatcgtttgttggcgccctgcanattcccgctgatcgcgcaattatgcaggcaaccatcgcgctgccacaaagcccatttgatgatttgtcacaaaagctgcgccggtcagcgccacgcccaattaatttatttgcgactttagacaaaccgctaacggttgactatgaagggattttattcattgatccgccagttgatgcggccatcacaaatctagtctggacaattccacttaaataaatgactaatggtcacttacaggaatttacgcaccatttcggtctcagattggagcagacgtgatgttccggaaaaggcctgttgtgcgcggatcagcttggccaattcgccagtcatgtcgatattcgacatttccaaagcgcctgaatggattttaccacggccatcttttaccgcctgcccaagatttcccggccccgattttgcattttcgcgaaacatattattgccaatcgcggttagacggttcgcatcagcaaatgttgcaaggccaattttcccaacagcaacaatgtttgtgccaccataagttgcctcaacagttccatctgactggataccaacactggttaacgcaaccgagccaagctgttcgacaccattttcggtaacaataccggcggcangcatcggaaccgtaattgccataccatttgccgacatgactttatggccctcgcttgtcgcaatctcaccatttaaatcaatcgagaaagacccatcgcgtgtatatagaacatcttgcaaattactgccattgcgaagcgcgaacatcccctcgccttcgacagccaaatcaagaaccgtgccggtttgccgtaattcaccctgcgaccgcataatccgcatttcagaggttgtcacgcccgacccaaccttgtttccaacacccatggtaaccgtatcggcataaacatccacaaagctggtttcccgctttttgtagccagtggttcccgcattggcgatattatttgacgtaacatcaaggtcactcaaggctgccgacatgccgctgcgaattaccgaaatcatgattatcagacctaacgtagtttgcttcgcacngtatcagcaaattttgtgccaaagcatcatcatggccaagtttggttcatttttgcaagccagcaagcaagccatccttgggtaaatcgtttcgcttaaaattcaacttgtttagccgttgctaatgcagcatattaccagattgttaagcgaaggcagaaaatggcaaaacaacaaaacacatcgctggttcccatggcaaaacgattgcccgcaacccgccccgccaaaacgggcacgcaatcattttcactctatgatggggagcgacatttcaccagccgtgaagatgtgcgtgaatttttgccggatattcttggtaaggcacttgcccgcacatggattgatgctgattttcggactgcgtttgataacgatccctgcggcgcgcttgaaagccacggtgtgtttctgcctgaaaatatgttgattgagttccaaagccaaaattccgatcgcccgcggattgttgtgtatgaacagcggccaaactcaaaattcaaagcacgcgttctgtacttgcagttggtgatgatggcagggcggtgatggttcgttccgcccctatcaaacgcgtttttcccagtctttttgtgctttctgtttgtcttttgggcatgcctgccaacgccagcgacccacaaacccagatggaaaacaaagccttcaaagaagcggtcgaggcggtcaaggacaagaattatgcacacgccataaccttgttcgaagctcaggccaagatgacacgccatgacgcgcagcataatcttgcggttttgctgaatgccggcaagggccgcccacgcaattatgttgaggcgctgttctggtcatggcaggcccagctcggcggtattgaagatgccgaagatttggcaaatgatattgtagattttctgccgccaaaggtagcagatgaagtgcggagccgcgttggtgaggcattacaagcgcgcatcgacgccaatgacctaancgcaattccgcaatttgccaattatcacttaaccattcttgccgaacctgattatgccaatgcctatatctggtattcaatcgccgctgcgatcaatctgcccaagacaagcgatgcgcgcgacgatgccgaatctcaaatcgacagcaaagatcttgttgaattgcagatgaaaacccaaaccctttttgacaaatataaattcaaaccattgccagccactggcaaaggagggaaaaatgcaagttaaggttcaatggattattgatggtcttatcgaaattgacgccgaatcaaatgaagcagccgaagcaattgctgatgaaaagcttcgcagctttatcgcagcaaaccctgaattgactgaagtgttgggcgctgttgccattcaaggccatgccgtcattgaaaccgattaaccgaaactgttcagcagctcagcaatggtcttttctagatcgtcgttatcagtttcgatctcggtaatttcctgacgcaattcttcaatacgctgtttgcgcttttccatgacatcacggatttcttcgagaaccgtggcaagacgaccgcttaaatcggcttcgttcatctcatcttcggccatttcacccatcctttttcaaatctgataatgcaacctgctaacctgtaaaacaccagcgctagatcattacattatcttttgctaaacttagcaacttcaatctgtgagacaacccttgcagataccatgccaacaacaaaagtgatgtatcagcatgttttcacgcgatctagccagcttatgccaacgcgcgaccataatgattgctttattggcgatagctggtgtttttattatgtttacagcggccaatagcccactttttgctggcagtcaccgcaaagtggaaatcgtgccttgcgacatcaaactggtatttggggctgacgatagcggcatgtcgcttgtgtcctatgatctggaaatgcaaatcagcaaccaccatggccagacagtcaccggcatttcggttcattggcttgatcgcagtg

SEQ ID NO: 837 - DNA, 4000 bp, Escherichia coli
  misc_feature (1)..(1): n is a, c, g, or t
  misc_feature (8)..(8): n is a, c, g, or t
  misc_feature (11)..(11): n is a, c, g, or t
  misc_feature (20)..(20): n is a, c, g, or t
  misc_feature (27)..(27): n is a, c, g, or t
  misc_feature (29)..(30): n is a, c, g, or t
  misc_feature (37)..(37): n is a, c, g, or t
  misc_feature (40)..(40): n is a, c, g, or t
  misc_feature (43)..(43): n is a, c, g, or t
  misc_feature (45)..(45): n is a, c, g, or t
  misc_feature (49)..(49): n is a, c, g, or t
  misc_feature (51)..(51): n is a, c, g, or t
  misc_feature (56)..(56): n is a, c, g, or t
  misc_feature (58)..(59): n is a, c, g, or t
  misc_feature (65)..(65): n is a, c, g, or t
  misc_feature (72)..(72): n is a, c, g, or t
  misc_feature (74)..(74): n is a, c, g, or t
  misc_feature (76)..(77): n is a, c, g, or t
  misc_feature (85)..(85): n is a, c, g, or t
  misc_feature (87)..(87): n is a, c, g, or t
  misc_feature (89)..(89): n is a, c, g, or t
  misc_feature (96)..(96): n is a, c, g, or t
  misc_feature (100)..(101): n is a, c, g, or t
  misc_feature (104)..(104): n is a, c, g, or t
  misc_feature (108)..(108): n is a, c, g, or t
  misc_feature (118)..(121): n is a, c, g, or t
  misc_feature (129)..(129): n is a, c, g, or t
  misc_feature (131)..(131): n is a, c, g, or t
  misc_feature (140)..(140): n is a, c, g, or t
  misc_feature (143)..(143): n is a, c, g, or t
  misc_feature (152)..(152): n is a, c, g, or t
  misc_feature (154)..(154): n is a, c, g, or t
  misc_feature (166)..(166): n is a, c, g, or t
  misc_feature (171)..(171): n is a, c, g, or t
  misc_feature (179)..(179): n is a, c, g, or t
  misc_feature (181)..(182): n is a, c, g, or t
  misc_feature (194)..(194): n is a, c, g, or t
  misc_feature (199)..(199): n is a, c, g, or t
  misc_feature (205)..(205): n is a, c, g, or t
  misc_feature (210)..(210): n is a, c, g, or t
  misc_feature (213)..(214): n is a, c, g, or t
  misc_feature (221)..(221): n is a, c, g, or t
  misc_feature (229)..(229): n is a, c, g, or t
  misc_feature (233)..(233): n is a, c, g, or t
  misc_feature (238)..(238): n is a, c, g, or t
  misc_feature (240)..(241): n is a, c, g, or t
  misc_feature (248)..(248): n is a, c, g, or t
  misc_feature (260)..(260): n is a, c, g, or t
  misc_feature (269)..(270): n is a, c, g, or t
  misc_feature (272)..(272): n is a, c, g, or t
  misc_feature (281)..(281): n is a, c, g, or t
  misc_feature (286)..(287): n is a, c, g, or t
  misc_feature (289)..(289): n is a, c, g, or t
  misc_feature (299)..(299): n is a, c, g, or t
  misc_feature (303)..(303): n is a, c, g, or t
  misc_feature (317)..(317): n is a, c, g, or t
  misc_feature (324)..(324): n is a, c, g, or t
  misc_feature (330)..(330): n is a, c, g, or t
  misc_feature (335)..(335): n is a, c, g, or t
  misc_feature (342)..(343): n is a, c, g, or t
  misc_feature (349)..(350): n is a, c, g, or t
  misc_feature (359)..(360): n is a, c, g, or t
  misc_feature (362)..(362): n is a, c, g, or t
  misc_feature (374)..(374): n is a, c, g, or t
  misc_feature (379)..(380): n is a, c, g, or t
  misc_feature (385)..(385): n is a, c, g, or t
  misc_feature (388)..(388): n is a, c, g, or t
  misc_feature (391)..(391): n is a, c, g, or t
  misc_feature (394)..(394): n is a, c, g, or t
  misc_feature (398)..(398): n is a, c, g, or t
  misc_feature (400)..(401): n is a, c, g, or t
  misc_feature (404)..(405): n is a, c, g, or t
  misc_feature (411)..(412): n is a, c, g, or t
  misc_feature (415)..(416): n is a, c, g, or t
  misc_feature (424)..(424): n is a, c, g, or t
  misc_feature (426)..(426): n is a, c, g, or t
  misc_feature (431)..(431): n is a, c, g, or t
  misc_feature (433)..(433): n is a, c, g, or t
  misc_feature (435)..(435): n is a, c, g, or t
  misc_feature (437)..(437): n is a, c, g, or t
  misc_feature (443)..(443): n is a, c, g, or t
  misc_feature (445)..(445): n is a, c, g, or t
  misc_feature (447)..(447): n is a, c, g, or t
  misc_feature (452)..(452): n is a, c, g, or t
  misc_feature (458)..(458): n is a, c, g, or t
  misc_feature (469)..(469): n is a, c, g, or t
  misc_feature (472)..(473): n is a, c, g, or t
  misc_feature (483)..(485): n is a, c, g, or t
  misc_feature (496)..(496): n is a, c, g, or t
  misc_feature (498)..(498): n is a, c, g, or t
  misc_feature (504)..(504): n is a, c, g, or t
  misc_feature (507)..(507): n is a, c, g, or t
  misc_feature (512)..(512): n is a, c, g, or t
  misc_feature (514)..(514): n is a, c, g, or t
  misc_feature (518)..(518): n is a, c, g, or t
  misc_feature (520)..(520): n is a, c, g, or t
  misc_feature (533)..(534): n is a, c, g, or t
  misc_feature (543)..(543): n is a, c, g, or t
  misc_feature (548)..(548): n is a, c, g, or t
  misc_feature (553)..(555): n is a, c, g, or t
  misc_feature (557)..(557): n is a, c, g, or t
  misc_feature (564)..(564): n is a, c, g, or t
  misc_feature (568)..(569): n is a, c, g, or t
  misc_feature (574)..(575): n is a, c, g, or t
  misc_feature (580)..(580): n is a, c, g, or t
  misc_feature (582)..(582): n is a, c, g, or t
  misc_feature (586)..(586): n is a, c, g, or t
  misc_feature (591)..(592): n is a, c, g, or t
  misc_feature (596)..(596): n is a, c, g, or t
  misc_feature (600)..(601): n is a, c, g, or t
  misc_feature (606)..(606): n is a, c, g, or t
  misc_feature (615)..(616): n is a, c, g, or t
  misc_feature (620)..(621): n is a, c, g, or t
  misc_feature (625)..(626): n is a, c, g, or t
  misc_feature (640)..(640): n is a, c, g, or t
  misc_feature (646)..(646): n is a, c, g, or t
  misc_feature (648)..(648): n is a, c, g, or t
  misc_feature (654)..(654): n is a, c, g, or t
  misc_feature (661)..(661): n is a, c, g, or t
  misc_feature (664)..(664): n is a, c, g, or t
  misc_feature (671)..(671): n is a, c, g, or t
  misc_feature (676)..(679): n is a, c, g, or t
  misc_feature (683)..(683): n is a, c, g, or t
  misc_feature (686)..(686): n is a, c, g, or t
  misc_feature (691)..(691): n is a, c, g, or t
  misc_feature (693)..(693): n is a, c, g, or t
  misc_feature (697)..(697): n is a, c, g, or t
  misc_feature (699)..(699): n is a, c, g, or t
  misc_feature (703)..(704): n is a, c, g, or t
  misc_feature (708)..(708): n is a, c, g, or t
  misc_feature (713)..(713): n is a, c, g, or t
  misc_feature (717)..(717): n is a, c, g, or t
  misc_feature (719)..(719): n is a, c, g, or t
  misc_feature (723)..(723): n is a, c, g, or t
  misc_feature (729)..(729): n is a, c, g, or t
  misc_feature (742)..(742): n is a, c, g, or t
  misc_feature (745)..(746): n is a, c, g, or t
  misc_feature (750)..(750): n is a, c, g, or t
  misc_feature (753)..(753): n is a, c, g, or t
  misc_feature (755)..(755): n is a, c, g, or t
  misc_feature (768)..(770): n is a, c, g, or t
  misc_feature (773)..(773): n is a, c, g, or t
  misc_feature (789)..(789): n is a, c, g, or t
  misc_feature (795)..(796): n is a, c, g, or t
  misc_feature (800)..(800): n is a, c, g, or t
  misc_feature (805)..(805): n is a, c, g, or t
  misc_feature (812)..(812): n is a, c, g, or t
  misc_feature (819)..(819): n is a, c, g, or t
  misc_feature (828)..(828): n is a, c, g, or t
  misc_feature (837)..(839): n is a, c, g, or t
  misc_feature (843)..(843): n is a, c, g, or t
  misc_feature (846)..(847): n is a, c, g, or t
  misc_feature (850)..(850): n is a, c, g, or t
  misc_feature (856)..(857): n is a, c, g, or t
  misc_feature (859)..(859): n is a, c, g, or t
  misc_feature (863)..(863): n is a, c, g, or t
  misc_feature (879)..(879): n is a, c, g, or t
  misc_feature (882)..(882): n is a, c, g, or t
  misc_feature (885)..(885): n is a, c, g, or t
  misc_feature (889)..(890): n is a, c, g, or t
  misc_feature (913)..(913): n is a, c, g, or t
  misc_feature (915)..(915): n is a, c, g, or t
  misc_feature (918)..(918): n is a, c, g, or t
  misc_feature (924)..(924): n is a, c, g, or t
  misc_feature (926)..(928): n is a, c, g, or t
  misc_feature (934)..(935): n is a, c, g, or t
  misc_feature (940)..(940): n is a, c, g, or t
  misc_feature (943)..(944): n is a, c, g, or t
  misc_feature (958)..(959): n is a, c, g, or t
  misc_feature (968)..(968): n is a, c, g, or t
  misc_feature (971)..(973): n is a, c, g, or t
  misc_feature (979)..(979): n is a, c, g, or t
  misc_feature (985)..(985): n is a, c, g, or t
  misc_feature (991)..(991): n is a, c, g, or t
  misc_feature (995)..(995): n is a, c, g, or t
  misc_feature (1001)..(1001): n is a, c, g, or t
  misc_feature (1004)..(1004): n is a, c, g, or t
  misc_feature (1006)..(1006): n is a, c, g, or t
  misc_feature (1010)..(1010): n is a, c, g, or t
  misc_feature (1015)..(1015): n is a, c, g, or t
  misc_feature (1017)..(1017): n is a, c, g, or t
  misc_feature (1021)..(1021): n is a, c, g, or t
  misc_feature (1025)..(1025): n is a, c, g, or t
  misc_feature (1028)..(1028): n is a, c, g, or t
  misc_feature (1034)..(1034): n is a, c, g, or t
  misc_feature (1036)..(1036): n is a, c, g, or t
  misc_feature (1038)..(1039): n is a, c, g, or t
  misc_feature (1053)..(1053): n is a, c, g, or t
  misc_feature (1066)..(1067): n is a, c, g, or t
  misc_feature (1070)..(1070): n is a, c, g, or t
  misc_feature (1073)..(1073): n is a, c, g, or t
  misc_feature (1077)..(1077): n is a, c, g, or t
  misc_feature (1081)..(1082): n is a, c, g, or t
  misc_feature (1088)..(1088): n is a, c, g, or t
  misc_feature (1094)..(1096): n is a, c, g, or t
  misc_feature (1104)..(1104): n is a, c, g, or t
  misc_feature (1118)..(1118): n is a, c, g, or t
  misc_feature (1126)..(1127): n is a, c, g, or t
  misc_feature (1132)..(1132): n is a, c, g, or t
  misc_feature (1134)..(1135): n is a, c, g, or t
  misc_feature (1138)..(1139): n is a, c, g, or t
  misc_feature (1141)..(1141): n is a, c, g, or t
  misc_feature (1151)..(1151): n is a, c, g, or t
  misc_feature (1157)..(1157): n is a, c, g, or t
  misc_feature (1187)..(1187): n is a, c, g, or t
  misc_feature (1653)..(1653): n is a, c, g, or t
  misc_feature (2534)..(2534): n is a, c, g, or t
  misc_feature (2669)..(2669): n is a, c, g, or t
  misc_feature (2714)..(2714): n is a, c, g, or t
  misc_feature (2762)..(2762): n is a, c, g, or t
  misc_feature (2850)..(2850): n is a, c, g, or t
  misc_feature (2891)..(2891): n is a, c, g, or t
  misc_feature (2957)..(2957): n is a, c, g, or t
  misc_feature (3756)..(3756): n is a, c, g, or t
nctctttnttnggggagcancagagcngnntttccancgnagngnaggntngtatntnntttgtngctctcncncnnaaaacaancnanaaagaanaaannaanaaantttttaaagnnnngactgccncntcccaaaanctnatggctggngnagttgtgggtgntgtcnccacttangnngccccgccgaangacangggagnagccnacnntctttcngccgcgcntctnactcncnnctttggnctcggccggtcnttctttgtnnanaaggataanaaagnncnttttgggttnaaanacaagctgcctgcngcgctcntcaatntcccnaaaatgnncggtgnngcccttgannanaaacgcagcggnggggnnctgtncantcnggngtgngnngannacccannggnngccttccncnccatncntnanttaatncntnttgcngcgggncgggccgtggngcnntggagccagnnngggtttgggcncnccgcancgncttcnangagncnggtgacggcacgnnaccttttcngtttnaaagnnngnacgaacnaccnnaaaanncaagngncggngctgnngaanaaanntgtgngggcttccnncgannactnngagggaaaccccgnctggangnacggcngcacctnccncgcagcncgccnnnnccgnatnattantnaaangngggnncggncccgnctgnangagnaagaanatattattgggcncannaaantancnggcgcgccgctcnnnggnggagaggaatttaccnccccanntttnaatangaagggnaaaaacngccctatcnttcccgatnnntcgnatnngcngctcanncncccnaaccaaaataatggtnttnagntgcnncgccgcgggtttaactacacggntngcnccgacngnnntggacnnctggntgnngggctgttctttanngcgttcgtntgnnncccgcncacccncttcancccncttctnganancatnacccngnccgntgcnctnagtgantntnntaaacacaccggcngcgccgtttttgnngtnccncccngtannaaagangagaannnttttatcncttctgggttgttntaaaccgnngagtntnnttnngntgggcgcccngtaccnagacggtatccgggcgcttaggggtcagcngtgtttcgataaccgtggtctgaactattgggttcttcaggactttatcgggcatgggaaaggggagaaacttcgtactaaggcattttaaaacagtgatgtggtatgccttggcggcgcggtttattgtgatgttcggctgaaaaccttcggcggtgcgcgtctaatttgactgccacaccgccaacggtactattgagttaaaaatcacatacatatgggagacaatgatgactgctcaacccccctcgtacgacccgcagaattttaggagcgacgccgttccttctgatacgcaagccatttatattcaagaaggcggagactctgcaagcaacctttttaatctgccttctaaacatcctaaaattcttcgtctacaagaaattatgattgtgtcggcgattatctgttttattcatgggctcatctcggcatttgcgccgggtaacgctaaacctcttgngggactgcctgaattcggggttgctggcggcattgggttgcttgttgtttcggctgccgtttacctcaccgtctatttcatggtgcaaaacggtaaccggctgggcctgacaattgggcttatcttcgcaattttgggcgggctgatcgctattatgtcccttctaggtaacattcttgatactcaacgctacggttttgtgccgctctatgctggctggtttattgccaatgttctgtggattcgcgccgctttcgacccggcagtgaaagctgctctcaagtaggtttccgtaacttttcggctgcaccgtgaaagtagcctgcaaaaccggccgcaccccgccaactgggatgcggccggttcctatatgtactcttcgtgctgcaaagcagaaacgtgagaggggcaaacggtgaaagagccctccgactgcactaaaatagtaaggatgggcaggcccctcaaaattgtagggtgcgcccctaacctcaggaagaacgcagagaagagtagcaatgaccgatcccgtgcaggagaccgagaacgtgcctgaatcggcgcaaaccctcgccagcatcgcacagattctcaatgaaaaccccgaaagtgggcttgagattgtgcgcgccgcctttgacgctgagcgcgagcgcgcactgaccgccctccgcgaacgtgccaaagattttgaatcgcttaaaacggtgcgcctaggctttttcggcgataaggggagcatgagcttggcaaacaagcaaatgcgtgaccttcagaatcagcacaagggacccgtggggaaactgctggggcaggcacgtgcggcgctcaccgaggctattgaggcgcgtactgctgaactggaggccgagcgcgaggcncgcatcctagaggaagaagcagttgatgtgacagcggcttcagcgcggcgttcgctgggtgggcggcatcctgtggcgctcatgcaggaaaaactcaccgatatcttcgtaggtatgggctgggaagtcgctgangggccggagctggaatctgagtggtacaactttgatgccctgaanattaagcctgaccacccggcacgcgatatgcaagacaccttctacgtngagccgcgagaggcacatttggtactgcgcacccacacctccccggtgcagatgcgcgccatgcttacccgtgagctgccgttatacnttgtgtgccccggtcaggtgtaccgtacagatgagctggangccacacacacccccgtattccatcagattgaggggcttgcggttgataaaggcctgacgatggcngatatgaaaggcaccctggagtatatggcccgcgccatgtttggtgaggaagctaggattcgtttgcgcccgaacttcttccccttcaccgagccttccgctgagctagatttgtggcacccgaacgccaagggtggtccgcaatggattgaatggggcggttgcggcatggtaaaccccaatgtgttgcgtgcggccgggatcgaccccgaaatatattcggggttcgccttcggcatgggtattgaacgtacccttatgttccgtaataacgtccccgatatgcatgacatgattgagggcgacattcgtttctctgagcagttcgggatggagatttaaaacaatgcgagtacccctatcatggttgcgtgagttcgcgcctgttcctgaggacgcgacggctgaagacgtactggacaccctcgtgaaggttgggctggaagaggaggctgtgcaccgtccggccgatgagatctctggccctattgtggtcggtcaggtgctctcgatagaacctgagacgcattctaacggtaagactgtgaactggtgccaggtgcgtgttgttcctgaggggcagcagcagactctcaccggtaaaggtatcgaagaatccggtgtgcagggcattatctgcggcgcccacaacttcaaggtcggcgacaaagttgtggtgaccctccccggtgccgtcctacccggaaatttcgctattaccgcccgtaaaacctatgggcacaagtctgccggtatgattgcctccacccgcgagctgggtattggtgaggaccacggnggtattttggtgctctccaccctgggactcgatccggaacttgggtcagatgcgctggagcttttgggtctgtatgacgaagcagccgaggttaatgtgactcctgatcgcggatatgcgttttcgattcgcggtattgcccgtgaatacgcgcatgcgaccggaacttctttcaacgattttgttctggaatacggcgctcgcgcccccaaagcgaactccgaaggcattccggtacgcctgg

SEQ ID NO: 838 - DNA, 4000 bp, Escherichia coli
  misc_feature (99)..(99): n is a, c, g, or t
  misc_feature (1954)..(1954): n is a, c, g, or t
  misc_feature (1996)..(1996): n is a, c, g, or t
  misc_feature (2145)..(2145): n is a, c, g, or t
cctttgtcacctttgtcacctttgtcgccagtaattcccttgtctccagaaagtcccttgtcgccagaaagtcccttgtctccttgtgaacctttgtcnccagtggcacctttgtctccagtggcaccagggggaccaagtggacccttgcctccaagtggaccttgttgtccaggttgaccaggttgacctttgtcgccaggttgaccaggcggaccagcaatacctttgtcgccaggttgacctcgctctccagatgcaccagtggtgcctttagaattaaaattagaagtattttttgaagtaggtttagattttacattatttttagatgtttcatttttttctttttgaatagaagacttagcagatggttcagatgattttcgcaaccggacatcaaaaacggaatatactgaagagaataaatcatttacaacaacccaaacaacatccacatcattgatagatttaggaagagggttttcagagtctcccactacttcagaaaaaataccatctttgaccctaagatgaaaatttcccttccataaaggagaaaaacttttttcgcgaatttgatcatcagatggtttaacatcaattagcgatatctgagcctcataaacgccagattgcttaaatggcgactgaccctggatttcaattcgtggctgagatgacacagtggttggttaatgtatgaagtatttcaggatttggatcgcaaaatccaactaaaatgccaaattatcaagaataatcacaattaaaatggtatttatctagatgaagataaaaaattgacaagttgtttggtaaaaaaaataaaaaagtagaggcaaaagtagagaaaaaaggatcagaaagcacagttaccaaagaaaccagcttagtagatccaagttacaatattaaaaaattatttaaaaaaggcatcaacttaatggcagatgaaaaactagacgacgccatagaagtatttgagcaagcattacgaattgaaccagacaatattgaaatcttaatgaaattaggatatgcaagatttcatctagaggattacaatgatgcactaaaagtatatgataaaattttagaaatagatgtaacgaatccagaagcatggaatcttaaaggattagttcattatgaacagagaaaatattcgcaagcattagatgcagtcaacaaagcaatagagtcagacaagacatatggaatggcatggtacaacaaagcatgtttcctatcattgctaaatcaagtaccagaatcactacaagcactaaaacacgcaatagaaatagatgttaaaaatgctagaaagtcaattagagataaagactttgtcaacgtaagaattgaagaaggattcaaaagaattgaagaagttgtggttctagaatcagttaaacaaggataccatacaataggagcaattgtttggacaacattcttagataaaattgatgcagaaaaagctttaagaaaactactagaaaaaggactaatcgtacagaatgaaaaacgtgacggtctaagtaaaataccaatttatgatctttcagataactttgcagaaaaagtaggtaaagaaaaaataggattatttggaattacaagaaagaaacttccaaagccagttaaaaatttgaagataatgagtcaagcaattcaatcggcaaaagaggcaattgaggaggcaaacatagagaaagcagtagaggcttttgatcaattcattgatccagcaaaatcaggggagcaaatgatagagaatttctttgaagctcacagagaaataagattatggaaaataagactaagcgatagaggtgcagattacatgatagataacaaagacaagatgatagaggttttagaggacgtggaagttacaataactaaaaaacttagagacgaaatagcctaatcaatcatacagagaaantccggcagataacatagtttaatttttgggcatgaatatttncagattattccgcagacaaatcccaataattggcatcttgttgtttgtcagtaggtttctccaaatttttccattccttaaaggatctaacatacaattttgtattagatagtcctgcagatttaagagcatagtatgccaatcccganaaagttcccacactgccacagtaagtgattatctcagagtcaccagaaatatccctattatcaaataatcttttcatgtcttcttttgaacgaagaattccatcactgcttgccagtgtacgataaggaagactaacagcaccaggaatatgttgttcgagatagttcaagcgttccctgttgtcaattaaaatcacatcgtcacgtgattttacagattccaggtattcagaagttgccaaaatattagattgtaaattcatagaatgttccttgttagatatttcgggagttagtgaatcagtttccaatcccaatgatttccaattaccataagttgtttcaagtaaagtgacatcggagtgtccaatccattctaacgtccaagctactctggatgccaaagcgccaaaagtatcatcgtaaacaacgacaggagtttcatcgtcgatacctagagaatttacaagtttcaaaacacgttcaggactatcatcagacaacaaagtggctaaaggtaaatttacagaatttggaatatgatcttgcttgtaatcaccttcacgtctaacgtcaattactctaacgctattgtctcgaatttcagaacgtagtgaatcaatatcagtagtaactttaacagattcagtcaagcagcacattcacccttaccggtttttgtatgatagctagtgtcactgccataatcaagatagaaatcaggatcgtcctctttcgtcggaggagcaacaagaggttccaatacttttttgatatcaccaatagatttaatgtcagaatcctcactatcatttacaattctatgaatccaagatttcaaagtgtcatcagattgcttatttgctttaaacagttcaattatttttagaataacaggaattactctcttagctggtaccctaagacatgtttgacctaatgtagtgtcagcatcaaaacgaccgccaagagacatttgataatttggatacatgtcttttcccaaacgaccgccaccaccaaagaaaccaattgttgcaataccatgctgtgcacatgagtttggacatccgctaatcttaattgaagaatcagcgagatcatcatcctcgtcaagttttaattcaagaaattttctttgaatttcttttgcaagtctatgagaattagtcaatgccaaattacaagaagttgttccagagcaaccgacaggggcagtcatagttaaaccgccagattttgccaatccagtttcaagaagtcgagaatacaatttgactaaatcatcttcatgcacatatcgtagtgccacattctgaacaaatccagatctagccttgccttcagaagagaactcacgaataagagcagccatagaatttaattgatttgaagtaatgtcaccagcttctaaagtaataaagacagaacgatagtcagactgtttttgttttattgtgtttgatttaagccatctagcatatccgtcaggaaccgagcttccgccctcgtcactaatttttagtgggcgagtgattttatcaggagtggtgtcaacttttagtttagtaactacagattgagtagctctgacaattgcccgttctttcaatacgagattttggaatttttcccaacccatgtcattaacaagataacgcattctatttcttgcaagattttttctatcacctaatctatcaaatattctcatgacagcaatagaagtgtaaagtaaatcttcctcaggagtgaaatcttccaactgatgtccaacaaaggatcgattgcccaaaccaccaccaaggaaaattttgaaacctttttgtttagagccgttgatttgttgaatttc

SEQ ID NO: 839 - DNA, 4000 bp, Escherichia coli
  misc_feature (44)..(45): n is a, c, g, or t
  misc_feature (47)..(47): n is a, c, g, or t
  misc_feature (49)..(49): n is a, c, g, or t
  misc_feature (51)..(56): n is a, c, g, or t
  misc_feature (59)..(65): n is a, c, g, or t
  misc_feature (67)..(67): n is a, c, g, or t
  misc_feature (69)..(74): n is a, c, g, or t
  misc_feature (76)..(76): n is a, c, g, or t
  misc_feature (79)..(83): n is a, c, g, or t
  misc_feature (89)..(91): n is a, c, g, or t
  misc_feature (93)..(94): n is a, c, g, or t
  misc_feature (96)..(97): n is a, c, g, or t
  misc_feature (99)..(101): n is a, c, g, or t
  misc_feature (103)..(106): n is a, c, g, or t
  misc_feature (108)..(118): n is a, c, g, or t
  misc_feature (120)..(120): n is a, c, g, or t
  misc_feature (122)..(129): n is a, c, g, or t
  misc_feature (131)..(140): n is a, c, g, or t
  misc_feature (142)..(142): n is a, c, g, or t
  misc_feature (144)..(146): n is a, c, g, or t
  misc_feature (148)..(150): n is a, c, g, or t
  misc_feature (152)..(154): n is a, c, g, or t
  misc_feature (156)..(161): n is a, c, g, or t
  misc_feature (163)..(174): n is a, c, g, or t
  misc_feature (177)..(179): n is a, c, g, or t
  misc_feature (182)..(184): n is a, c, g, or t
  misc_feature (186)..(187): n is a, c, g, or t
  misc_feature (189)..(189): n is a, c, g, or t
  misc_feature (191)..(194): n is a, c, g, or t
  misc_feature (197)..(199): n is a, c, g, or t
  misc_feature (201)..(201): n is a, c, g, or t
  misc_feature (203)..(204): n is a, c, g, or t
  misc_feature (207)..(209): n is a, c, g, or t
  misc_feature (211)..(214): n is a, c, g, or t
  misc_feature (216)..(218): n is a, c, g, or t
  misc_feature (220)..(222): n is a, c, g, or t
  misc_feature (224)..(226): n is a, c, g, or t
  misc_feature (228)..(229): n is a, c, g, or t
  misc_feature (231)..(237): n is a, c, g, or t
  misc_feature (239)..(244): n is a, c, g, or t
  misc_feature (247)..(250): n is a, c, g, or t
  misc_feature (252)..(253): n is a, c, g, or t
  misc_feature (257)..(267): n is a, c, g, or t
  misc_feature (269)..(273): n is a, c, g, or t
  misc_feature (275)..(275): n is a, c, g, or t
  misc_feature (277)..(285): n is a, c, g, or t
  misc_feature (287)..(288): n is a, c, g, or t
  misc_feature (290)..(300): n is a, c, g, or t
  misc_feature (302)..(302): n is a, c, g, or t
  misc_feature (304)..(313): n is a, c, g, or t
  misc_feature (315)..(323): n is a, c, g, or t
  misc_feature (325)..(325): n is a, c, g, or t
  misc_feature (327)..(327): n is a, c, g, or t
  misc_feature (329)..(329): n is a, c, g, or t
  misc_feature (332)..(337): n is a, c, g, or t
  misc_feature (339)..(340): n is a, c, g, or t
  misc_feature (342)..(348): n is a, c, g, or t
  misc_feature (351)..(358): n is a, c, g, or t
  misc_feature (360)..(364): n is a, c, g, or t
  misc_feature (366)..(368): n is a, c, g, or t
  misc_feature (371)..(374): n is a, c, g, or t
  misc_feature (377)..(379): n is a, c, g, or t
  misc_feature (381)..(382): n is a, c, g, or t
  misc_feature (384)..(385): n is a, c, g, or t
  misc_feature (387)..(387): n is a, c, g, or t
  misc_feature (389)..(400): n is a, c, g, or t
  misc_feature (402)..(403): n is a, c, g, or t
  misc_feature (405)..(409): n is a, c, g, or t
  misc_feature (411)..(418): n is a, c, g, or t
  misc_feature (420)..(432): n is a, c, g, or t
  misc_feature (434)..(435): n is a, c, g, or t
  misc_feature (438)..(440): n is a, c, g, or t
  misc_feature (442)..(442): n is a, c, g, or t
  misc_feature (444)..(445): n is a, c, g, or t
  misc_feature (447)..(454): n is a, c, g, or t
  misc_feature (456)..(457): n is a, c, g, or t
  misc_feature (461)..(463): n is a, c, g, or t
  misc_feature (468)..(474): n is a, c, g, or t
  misc_feature (476)..(478): n is a, c, g, or t
  misc_feature (480)..(480): n is a, c, g, or t
  misc_feature (482)..(484): n is a, c, g, or t
  misc_feature (488)..(492): n is a, c, g, or t
  misc_feature (494)..(496): n is a, c, g, or t
  misc_feature (499)..(502): n is a, c, g, or t
  misc_feature (504)..(506): n is a, c, g, or t
  misc_feature (509)..(512): n is a, c, g, or t
  misc_feature (514)..(516): n is a, c, g, or t
  misc_feature (519)..(520): n is a, c, g, or t
  misc_feature (522)..(526): n is a, c, g, or t
  misc_feature (529)..(536): n is a, c, g, or t
  misc_feature (538)..(548): n is a, c, g, or t
  misc_feature (550)..(555): n is a, c, g, or t
  misc_feature (557)..(560): n is a, c, g, or t
  misc_feature (563)..(564): n is a, c, g, or t
  misc_feature (566)..(577): n is a, c, g, or t
  misc_feature (579)..(585): n is a, c, g, or t
  misc_feature (587)..(587): n is a, c, g, or t
  misc_feature (591)..(598): n is a, c, g, or t
  misc_feature (600)..(602): n is a, c, g, or t
  misc_feature (604)..(610): n is a, c, g, or t
  misc_feature (612)..(616): n is a, c, g, or t
  misc_feature (618)..(622): n is a, c, g, or t
  misc_feature (624)..(633): n is a, c, g, or t
  misc_feature (635)..(636): n is a, c, g, or t
  misc_feature (638)..(647): n is a, c, g, or t
  misc_feature (649)..(655): n is a, c, g, or t
  misc_feature (657)..(658): n is a, c, g, or t
  misc_feature (661)..(661): n is a, c, g, or t
  misc_feature (664)..(664): n is a, c, g, or t
  misc_feature (666)..(667): n is a, c, g, or t
  misc_feature (671)..(675): n is a, c, g, or t
  misc_feature (677)..(682): n is a, c, g, or t
  misc_feature (684)..(686): n is a, c, g, or t
  misc_feature (688)..(694): n is a, c, g, or t
  misc_feature (698)..(700): n is a, c, g, or t
  misc_feature (702)..(702): n is a, c, g, or t
  misc_feature (704)..(704): n is a, c, g, or t
  misc_feature (706)..(708): n is a, c, g, or t
  misc_feature (711)..(713): n is a, c, g, or t
  misc_feature (715)..(723): n is a, c, g, or t
  misc_feature (725)..(726): n is a, c, g, or t
  misc_feature (728)..(730): n is a, c, g, or t
  misc_feature (732)..(734): n is a, c, g, or t
  misc_feature (736)..(745): n is a, c, g, or t
  misc_feature (748)..(750): n is a, c, g, or t
  misc_feature (752)..(754): n is a, c, g, or t
  misc_feature (756)..(756): n is a, c, g, or t
  misc_feature (759)..(759): n is a, c, g, or t
  misc_feature (761)..(763): n is a, c, g, or t
  misc_feature (766)..(772): n is a, c, g, or t
  misc_feature (774)..(776): n is a, c, g, or t
  misc_feature (778)..(793): n is a, c, g, or t
  misc_feature (795)..(796): n is a, c, g, or t
  misc_feature (798)..(802): n is a, c, g, or t
  misc_feature (804)..(806): n is a, c, g, or t
  misc_feature (808)..(808): n is a, c, g, or t
  misc_feature (811)..(814): n is a, c, g, or t
  misc_feature (817)..(821): n is a, c, g, or t
  misc_feature (824)..(827): n is a, c, g, or t
  misc_feature (830)..(831): n is a, c, g, or t
  misc_feature (834)..(834): n is a, c, g, or t
  misc_feature (836)..(847): n is a, c, g, or t
  misc_feature (849)..(851): n is a, c, g, or t
  misc_feature (853)..(853): n is a, c, g, or t
  misc_feature (855)..(863): n is a, c, g, or t
  misc_feature (865)..(866): n is a, c, g, or t
  misc_feature (869)..(871): n is a, c, g, or t
  misc_feature (873)..(875): n is a, c, g, or t
  misc_feature (877)..(886): n is a, c, g, or t
  misc_feature (888)..(902): n is a, c, g, or t
  misc_feature (904)..(904): n is a, c, g, or t
  misc_feature (906)..(916): n is a, c, g, or t
  misc_feature (918)..(918): n is a, c, g, or t
  misc_feature (920)..(925): n is a, c, g, or t
  misc_feature (927)..(935): n is a, c, g, or t
  misc_feature (939)..(939): n is a, c, g, or t
  misc_feature (941)..(950): n is a, c, g, or t
  misc_feature (952)..(952): n is a, c, g, or t
  misc_feature (954)..(959): n is a, c, g, or t
  misc_feature (961)..(970): n is a, c, g, or t
  misc_feature (972)..(974): n is a, c, g, or t
  misc_feature (976)..(982): n is a, c, g, or t
  misc_feature (984)..(985): n is a, c, g, or t
  misc_feature (987)..(991): n is a, c, g, or t
  misc_feature (993)..(998): n is a, c, g, or t
  misc_feature (1000)..(1004): n is a, c, g, or t
  misc_feature (1006)..(1022): n is a, c, g, or t
  misc_feature (1024)..(1026): n is a, c, g, or t
  misc_feature (1028)..(1034): n is a, c, g, or t
  misc_feature (1036)..(1049): n is a, c, g, or t
  misc_feature (1051)..(1062): n is a, c, g, or t
  misc_feature (1065)..(1067): n is a, c, g, or t
  misc_feature (1069)..(1070): n is a, c, g, or t
  misc_feature (1072)..(1085): n is a, c, g, or t
  misc_feature (1087)..(1089): n is a, c, g, or t
  misc_feature (1091)..(1097): n is a, c, g, or t
  misc_feature (1100)..(1114): n is a, c, g, or t
  misc_feature (1116)..(1122): n is a, c, g, or t
  misc_feature (1125)..(1128): n is a, c, g, or t
  misc_feature (1131)..(1134): n is a, c, g, or t
  misc_feature (1136)..(1138): n is a, c, g, or t
  misc_feature (1140)..(1151): n is a, c, g, or t
  misc_feature (1153)..(1159): n is a, c, g, or t
  misc_feature (1161)..(1163): n is a, c, g, or t
  misc_feature (1165)..(1166): n is a, c, g, or t
  misc_feature (1168)..(1185): n is a, c, g, or t
  misc_feature (1188)..(1189): n is a, c, g, or t
  misc_feature (1191)..(1191): n is a, c, g, or t
  misc_feature (1195)..(1195): n is a, c, g, or t
  misc_feature (1197)..(1208): n is a, c, g, or t
  misc_feature (1210)..(1214): n is a, c, g, or t
  misc_feature (1216)..(1219): n is a, c, g, or t
  misc_feature (1221)..(1221): n is a, c, g, or t
  misc_feature (1224)..(1231): n is a, c, g, or t
  misc_feature (1233)..(1233): n is a, c, g, or t
  misc_feature (1235)..(1237): n is a, c, g, or t
  misc_feature (1239)..(1248): n is a, c, g, or t
  misc_feature (1250)..(1250): n is a, c, g, or t
  misc_feature (1252)..(1252): n is a, c, g, or t
  misc_feature (1254)..(1259): n is a, c, g, or t
  misc_feature (1261)..(1262): n is a, c, g, or t
  misc_feature (1265)..(1270): n is a, c, g, or t
  misc_feature (1272)..(1276): n is a, c, g, or t
  misc_feature (1278)..(1280): n is a, c, g, or t
  misc_feature (1284)..(1288): n is a, c, g, or t
  misc_feature (1290)..(1298): n is a, c, g, or t
  misc_feature (1300)..(1300): n is a, c, g, or t
  misc_feature (1303)..(1304): n is a, c, g, or t
  misc_feature (1307)..(1309): n is a, c, g, or t
  misc_feature (1311)..(1312): n is a, c, g, or t
  misc_feature (1314)..(1314): n is a, c, g, or t
  misc_feature (1316)..(1317): n is a, c, g, or t
  misc_feature (1321)..(1323): n is a, c, g, or t
  misc_feature (1325)..(1325): n is a, c, g, or t
  misc_feature (1327)..(1327): n is a, c, g, or t
  misc_feature (1330)..(1330): n is a, c, g, or t
  misc_feature (1332)..(1335): n is a, c, g, or t
  misc_feature (1338)..(1343): n is a, c, g, or t
  misc_feature (1345)..(1346): n is a, c, g, or t
  misc_feature (1348)..(1349): n is a, c, g, or t
  misc_feature (1351)..(1351): n is a, c, g, or t
  misc_feature (1354)..(1357): n is a, c, g, or t
  misc_feature (1360)..(1361): n is a, c, g, or t
  misc_feature (1363)..(1363): n is a, c, g, or t
  misc_feature (1366)..(1367): n is a, c, g, or t
  misc_feature (1369)..(1374): n is a, c, g, or t
  misc_feature (1376)..(1377): n is a, c, g, or t
  misc_feature (1379)..(1384): n is a, c, g, or t
  misc_feature (1387)..(1397): n is a, c, g, or t
  misc_feature (1399)..(1410): n is a, c, g, or t
  misc_feature (1412)..(1431): n is a, c, g, or t
  misc_feature (1433)..(1439): n is a, c, g, or t
  misc_feature (1441)..(1447): n is a, c, g, or t
  misc_feature (1449)..(1450): n is a, c, g, or t
  misc_feature (1452)..(1452): n is a, c, g, or t
  misc_feature (1457)..(1460): n is a, c, g, or t
  misc_feature (1462)..(1463): n is a, c, g, or t
  misc_feature (1466)..(1468): n is a, c, g, or t
  misc_feature (1470)..(1471): n is a, c, g, or t
  misc_feature (1475)..(1480): n is a, c, g, or t
  misc_feature (1483)..(1485): n is a, c, g, or t
  misc_feature (1487)..(1487): n is a, c, g, or t
  misc_feature (1489)..(1491): n is a, c, g, or t
  misc_feature (1493)..(1493): n is a, c, g, or t
  misc_feature (1495)..(1499): n is a, c, g, or t
  misc_feature (1501)..(1503): n is a, c, g, or t
  misc_feature (1505)..(1513): n is a, c, g, or t
  misc_feature (1515)..(1518): n is a, c, g, or t
  misc_feature (1520)..(1523): n is a, c, g, or t
  misc_feature (1525)..(1529): n is a, c, g, or t
  misc_feature (1531)..(1531): n is a, c, g, or t
  misc_feature (1534)..(1541): n is a, c, g, or t
  misc_feature (1543)..(1553): n is a, c, g, or t
  misc_feature (1557)..(1557): n is a, c, g, or t
  misc_feature (1561)..(1561): n is a, c, g, or t
  misc_feature (1563)..(1563): n is a, c, g, or t
  misc_feature (1565)..(1565): n is a, c, g, or t
  misc_feature (1567)..(1570): n is a, c, g, or t
  misc_feature (1573)..(1573): n is a, c, g, or t
  misc_feature (1575)..(1575): n is a, c, g, or t
  misc_feature (1577)..(1580): n is a, c, g, or t
  misc_feature (1583)..(1583): n is a, c, g, or t
  misc_feature (1585)..(1588): n is a, c, g, or t
  misc_feature (1593)..(1593): n is a, c, g, or t
  misc_feature (1597)..(1597): n is a, c, g, or t
  misc_feature (1601)..(1602): n is a, c, g, or t
  misc_feature (1610)..(1611): n is a, c, g, or t
  misc_feature (1616)..(1619): n is a, c, g, or t
  misc_feature (1622)..(1622): n is a, c, g, or t
  misc_feature (1630)..(1631): n is a, c, g, or t
  misc_feature (1633)..(1634): n is a, c, g, or t
  misc_feature (1637)..(1637): n is a, c, g, or t
  misc_feature (1639)..(1639): n is a, c, g, or t
  misc_feature (1642)..(1643): n is a, c, g, or t
  misc_feature (1653)..(1653): n is a, c, g, or t
  misc_feature (1675)..(1675): n is a, c, g, or t
  misc_feature (1677)..(1677): n is a, c, g, or t
  misc_feature (1683)..(1683): n is a, c, g, or t
  misc_feature (1702)..(1702): n is a, c, g, or t
  misc_feature (1706)..(1706): n is a, c, g, or t
  misc_feature (1712)..(1712): n is a, c, g, or t
  misc_feature (1724)..(1724): n is a, c, g, or t
  misc_feature (1727)..(1727): n is a, c, g, or t
  misc_feature (1737)..(1737): n is a, c, g, or t
  misc_feature (1786)..(1786): n is a, c, g, or t
cgccgaacacattcgtcaggaaacccacactttgccatgatatnngntngnnnnnntgnnnnnnntngnnnnnncngcnnnnntcgccnnngnncnnannncnnnntnnnnnnnnnnncncnnnnnnnncnnnnnnnnnngntnnnannngnnnannnnnngnnnnnnnnnnnntgnnnacnnngnntngnnnnagnnncncnnccnnntnnnnannngnnncnnngnnannnnnnntnnnnnngannnncnnttcnnnnnnnnnnncnnnnncnannnnnnnnncnncnnnnnnnnnnncntnnnnnnnnnngnnnnnnnnnancntnacnnnnnnanntnnnnnnncgnnnnnnnngnnnnncnnntcnnnngcnnncnncnnancnnnnnnnnnnnncnncnnnnnannnnnnnncnnnnnnnnnnnnngnngcnnntngnncnnnnnnnngnnagcnnngctcnnnnnnnannngncnnnaccnnnnngnnnaannnncnnnaannnnannntcnncnnnnncgnnnnnnnncnnnnnnnnnnngnnnnnntnnnnaanngnnnnnnnnnnnntnnnnnnnancccnnnnnnnnannnannnnnnncnnnnntnnnnngnnnnnnnnnnanngnnnnnnnnnngnnnnnnngnnccnggngnnggcnnnnngnnnnnncnnncnnnnnnngggnnngngnannnttnnnannnnnnnnnanngnnngnnngnnnnnnnnnncgnnnannncncgncnnncannnnnnngnnngnnnnnnnnnnnnnnnncnncnnnnngnnntngtnnnnggnnnnnggnnnngcnnccntnnnnnnnnnnnngnnnangnnnnnnnnngnnggnnngnnnannnnnnnnnncnnnnnnnnnnnnnnnangnnnnnnnnnnncntnnnnnncnnnnnnnnngggnannnnnnnnnngngnnnnnngnnnnnnnnnncnnnannnnnnnanncnnnnngnnnnnnannnnnannnnnnnnnnnnnnnnntnnncnnnnnnngnnnnnnnnnnnnnnannnnnnnnnnnncgnnnannannnnnnnnnnnnnngnnncnnnnnnnaannnnnnnnnnnnnnngnnnnnnnggnnnnaannnngnnntnnnnnnnnnnnngnnnnnnngnnnannannnnnnnnnnnnnnnnnnggnnangggngnnnnnnnnnnnngnnnnntnnnngntcnnnnnnnntngnnngnnnnnnnnnnancntnnnnnngnntcnnnnnngnnnnntnnnccannnnnannnnnnnnncngtnnggnnncnntngnncgannncncnacntnnnngcnnnnnncnnanncntcnnnnaanncnacnngnnnnnngnnannnnnncgnnnnnnnnnnncnnnnnnnnnnnncnnnnnnnnnnnnnnnnnnnncnnnnnnngnnnnnnncnncngccgnnnngnncannnanngccnnnnnnagnnncngnnncncnnnnncnnnannnnnnnnntnnnngnnnngnnnnngnatnnnnnnnncnnnnnnnnnnntccngcgntngncnnnnggncncnnnncgngnnnnagggngaanccgnnaaacaccnngccgnnnncgncggggaanngnnatncngcnngcgcttgagntgtcatccggccgccaaaggantngccacnggccaatagagcaagctcngganccaggngtgatgcttcgngcnccgccgcgcngaagatcgtcgtgatccaccagactgaggtggagcgttttcattccggntttcgcaggcaaaaggaagccgaaacgattggtggtgcgattcggaagtcattcaaggcgtttgatcctgtgcggaattatcggaagccctctggttgattggcagggttgaggcaatgaagggagtcgcctggcacagttcccgttttcaacggtgagaaggaacaggtcgtgctttactaattccacctggacacgaatactgagctttttgtcgaagtcgaacgcggcgtgactgacttttcaaattggtcgcgcgcgatggtctattggtttggcgagccaattcgtccgcatttggaacgcatgcggcggtctcgcggccgcggcgcgctgtggggggcagggttcgttttggcagtcttgctcctggtggcaggcattggcgtttcgcgacgttccggggaacagcttcaggaagccacgcgcgcccttacccacacacgcgaagtcttggaaagcctggcagacatttccgccagaatgagtgaagtggaaagctccgcgcgcagcttcgccatttccggaaaacagtcacatctgaaccctttttatacagcggctaaatccgtgccgcctcaagtggatgaactcaagcacctcctccgaagtgacccaggatcactggagtctctcacacaaatcgagcccgtgatcactcagcatctgaaggtgatgaaggacatggtggaactgggcaatcgcaatctgtttcgaggttttggacaacgtggtttgacagacgagggcagcaagctgatggaacaaattcggggcgctttgagttcgatggagaaggagcaacgtgcgcgattggctcagcaacaagcgaagctcgcggcaaagacagatcacgtcgcattgatcagtttcgcaggaagcgctctggccggagtacttgtgctcgcgtgcgccatggccacattcggtgccgtgcaccgacgaaggaaagcggacgagaaactggatcgcttgctgggttcgatgcctgacggattgttcatcgtcaacgcggaaggaaaaattgtcagcagcaatgctcaagcggaaaagttgttcggctacagcgaccgggaactccagggcgagagcatggccctgctggttccggaacgttttcggcagacccaaaggcaatactacgccggatacttctcccagcgttccggccggatgccgacaacgactttggagctttgtggtttgcacaaggacggtcgggaattcccaatcgagatgagcacaaagccgctggcattggacaatggatcggtcgtcacaagcgcaattcgcgatatcactggacgcaaacaggtggaaaagcaaatttccaagttgaacaaggaactggaacttcgcgccgtcgaattggaaacagcctacaaggagctcgaagccttcagttattcggtttcgcatgacctgcgttcgccgctccagaacattgatagcttcagccagatcctgatagaggattatgccaatcggcttgattccgatggccgggattacgttcaacgactgcgcgccagttgccaacacatggaggagatcattgatgctctgttggcgttgtcgaatatgatgcgaagcgagttgcagatagaagccttcgatcttagcgctttggccaataccgtggctgcggacttgaagctaaagaatccggaccgcctcgtggactgggtcatcgccgagggactgagcgtcgagggcgacccgcaactgttgcgagtggtgctggagaatctgtttggcaacgcgtggaagttcacggcgaatcggccgcgcgcgcggattgaattcggagcgcttccacaatccaacggcgcccgcacttatttcgtgcgcgacgacggtgcgggtttcgatatggcgcgggcagccagtttgttcacgccgttcaagcgtctgcacgaccaaagcgaatttcgcggcacgggcatcgggctggcaaccgtgcagcgcgttatccaacgccatcgaggaaaaatctgggcggaaggtgttgtcgatcgcggcgcgactttttgcttcaccctgacggatgacgggggcgcacctaatggacgaaatcatgattccaccccaccaaagtgacttgtccgaagcagagctcccaagcaaacccttgcgggtcctgttcgccgatgactcggaaaatgacgttctgatgctgttacgcgtcttacgcaaggccggctatgagcctgt

SEQ ID NO: 840 - DNA, 4000 bp, Escherichia coli
  misc_feature (2)..(2): n is a, c, g, or t
  misc_feature (62)..(62): n is a, c, g, or t
  misc_feature (80)..(80): n is a, c, g, or t
  misc_feature (83)..(83): n is a, c, g, or t
  misc_feature (137)..(137): n is a, c, g, or t
  misc_feature (149)..(149): n is a, c, g, or t
  misc_feature (197)..(197): n is a, c, g, or t
  misc_feature (215)..(215): n is a, c, g, or t
  misc_feature (228)..(228): n is a, c, g, or t
  misc_feature (233)..(233): n is a, c, g, or t
  misc_feature (242)..(242): n is a, c, g, or t
  misc_feature (257)..(257): n is a, c, g, or t
  misc_feature (272)..(272): n is a, c, g, or t
  misc_feature (329)..(329): n is a, c, g, or t
  misc_feature (356)..(356): n is a, c, g, or t
  misc_feature (386)..(386): n is a, c, g, or t
  misc_feature (392)..(392): n is a, c, g, or t
  misc_feature (416)..(416): n is a, c, g, or t
  misc_feature (431)..(431): n is a, c, g, or t
  misc_feature (479)..(479): n is a, c, g, or t
  misc_feature (503)..(503): n is a, c, g, or t
  misc_feature (533)..(533): n is a, c, g, or t
  misc_feature (697)..(697): n is a, c, g, or t
  misc_feature (788)..(788): n is a, c, g, or t
  misc_feature (824)..(824): n is a, c, g, or t
  misc_feature (827)..(827): n is a, c, g, or t
  misc_feature (837)..(837): n is a, c, g, or t
  misc_feature (976)..(976): n is a, c, g, or t
  misc_feature (1007)..(1008): n is a, c, g, or t
  misc_feature (1012)..(1012): n is a, c, g, or t
  misc_feature (1017)..(1018): n is a, c, g, or t
  misc_feature (1030)..(1030): n is a, c, g, or t
  misc_feature (1040)..(1040): n is a, c, g, or t
  misc_feature (1078)..(1078): n is a, c, g, or t
  misc_feature (1085)..(1085): n is a, c, g, or t
  misc_feature (1087)..(1087): n is a, c, g, or t
  misc_feature (1096)..(1096): n is a, c, g, or t
  misc_feature (1103)..(1103): n is a, c, g, or t
  misc_feature (1105)..(1105): n is a, c, g, or t
  misc_feature (1162)..(1162): n is a, c, g, or t
  misc_feature (1177)..(1177): n is a, c, g, or t
  misc_feature (1196)..(1196): n is a, c, g, or t
  misc_feature (1198)..(1198): n is a, c, g, or t
  misc_feature (1213)..(1213): n is a, c, g, or t
  misc_feature (1216)..(1217): n is a, c, g, or t
  misc_feature (1243)..(1243): n is a, c, g, or t
  misc_feature (1245)..(1245): n is a, c, g, or t
  misc_feature (1268)..(1268): n is a, c, g, or t
  misc_feature (1304)..(1304): n is a, c, g, or t
  misc_feature (1362)..(1362): n is a, c, g, or t
  misc_feature (1542)..(1542): n is a, c, g, or t
  misc_feature (1558)..(1558): n is a, c, g, or t
  misc_feature (1569)..(1569): n is a, c, g, or t
  misc_feature (1605)..(1605): n is a, c, g, or t
  misc_feature (1761)..(1761): n is a, c, g, or t
  misc_feature (1824)..(1824): n is a, c, g, or t
  misc_feature (1864)..(1864): n is a, c, g, or t
  misc_feature (1968)..(1968): n is a, c, g, or t
  misc_feature (1970)..(1970): n is a, c, g, or t
  misc_feature (1980)..(1980): n is a, c, g, or t
  misc_feature (1985)..(1986): n is a, c, g, or t
  misc_feature (1992)..(1993): n is a, c, g, or t
  misc_feature (1996)..(1996): n is a, c, g, or t
  misc_feature (1998)..(1998): n is a, c, g, or t
  misc_feature (2000)..(2000): n is a, c, g, or t
  misc_feature (2009)..(2009): n is a, c, g, or t
  misc_feature (2507)..(2507): n is a, c, g, or t
  misc_feature (2598)..(2598): n is a, c, g, or t
  misc_feature (3183)..(3184): n is a, c, g, or t
  misc_feature (3205)..(3205): n is a, c, g, or t
  misc_feature (3218)..(3218): n is a, c, g, or t
  misc_feature (3252)..(3252): n is a, c, g, or t
  misc_feature (3255)..(3255): n is a, c, g, or t
  misc_feature (3285)..(3285): n is a, c, g, or t
  misc_feature (3361)..(3361): n is a, c, g, or t
  misc_feature (3367)..(3367): n is a, c, g, or t
  misc_feature (3378)..(3379): n is a, c, g, or t
  misc_feature (3381)..(3382): n is a, c, g, or t
  misc_feature (3385)..(3385): n is a, c, g, or t
  misc_feature (3389)..(3395): n is a, c, g, or t
  misc_feature (3397)..(3400): n is a, c, g, or t
  misc_feature (3403)..(3403): n is a, c, g, or t
  misc_feature (3405)..(3405): n is a, c, g, or t
  misc_feature (3411)..(3411): n is a, c, g, or t
  misc_feature (3438)..(3438): n is a, c, g, or t
  misc_feature (3440)..(3440): n is a, c, g, or t
  misc_feature (3443)..(3443): n is a, c, g, or t
  misc_feature (3446)..(3446): n is a, c, g, or t
  misc_feature (3452)..(3452): n is a, c, g, or t
  misc_feature (3455)..(3455): n is a, c, g, or t
  misc_feature (3457)..(3458): n is a, c, g, or t
  misc_feature (3462)..(3463): n is a, c, g, or t
  misc_feature (3471)..(3471): n is a, c, g, or t
  misc_feature (3474)..(3474): n is a, c, g, or t
  misc_feature (3476)..(3476): n is a, c, g, or t
  misc_feature (3481)..(3482): n is a, c, g, or t
  misc_feature (3484)..(3484): n is a, c, g, or t
  misc_feature (3488)..(3489): n is a, c, g, or t
  misc_feature (3491)..(3491): n is a, c, g, or t
  misc_feature (3495)..(3495): n is a, c, g, or t
  misc_feature (3501)..(3502): n is a, c, g, or t
  misc_feature (3505)..(3505): n is a, c, g, or t
  misc_feature (3507)..(3508): n is a, c, g, or t
  misc_feature (3510)..(3513): n is a, c, g, or t
  misc_feature (3516)..(3516): n is a, c, g, or t
  misc_feature (3518)..(3518): n is a, c, g, or t
  misc_feature (3521)..(3521): n is a, c, g, or t
  misc_feature (3525)..(3525): n is a, c, g, or t
  misc_feature (3527)..(3527): n is a, c, g, or t
  misc_feature (3532)..(3532): n is a, c, g, or t
  misc_feature (3534)..(3535): n is a, c, g, or t
  misc_feature (3540)..(3544): n is a, c, g, or t
  misc_feature (3547)..(3548): n is a, c, g, or t
  misc_feature (3551)..(3551): n is a, c, g, or t
  misc_feature (3553)..(3554): n is a, c, g, or t
  misc_feature (3556)..(3556): n is a, c, g, or t
  misc_feature (3558)..(3560): n is a, c, g, or t
  misc_feature (3563)..(3563): n is a, c, g, or t
  misc_feature (3568)..(3568): n is a, c, g, or t
  misc_feature (3572)..(3574): n is a, c, g, or t
  misc_feature (3577)..(3577): n is a, c, g, or t
  misc_feature (3580)..(3580): n is a, c, g, or t
  misc_feature (3583)..(3590): n is a, c, g, or t
  misc_feature (3593)..(3594): n is a, c, g, or t
  misc_feature (3596)..(3598): n is a, c, g, or t
  misc_feature (3602)..(3602): n is a, c, g, or t
  misc_feature (3604)..(3605): n is a, c, g, or t
  misc_feature (3608)..(3608): n is a, c, g, or t
  misc_feature (3610)..(3610): n is a, c, g, or t
  misc_feature (3612)..(3612): n is a, c, g, or t
  misc_feature (3614)..(3614): n is a, c, g, or t
  misc_feature (3616)..(3618): n is a, c, g, or t
  misc_feature (3620)..(3621): n is a, c, g, or t
  misc_feature (3624)..(3624): n is a, c, g, or t
  misc_feature (3626)..(3627): n is a, c, g, or t
  misc_feature (3632)..(3632): n is a, c, g, or t
  misc_feature (3634)..(3634): n is a, c, g, or t
  misc_feature (3638)..(3638): n is a, c, g, or t
  misc_feature (3642)..(3648): n is a, c, g, or t
  misc_feature (3651)..(3651): n is a, c, g, or t
  misc_feature (3653)..(3653): n is a, c, g, or t
  misc_feature (3656)..(3656): n is a, c, g, or t
  misc_feature (3666)..(3668): n is a, c, g, or t
  misc_feature (3672)..(3676): n is a, c, g, or t
  misc_feature (3678)..(3678): n is a, c, g, or t
  misc_feature (3680)..(3684): n is a, c, g, or t
  misc_feature (3688)..(3688): n is a, c, g, or t
  misc_feature (3690)..(3691): n is a, c, g, or t
  misc_feature (3693)..(3696): n is a, c, g, or t
  misc_feature (3698)..(3699): n is a, c, g, or t
  misc_feature (3701)..(3701): n is a, c, g, or t
  misc_feature (3703)..(3707): n is a, c, g, or t
  misc_feature (3709)..(3710): n is a, c, g, or t
  misc_feature (3716)..(3717): n is a, c, g, or t
  misc_feature (3720)..(3722): n is a, c, g, or t
  misc_feature (3728)..(3731): n is a, c, g, or t
  misc_feature (3733)..(3734): n is a, c, g, or t
  misc_feature (3736)..(3738): n is a, c, g, or t
  misc_feature (3741)..(3742): n is a, c, g, or t
  misc_feature (3745)..(3745): n is a, c, g, or t
  misc_feature (3747)..(3750): n is a, c, g, or t
  misc_feature (3754)..(3758): n is a, c, g, or t
  misc_feature (3760)..(3760): n is a, c, g, or t
  misc_feature (3762)..(3769): n is a, c, g, or t
  misc_feature (3772)..(3772): n is a, c, g, or t
  misc_feature (3775)..(3780): n is a, c, g, or t
  misc_feature (3782)..(3785): n is a, c, g, or t
  misc_feature (3788)..(3791): n is a, c, g, or t
  misc_feature (3793)..(3796): n is a, c, g, or t
  misc_feature (3798)..(3798): n is a, c, g, or t
  misc_feature (3801)..(3802): n is a, c, g, or t
  misc_feature (3804)..(3805): n is a, c, g, or t
  misc_feature (3808)..(3809): n is a, c, g, or t
  misc_feature (3812)..(3812): n is a, c, g, or t
  misc_feature (3814)..(3815): n is a, c, g, or t
  misc_feature (3817)..(3821): n is a, c, g, or t
  misc_feature (3824)..(3825): n is a, c, g, or t
  misc_feature (3828)..(3828): n is a, c, g, or t
  misc_feature (3830)..(3832): n is a, c, g, or t
  misc_feature (3835)..(3836): n is a, c, g, or t
  misc_feature (3839)..(3843): n is a, c, g, or t
  misc_feature (3845)..(3845): n is a, c, g, or t
  misc_feature (3847)..(3847): n is a, c, g, or t
  misc_feature (3850)..(3850): n is a, c, g, or t
  misc_feature (3854)..(3854): n is a, c, g, or t
  misc_feature (3856)..(3856): n is a, c, g, or t
  misc_feature (3859)..(3859): n is a, c, g, or t
  misc_feature (3862)..(3862): n is a, c, g, or t
  misc_feature (3866)..(3868): n is a, c, g, or t
  misc_feature (3870)..(3870): n is a, c, g, or t
  misc_feature (3872)..(3874): n is a, c, g, or t
  misc_feature (3877)..(3878): n is a, c, g, or t
  misc_feature (3881)..(3881): n is a, c, g, or t
  misc_feature (3883)..(3885): n is a, c, g, or t
  misc_feature (3887)..(3889): n is a, c, g, or t
  misc_feature (3891)..(3891): n is a, c, g, or t
  misc_feature (3895)..(3896): n is a, c, g, or t
  misc_feature (3900)..(3901): n is a, c, g, or t
  misc_feature (3903)..(3910): n is a, c, g, or t
  misc_feature (3914)..(3915): n is a, c, g, or t
  misc_feature (3917)..(3921): n is a, c, g, or t
  misc_feature (3923)..(3923): n is a, c, g, or t
  misc_feature (3925)..(3930): n is a, c, g, or t
  misc_feature (3932)..(3934): n is a, c, g, or t
  misc_feature (3936)..(3936): n is a, c, g, or t
  misc_feature (3939)..(3939): n is a, c, g, or t
  misc_feature (3941)..(3942): n is a, c, g, or t
  misc_feature (3947)..(3948): n is a, c, g, or t
  misc_feature (3950)..(3950): n is a, c, g, or t
  misc_feature (3952)..(3952): n is a, c, g, or t
  misc_feature (3954)..(3954): n is a, c, g, or t
  misc_feature (3957)..(3957): n is a, c, g, or t
  misc_feature (3959)..(3959): n is a, c, g, or t
  misc_feature (3961)..(3964): n is a, c, g, or t
  misc_feature (3967)..(3973): n is a, c, g, or t
  misc_feature (3978)..(3980): n is a, c, g, or t
  misc_feature (3982)..(3983): n is a, c, g, or t
  misc_feature (3985)..(3985): n is a, c, g, or t
  misc_feature (3987)..(3988): n is a, c, g, or t
  misc_feature (3990)..(3990): n is a, c, g, or t
  misc_feature (3994)..(3995): n is a, c, g, or t
  misc_feature (3998)..(4000): n is a, c, g, or t
gngtgtctgcggatattcaacgggcgatttggaaggagacggggatttactcgacggttggnatgtcgaatgcgaatccnctnttggccaaattagcgctcgataatgaggcgaagaagattccgcatatgcgagcnaactggtcgtangaagatgtcgaggagaaggtctggggaattccagagatgacagacttntggggaattggctcgcgnatggagaagcgantgaangcactaggnatttattcgattcgngaattggcaaatgcnaatcccgaccgattgaaacaagcgcttggcgtcgtaggcttggatttatggtttcangcgaatggcatcgatgagagtaatgtncatgtgccgtaccgtccgaaatcaagaggnctcggnaactcgcaggtgcttccgcgcaantatgttcgccagcgngatattgaaatcgtgctacgcgagatggcggagcaggtggcgattcgnatgagacgaattaagaagaaggcnacggttgtttcgattcatgtaggctactcnaaggacgaaggcttgtcgtcgatacaggcgcagcgcaaaattgacccgacgaatcgcacttcggtgttatcggaagtggtgttggaactctttcgtaagaaatacaaaggaggtgcggtgcgtaatgtggcggtgcggtattccggatttgtcgaagaaagctntggactcatttcactattcgaagatattgaagcagttgagaaagaagaaaggctccagacggcgattgatacggtccgcgaccaatacggnttcacctcgcttttaaaagggaacgcgctggaaggnggntcgcgcgtgntggctagaagtaagttagtcggaggacattccgctggaggattagacggtttgaaataatggaaagagcgtatttgccgtatcgctcggcaagagagcacaaggatcgcggcatggcgaagtggatgggatttttcctntctgaacatacgacgtccctaaaggatgaanngaancgcgnngaccagacgagnatgctgacgntggaagagaaatggatgctgctatcgcaattgtatgtngggaagntncaagccagnattacgntnccgtatcggatgatgcgacaaacgctcattggcgaagtgagtgaattatacgagagngaaatctcgctgaanacagaagaaggctaccgcngnattgcagtggaaganatnntgcaaattcagttggtggaaggtttntnaaatgtgttgcaattgtatcgcnaatgtgttgttttctagtgttgtttcttttataatnatggtactagaataacagaggtgagactatggcgaatatgaaaaccgcaagtgtgaangtaagaatacaagaagatatcaaaaagcaagcagaggaaattttagatcaattaggacttccaagagcagtagcgatagatatgttttatagacagattatcctaaacaaaggtattccttttgagttagttattccaactgcaccgaaatcacgtgaagaactcacaaaagaagaattngacaagatgatgaaantagctgttgancaagtagaaaaaggacaaacaacaccggtagaagangtttttgaggaactatatcgaggtatgtaaatggaacattataggatagagatttctgatttagctaaggcacagttagttgaaattagagattatatagctaaagagttatattctccagcaactgccagaaagacgctacatttattggaaaanaatatcctttctctttctaaattaccccatcgacatgaaaaagtggaggataaggaatggggnaataaagggattaggaagtatcaggtgaagaactttctcntttattattctattcatgaagaaagtcgagttgttgcgattctgggtattatgtatgctaaaaggaatccagcttatttattgaaaaagttacagtaaatgaanantcaaaacacngtttnngagtgnncantnantgaacgtcncccgttattcactagagttgacgggggcgttcttttttgctaaaatagtcgtgttgtaattgtgaagcaccacagctacaaccgctcggattagagtacaaaagaccggaatcggcactttaaactggcgagtcttagtctaaaatataggaggtgcaatatgtacgcaatcgtaaaaactggtggaaaacaagttaaagttgaagttggtcaagcaatctacgttgaaaaattaaacgcagaagctggcgacaaagtaactttcgaagaagtagtatttgtaggtggagatgacgttaaagttggtgctccattcgtagcaggtgcaactgttgaaggaactgttgaaaaacaaggccgtcaaaagaaagttgtaactttcaaatacaaacgtcgtaaagactcacaccgtaaacaaggtcaccgtcaaccttatacaaaagttgttattgacgcaatcaacgcttaatcacgatgattcaagtgactgtacacaanaagaaccaacgtatcgtttcctttgaaatgactggtcatgcaaactttagtgaacatggttcggatatcgtttgcgcaggggtatcggctntagccattacaactgtgaacagcattgagaagttagcaggataccaaccgattgtcgaagtcgacgaggttgagggtggttacttatatatggaagttgtagaagacttgacgaaagagcaagaacatacaactcaaattttattaaatagtctattactagggttagaagatattcaatcggaatatcaagactttctagctgtaactgttgcataatcaatcaaggaggtgcacaactatgttaaaagtgaatttacaattattcgcccataaaaaagggggcggttctacatcaaacggacgtgactcacaagcgaaacgtctaggtgctaaacgtgctgacggacaattcgtttcaggtggttcaattttataccgtcaacgtggaacaaaaatccatccaggtgaaaacgtaggtagaggtggagacgatactttatttgctaaagtagacggaattgtacgtttcgaacgtaaaggccgtgacaaaaaacaagtatctgtatatccagtaatcgctgctgaataatattgagtaggatgtgacattcagtcacatccttttttttaagaaaaatgagannttaacaaaactacttcaaacntttcagattactntataatagctatactagctgtaccggaggaagcnttncgtcttccttcctctcaagcttcaaactgnctctaggaaatgaatttccagagtcagtaattcacattgagtacaatcgctagtattgctattatagaatctgaangttctncgtagttttgnnannaanaaannnnnnngnnnntantncatatnattcaaagctcaaaaactcttaaaaananaanganggattnttntnnaagnnggtaaagnaantnaagcnntngaannantggnaaaagnngtngnngnnnntcnanaanaaancngttantnnaatgnnnnngcnnttngnnanannntanaaaanattnnnaanaanaannnnnnnnaannannngaangnntgncnantnannnanncgntnnaaaantnaacnaagnnnnnnnacnantanatttaacaannnattnnnnngnannnnntcgncnnannnntnnantnnnnntnntaaaanncgnnnaagaannnngnntnnnaannaancnnnnaatnnnnncngnnnnnnnnggnttnnnnnngnnnnatnnnntnnnncnaannannaannaanannannnnntgnnaantnnngannttnnnnnangnagngggnanttnctnagcnnnantnnnttnntcntnnnannngntggnnaaanngnnnnnnnnacanncnnnnntnannnnnnannncntgntnncttanncntncnagntntnnnnttnnnnnnnttggnnntnnananntncttnnaannn

SEQ ID NO: 841 - DNA, 4000 bp, Escherichia coli
  misc_feature (441)..(441): n is a, c, g, or t
  misc_feature (911)..(911): n is a, c, g, or t
  misc_feature (1068)..(1068): n is a, c, g, or t
  misc_feature (1887)..(1887): n is a, c, g, or t
  misc_feature (1992)..(1992): n is a, c, g, or t
  misc_feature (3777)..(3777): n is a, c, g, or t
cttctgcgccgaaaatgtagggggctaagctcgcaaccgaagcctcggatccgaaaagccagatcttttcggatggtaggggagcgttcctgttgggccgaagtcgcatcgtgaggtgcggtggactgacaggaagtgagaatgccggcatgagtagcgttaaagcaagtgaaagacttgctcaccggaagcccaagggttcctggggaagggaatccgcccagggttaggcgggacctaaggtgtagccgaagggcgaagccgatggacagccggtagacattccggccccaccttggtgacgtttgtaccgaaggggtgacgcagggagctaggcacgctgggcgatggaatgcccagtccaagggagtagggggagccttcaggcaaatccgagggctcgaaaccccgagacctgatggggagccttaattataaggngaaggtgttgacgctgcactgccgagaaaagcctctagggaggagccaaggtgcccgtaccctaaaccgacacaggtgggctggttgagcagactgaaggtgtacgggataactctcgctaaggaactcggcaagttgaccccgtaacttagggagaaggggtgcccgcgttaggtgaactcttttacaggggtagccgaggcgggttgcagaaaccaggtccaggcgactgtttaataaaaacacagggctctgctaaaggcgaaagccgatgtatagggcctgacacctgcccggtgccggaaggttaaggggaggggttagccaaagcaatttggcgaagctccaaaccgaagccccggtaaacggcggccgtaactataacggtcctaaggtagcgaaattccttgtcgggtaagttccgacctgcacgaaaggtgtaacgatctggacgctgtctcagcgagagncccggtgaaattgtgggaccggtaaagacgccggttacccgtggttggacgggaagaccccgtggagctttactgtagcctgatattggactttggtacgtcatgtacaggataggtgggaggctgtgaagctagggcgccagccttagtggagccncccttgggataccacccttgatgtgctggggttctaaccgcgaaagcggaacagtgtcaggtgggcagtttgactggggcggtcgcctcctaaagagtaacggaggcgcgcgaaggtcacctcaaggcgtatggaaatcgcctgaagagcgtaagggcataaggtggcctgactgcgagagcgacagctcgagcaggcacgaaagtgggtcctagtgatccggcggttccgagtggaagggccgtcgctcaacggataaaagctaccccggggataacaggctgatcccgcccgagagttcctatcgacggcggggattggcacctcgatgtcggctcatcgcatcctggggctgtagcaggtcccaagggttggtctgttcgcccattaaagcggtacgtgagctgggtttagaacgtcgtgagacagttcggtccctatccaccacgggcgtagggggtttgagaggagctgctcctagtacgagaggaccggagtggacgaacctctggtgtaccggttgtggcgccagctgcaggagccgggtagccacgttcggaaaggataaccgctgaaggcatctaagcgggaagcctacctcaagatgagaccccccactgggaaagccaggtaaggtgtcctggagatgacagggtagataggccggaggtggaagccctgtaaagggtgtagctgaccggtactaatacaccgaggccttgtccttaaaagttttttcctcttttccttgtggtttttgagtcgagtttaaagcaggcatatggtgaccatggcggaggggaaacacccggatccatnccgaacccggcagttaagccctcaagcgccgatggtactgcgggggggacccgtgggagagtaggtcgttgccatgtgcctgctttgttgttatttgcgacattnatgcccctcaaagaaatgttataaatttcaaggtattatgatacactctttatgtaaaatttgtaatgactttttgtccgatcatccctgtaaggggatgtagggaaggggggcacgttgcggtgaaggttttgctttttgggtgtggtagagttggaagggctttttgcgaattactgggtaggaagcgagatgttgtagaaagtgcctcaatttcccttgtgggagttgccactcgaagtcgaggatgtgtttttaactcccatggtatcgatgtagataggctgcttcaatgggaagctttaacgggaaggattgatgctctggagagcgagggcactttggttataagtgacgcaaatgagatgttggaagacctggattatgatattttagttgaatgtactccatctgattttgaaatcggggaacctgccagatctatcatgaaaaaggctattaaaagaggcaagcatgtagttaccgctaatacaggcgctatgagcttgcattttgatgaattaacacgagagtcattggagataggcgtaaaattactttatgaggctaccgttttatcgggtactccacttttttccttggtacgtcatggtttgccgggatgttgcattagaaggtttgaggggatactcaatggtacctgtaattttgtacttactgtaatgggaatgggaagtacttttgatgaagccttgctggaagcccaaaggcgtggcctttcggagcaaaatccatgggttgacatagatggactggaggctgcggctaaaaccgcaatagttgcaaggagtttaatgtcggcgaatgtcgatctcaaacaagcttccataaaggggattagaaatataacggcgcaaaatatcgaagaagccaaaagaaggggaggtaaattaaagctcctttccaggattgaagcaaattctaacgagatacatattagtgtgagtccagaaattctttccttaaaccatcctttggctcacttagaaggtttttccataggtgcgctgcttttgaccgatgtcataggcgaaatatgtattagtggttccggctccggacccaaggagacttcgtattcacttttaaaggacgtgttatccttgagggaaggatgaggttttatatgtctataaagatagcagttatttcagatacacatggaagcttaaaggcttggagggaagcagagcgcctttggcgaggatcaaaccttattattcatcttggtgatgtcttgtaccatggccctcgtaatcctcttcccgaggaatatgcgccaagggaattggcagaagaaatcaatctctctaaaatccctgtcataattattcgaggcaattgcgatgccgatatagatgctgctatactgaagtggcctatatcagatccttattccgtcttatggtgggatggtaggttaatacttgccttgcatggtacggatcttggagagccagggaatctagcgtcgacgttcaatgccgatttagtgcttacgggacacacgcacgttagctctattacctgtgaaggaaaaacgatttttttaaatcccggttcggctagtctgccaaagggcaaaaatcccgcttcgttcgctctattagatgttgatggaattcgaattttaactttaatgggagatataatttgctttgagccttggaatcttatttaaaggggagatattcaaagatggaagttattgagagcatatcaacgagtagagatatgtcccaggaggcaaaaggaagcaaagangctacgttgttggtttttaatctgtttgaagaacattatgctattgaagtatcacaagtaagagagatcgtgcggataccggaaaatataaccagggttccaaacgcaccgccatacgtatgcggagtaatcaatctgagggggacagtaattcccgtaatggatattgccgtaaaaatgagccgaggagagattgagcgtcgcaacgaatcaaggatagtgg

SEQ ID NO: 842 - DNA, 4000 bp, Escherichia coli
  misc_feature (796)..(796): n is a, c, g, or t
  misc_feature (884)..(884): n is a, c, g, or t
  misc_feature (1304)..(1304): n is a, c, g, or t
  misc_feature (1337)..(1337): n is a, c, g, or t
  misc_feature (1992)..(1992): n is a, c, g, or t
  misc_feature (2861)..(2861): n is a, c, g, or t
  misc_feature (3902)..(3903): n is a, c, g, or t
cgccgtggcctttctcgtttagcgaatgggcatcgtcacctggcagcgctgccatgaggcgttgcggctgcccgtcggaagctgtgggaggcgatagcggctggggcgcccagggcggcaatgccgacgtctggtcctcgccgggcctcggcccgtaccatctcggcttcgaagtgtcgttgctgtcgcccgcatcacctgcagatgcggccattgcggccatggcctgatctggtggaggcctggcatcgccttgcctgtccggcggagggctgcttggcgcaagcggcagcggagcctgggcagccggcgctgcattaagggcattcaatcgttggttgatctgctcgagctcggccgtgagcgcgccgatttgcgtctcgagcgcactgacgcgggtgccgagatcgcgctggcttaagggcggttcgggaacgccgccgtttgtatcctctgccggcatcggggcgggattggcgtgggtgaaggactggagtgctccgaccaaagcttgcagctcggcgagtttttgctcgacccgcgacagccgcgcattgatcgaatcccccccttcctcggcgaagctcagacaagaccccaggctcagagcgaggagtactgcggaaaacatcaatgctaggcgcaatcgcttgcgccctgtggaaaccatgagagtcacggtgagaccttgccgctatggccggcaccgacgccttcaagcggagaggcgcccgacgcgaggaaccataacgcatttgtccggccctttggggccaaactgtgatggaaatcctangcttggctcagtagcgggccacagccggattgttcaacacggtctgggcccggcgattctgggtccagcaggagggctcgtcacacancgcgatcgggcgctccttgccataggagatcgtcttgatgcgcgcggcgttgaccccttggcttgccaggaacgtcctgactgccatggcacgccgggccccgagcgcgaggttgtactcgcgcgtgccgcgctcatcggcgtggccctcgatggtcactctgtattgcgggtattggttaagccagctcgcctgatggccgaggatgctgcgggcttctccgctaagcgccgagctgtcctgctcgaaatggacgaggtcgcccacgttaaccgcgaactcctgcggcgaccctggagctgccaccgacccggtggtgccgattccgtattctctcggctctccatggcgcgcgcaggccgccatcagcaaagcaattgcaacgacgcccgcaactttgcaggcgtggccgaccccacngctcgaacgcattactggttactcccgctagcnaaattttagggaaatcgtagagggcaactccttaacgatcccctagtcccgacggtcgggatggctgatggcgagaggatggagaagagatggaagtgctgagaaaaagtatgagaagcgctaaaaaaggaagagatgcctagaacgccgccgcatctcgctacggcgtcccggcatccatattcccctctcgcggaagctgatgcgcttccgcgacgaaatcctggccgcgcctagacgcggacaacctgctcgaccacgacatccgcggacccgagctttagtggctgggtggccacggccttctcgtggtggccgaagcagccaccgagcgcaatggtggcggccacgatcgtggcgacgatgacaacgcccttcaaaccctgcatggtcttctctcctttggtttaacggcagtagccgtctttgcatgtaccggcgcggcgttttgagatcaagaacggatcgatgttcctggaccgttttcccggtcattgatgctaaaatgcaacgccgaatctcaacctccagccagtcgaagctagctcccaaggagaccccgatcaagcatggttaacaccctggaggaggatgattaaaaaagggtaagactagagttgcttttgggacacagggccgcaaatgccgctgcaantcccggccgaaatcggcgctctttggcgctaattgatgagcggcgaccaggctgggtctgagccgaacgcgggcgttgccacctggcgctcgttatagccggtgaggtcgatggtatagagcttggggccgccagcagcgcccggcgattccctgaagaacatcagcacacggccattaggcgcccaggtcgggccctcattgtggaagccctcagtcaggatgcgctcgccgctgccgtcgggcttcatcaccccgatcagaaactcgccgccgaggcgcttggtgaaagcgataaggtcgccgcgcggcgaccacaccggagtggaatagctcccgttcccctggctgatgcgatgctggtcactgccgtcagcgttcatgacgtagatctgctgcgagccgtcgcgatcgctctcgaaaacgatatggcgcccgtcaggcgagtagcagggccccgtatcgatcgcgttgctgttggtgagctgaaatgtgcgccggctgcgcaagtccatcgcaaaaaggtcggcgttgccctcacgctcaaggctcatgacgatgcgctgcccgtcaggcgaaaaacgcggcgcgaaggtcatgcccgggaaggcgcccacgatctccttctgcccggtctcgatgttgaggagatagaccttcggcgtctcgccctcgaaggacatgtaggtgatgtcctgcgtcgaaggactgaagcgcggcgtcagtaccaggttctggccagtggtgagcaacctaacgttgaagccgtcctgatccatgatggcgagccgcttggtgcgcttgtccttaggacctgactcatcgacgaacacgatgcgcgtgtcgaagtagcccttctcgccggtgatncgctcgtagattgcgtcggcgatgatgtggccaacgcgcctcgcatccttcgctcgcgcgaagaactgctcgccggcgagctgcttgccggagaacacgtcccataacctgaactcggctttgagcttttcgtcgctcgcgccgatccgcccaacaaccaatgcctgcgcattcacgacctgccagtcgtcgaagcgcggaacgccgtcgaagttcgtcaccttctcgatgaaggccgcctggtcgatcggattgaacaggccagaggaggcgaggtcagccgccaccacagcggagattgcgcgagctgtttgcgggtcgatcgatccgtcgccggtaaagtcgggaatggcgatcggcagaggctgaatcttgccttgggtgatgttgagctcgaccactgccttcgcctgcggagagcccgcaaccaaggcgagcgcaatcagagcgagcattaggctcagtcggaagagatgaggcgtgagcggaggcatgggtctaaccgctgcgatacatgtcgcttggatcgaagttgaggatcatgtcgcgccacagcgcgtatttggctttgggcaactcgtaaggctggcactggtaaacggctctgactgcgctgtcggcggcggcctggaagaacggcgacgagccgctattggcgaccgtggggtagccgacgagagttccgtcctcattgagcttcagtcttagcttcaccacgatctgatcggcgccgagccctcccggaggcggcgtccagcaatcggctatgcgggctctcagcgcgtcgatctcgttcaccgacatgcttatctccgtgccattcgactgccccttcaccttcttcttgggctcatccgaaggttggaccggctttgggtcgtcggccgcatcggggatcttgttcaggagcgcagcaattttgtcgggattgaaggcgcgcttcttcgcctgcggcttgggcttcttgggggaatcggcggcagcatccttcgctggctttgctgtcttgtcgtcctgcttctgaaggtctggcttctgatnntcaggcttcgccgcagctgcgtcctttggctccttcttgtcgtcgggctttgcctgactcttgtcatccaaagatgccgtctgctcgcgcggcttcg

SEQ ID NO: 843 - DNA, 4000 bp, Escherichia coli
  misc_feature (58)..(58): n is a, c, g, or t
  misc_feature (82)..(82): n is a, c, g, or t
  misc_feature (133)..(133): n is a, c, g, or t
  misc_feature (169)..(169): n is a, c, g, or t
  misc_feature (184)..(184): n is a, c, g, or t
  misc_feature (382)..(382): n is a, c, g, or t
  misc_feature (607)..(607): n is a, c, g, or t
  misc_feature (609)..(609): n is a, c, g, or t
  misc_feature (661)..(661): n is a, c, g, or t
  misc_feature (886)..(886): n is a, c, g, or t
  misc_feature (1002)..(1002): n is a, c, g, or t
  misc_feature (1006)..(1006): n is a, c, g, or t
  misc_feature (1270)..(1270): n is a, c, g, or t
  misc_feature (1429)..(1429): n is a, c, g, or t
  misc_feature (1457)..(1457): n is a, c, g, or t
  misc_feature (1529)..(1529): n is a, c, g, or t
  misc_feature (1580)..(1580): n is a, c, g, or t
  misc_feature (1604)..(1604): n is a, c, g, or t
  misc_feature (1607)..(1607): n is a, c, g, or t
  misc_feature (1631)..(1631): n is a, c, g, or t
  misc_feature (1646)..(1646): n is a, c, g, or t
  misc_feature (1649)..(1649): n is a, c, g, or t
  misc_feature (1673)..(1673): n is a, c, g, or t
  misc_feature (1772)..(1772): n is a, c, g, or t
  misc_feature (1881)..(1881): n is a, c, g, or t
  misc_feature (1973)..(1975): n is a, c, g, or t
  misc_feature (1985)..(1985): n is a, c, g, or t
  misc_feature (1992)..(1992): n is a, c, g, or t
  misc_feature (2001)..(2001): n is a, c, g, or t
  misc_feature (2006)..(2006): n is a, c, g, or t
  misc_feature (2030)..(2030): n is a, c, g, or t
  misc_feature (2372)..(2373): n is a, c, g, or t
  misc_feature (2375)..(2375): n is a, c, g, or t
  misc_feature (2377)..(2384): n is a, c, g, or t
  misc_feature (2386)..(2389): n is a, c, g, or t
  misc_feature (2395)..(2395): n is a, c, g, or t
  misc_feature (2399)..(2399): n is a, c, g, or t
  misc_feature (2401)..(2402): n is a, c, g, or t
  misc_feature (2407)..(2407): n is a, c, g, or t
  misc_feature (2409)..(2411): n is a, c, g, or t
  misc_feature (2414)..(2414): n is a, c, g, or t
  misc_feature (2423)..(2424): n is a, c, g, or t
  misc_feature (2426)..(2426): n is a, c, g, or t
  misc_feature (2428)..(2428): n is a, c, g, or t
  misc_feature (2452)..(2454): n is a, c, g, or t
  misc_feature (2486)..(2486): n is a, c, g, or t
  misc_feature (2495)..(2495): n is a, c, g, or t
  misc_feature (2502)..(2502): n is a, c, g, or t
  misc_feature (2505)..(2505): n is a, c, g, or t
  misc_feature (2531)..(2531): n is a, c, g, or t
  misc_feature (2543)..(2543): n is a, c, g, or t
  misc_feature (2552)..(2554): n is a, c, g, or t
  misc_feature (2556)..(2557): n is a, c, g, or t
  misc_feature (2562)..(2562): n is a, c, g, or t
  misc_feature (2564)..(2564): n is a, c, g, or t
  misc_feature (2571)..(2574): n is a, c, g, or t
  misc_feature (2576)..(2576): n is a, c, g, or t
  misc_feature (2579)..(2580): n is a, c, g, or t
  misc_feature (2582)..(2582): n is a, c, g, or t
  misc_feature (2584)..(2585): n is a, c, g, or t
  misc_feature (2588)..(2589): n is a, c, g, or t
  misc_feature (2591)..(2592): n is a, c, g, or t
  misc_feature (2595)..(2595): n is a, c, g, or t
  misc_feature (2597)..(2602): n is a, c, g, or t
  misc_feature (2604)..(2604): n is a, c, g, or t
  misc_feature (2606)..(2608): n is a, c, g, or t
  misc_feature (2611)..(2612): n is a, c, g, or t
  misc_feature (2616)..(2616): n is a, c, g, or t
  misc_feature (2619)..(2632): n is a, c, g, or t
  misc_feature (2636)..(2638): n is a, c, g, or t
  misc_feature (2640)..(2642): n is a, c, g, or t
  misc_feature (2644)..(2644): n is a, c, g, or t
  misc_feature (2646)..(2649): n is a, c, g, or t
  misc_feature (2651)..(2657): n is a, c, g, or t
  misc_feature (2661)..(2662): n is a, c, g, or t
  misc_feature (2664)..(2664): n is a, c, g, or t
  misc_feature (2666)..(2670): n is a, c, g, or t
  misc_feature (2673)..(2675): n is a, c, g, or t
  misc_feature (2677)..(2679): n is a, c, g, or t
  misc_feature (2681)..(2685): n is a, c, g, or t
  misc_feature (2688)..(2690): n is a, c, g, or t
  misc_feature (2692)..(2705): n is a, c, g, or t
  misc_feature (2707)..(2712): n is a, c, g, or t
  misc_feature (2716)..(2717): n is a, c, g, or t
  misc_feature (2719)..(2724): n is a, c, g, or t
  misc_feature (2726)..(2733): n is a, c, g, or t
  misc_feature (2735)..(2767): n is a, c, g, or t
  misc_feature (2769)..(2772): n is a, c, g, or t
  misc_feature (2774)..(2775): n is a, c, g, or t
  misc_feature (2778)..(2782): n is a, c, g, or t
  misc_feature (2784)..(2787): n is a, c, g, or t
  misc_feature (2789)..(2808): n is a, c, g, or t
  misc_feature (2810)..(2810): n is a, c, g, or t
  misc_feature (2812)..(2818): n is a, c, g, or t
  misc_feature (2820)..(2823): n is a, c, g, or t
  misc_feature (2826)..(2838): n is a, c, g, or t
  misc_feature (2841)..(2851): n is a, c, g, or t
  misc_feature (2853)..(2893): n is a, c, g, or t
  misc_feature (2896)..(2897): n is a, c, g, or t
  misc_feature (2899)..(2905): n is a, c, g, or t
  misc_feature (2907)..(2913): n is a, c, g, or t
  misc_feature (2915)..(2915): n is a, c, g, or t
  misc_feature (2918)..(2923): n is a, c, g, or t
  misc_feature (2925)..(2941): n is a, c, g, or t
  misc_feature (2943)..(2950): n is a, c, g, or t
  misc_feature (2952)..(2993): n is a, c, g, or t
  misc_feature (2996)..(3063): n is a, c, g, or t
  misc_feature (3065)..(3075): n is a, c, g, or t
  misc_feature (3077)..(3096): n is a, c, g, or t
  misc_feature (3099)..(3114): n is a, c, g, or t
  misc_feature (3116)..(3151): n is a, c, g, or t
  misc_feature (3153)..(3169): n is a, c, g, or t
  misc_feature (3171)..(3173): n is a, c, g, or t
  misc_feature (3175)..(3192): n is a, c, g, or t
  misc_feature (3194)..(3291): n is a, c, g, or t
  misc_feature (3293)..(3311): n is a, c, g, or t
  misc_feature (3313)..(3404): n is a, c, g, or t
  misc_feature (3406)..(3428): n is a, c, g, or t
  misc_feature (3430)..(3522): n is a, c, g, or t
  misc_feature (3524)..(3583): n is a, c, g, or t
  misc_feature (3586)..(3639): n is a, c, g, or t
  misc_feature (3642)..(3671): n is a, c, g, or t
  misc_feature (3673)..(3718): n is a, c, g, or t
  misc_feature (3720)..(3765): n is a, c, g, or t
  misc_feature (3767)..(3778): n is a, c, g, or t
  misc_feature (3780)..(3781): n is a, c, g, or t
  misc_feature (3783)..(3801): n is a, c, g, or t
  misc_feature (3803)..(3886): n is a, c, g, or t
  misc_feature (3888)..(3895): n is a, c, g, or t
  misc_feature (3897)..(3914): n is a, c, g, or t
  misc_feature (3917)..(3933): n is a, c, g, or t
  misc_feature (3935)..(4000): n is a, c, g, or t
catgaagtcgtctgttttgatttcaacgccatcaatgtttgtatcacgaacagcgttngtaatttgaccacttgatacaagngccatttgttcgctcattgcagcttggttctcttctaagcttgcttctggnttgaaggctaataatgaagctaacccttctgaaatngtacgagttgcaacnacggcaactgcagcatcttctgatacttcagccgcttggtttgcagccatttgaatgtttttgttgtttggtaatacgataactttttcagcatgcgcttcttttaccgcttgaagaatatcttctgtacttgggttcattgtttgaccaccgttgatgattgtcgttacacccatgctcttgaataattcttgaatnccttcacctgcagcaactgctacgattccgtattccgctttttgtttttgcgctgcttctttaacttttgcagtgtagtctgtttttaacacttcttcgtgttgcaagcgcatgttgtccactttcactttcattaatgaaccgaagcgttgtccgtagttcatgacttcacctggacgttctgtatgcacgtgtactttgatgatttcatcgtcagctactacnantaaagaatctccaagttcgtttaaatagttacggaaagtatcgtagtcgaangtatctacgactgtttcgccttcaccgattttcaccatgatttcagtacagtaaccgaatttgatgtcgcctgttgatacgtgttcgtagtcaacgcctgcttcgtggtgagccactgaagttaaatcgattttattgctttgtaatgattgaacaggaactgcttcccctgttaatgcttcgaagaatccgttgtaaatgaatacaagaccttgaccacctgantccactacgccaacttcttttaatactggtaataaatctggagttttcgctaatgctttttcagcaccacgtaaaacagatcccattacttcgatgatgtcgtttgaagtttctantttncgaacaccacgtttagctgattcacgagcaacagtaaggattgtaccttctacaggtttcataaccgctttataagcagtttccacaccgttcgtaaatgcttgcgctaattcttcaccagtgatttcttctttaccgacaacggctttagagaaaccacggaataattgagataagataacccctgagttcccacgagcacccattaataatccttttgctaaatcttgtgctaaatcacctacagttgttgctgtagagttngcaacacgttccgcaccagatttgaatgagagcatcatgtttgtccctgtgtctccatctggtactgggaatacgtttaatgagtttacgaattctgcattttcagataaacgcatttcaccgatttccaccattgcgcggaaatcttgagccgtaatngttttcatagttgccatattattcttanttcctcctgactagaatcaacaagcattacgcttcgatgattttaactccttgaacatagacattcactgtntttgcagcaaatcctaacattgtttctaagttatatttcacttgttcttgnacgtttctacaaatcgcagaaatnttngtaccataacctacaataatgtanacatccactgcaacnccntcgtcttcttgacgaatcacaacnccacgagtgaagttttctttcttcaagatttcattaaagttgtcgcggatttgattgcggcttgccataccaacaacaccatagttatctgtagcggcnccaccaacaaccgttgcaatcacttcattgctaagttcaatttgtccattttctgtttgaatttttactgtcatacaaatacctcccttaaatgtataaaggtgtctgnctaatttttagacagattgacacattatttctatactataatatcatattccaagcggtttacctagccttttaccaatttttaaccctctnnnaaactcattnaccagcncgcttgcantctanggtcaactatgctaaattatttangtatatgatttagttcaaaattatatcagctgataatgaattaaataaaggaggagaataacaatggctaaagtatgttatttcactggacgtcgtgctgaaacaggtaacactcgttctcacgctatgaacgctaaccgtcgtacttggaaaccaaacttacaaaaagttcgcgttttaatcgatggcaagcctaaaaaagtatgggtttcaactcgtgcattaaaatcaggtaaagtagaacgtgtttaatacagagcactattaaaaagagcttaggcgatatccctaagctctttttgtttttctaaaaataaataagccgaaggcttaaaaaaatanntnannnnnnnnannnncattcnaagntnnttgangnnntgnatagcgganntnantgtaatggtaccggcaggagcctnnngtctccttgcctaccaagcttcaaaccaaggntaagcgacnagtcgcnaanccttggtaattcacattggttacttnttcattacactnaccgctatnnncnnaaatntntttttcnnnntntannantnntcnntnnttncnnnnnncntnnnaannaaanagnnnnnnnnnnnnnntctnnntnnntntnnnntnnnnnnnattnntncnnnnnaannnannnannnnnggnnntnnnnnnnnnnnnnntnnnnnntttnntnnnnnnannnnnnnntnnnnnnnnnnnnnnnnnnnnnnnnnnnnnnnnntnnnnannaannnnnannnnannnnnnnnnnnnnnnnnnnntnannnnnnntnnnnttnnnnnnnnnnnnnaannnnnnnnnnnannnnnnnnnnnnnnnnnnnnnnnnnnnnnnnnnnnnnnnnnaannannnnnnnannnnnnnanaannnnnntnnnnnnnnnnnnnnnnntnnnnnnnnannnnnnnnnnnnnnnnnnnnnnnnnnnnnnnnnnnnnnnnnnttnnnnnnnnnnnnnnnnnnnnnnnnnnnnnnnnnnnnnnnnnnnnnnnnnnnnnnnnnnnnnnnnnnnntnnnnnnnnnnntnnnnnnnnnnnnnnnnnnnnttnnnnnnnnnnnnnnnntnnnnnnnnnnnnnnnnnnnnnnnnnnnnnnnnnnnnannnnnnnnnnnnnnnnnannnannnnnnnnnnnnnnnnnntnnnnnnnnnnnnnnnnnnnnnnnnnnnnnnnnnnnnnnnnnnnnnnnnnnnnnnnnnnnnnnnnnnnnnnnnnnnnnnnnnnnnnnnnnnnnnnnnnntnnnnnnnnnnnnnnnnnnntnnnnnnnnnnnnnnnnnnnnnnnnnnnnnnnnnnnnnnnnnnnnnnnnnnnnnnnnnnnnnnnnnnnnnnnnnnnnnnnnnnnnnnnnnnnntnnnnnnnnnnnnnnnnnnnnnnntnnnnnnnnnnnnnnnnnnnnnnnnnnnnnnnnnnnnnnnnnnnnnnnnnnnnnnnnnnnnnnnnnnnnnnnnnnnnnnnnnnnnnnnnnnnnntnnnnnnnnnnnnnnnnnnnnnnnnnnnnnnnnnnnnnnnnnnnnnnnnnnnnnnnnnnnnttnnnnnnnnnnnnnnnnnnnnnnnnnnnnnnnnnnnnnnnnnnnnnnnnnnnnnnttnnnnnnnnnnnnnnnnnnnnnnnnnnnnnntnnnnnnnnnnnnnnnnnnnnnnnnnnnnnnnnnnnnnnnnnnnnnntnnnnnnnnnnnnnnnnnnnnnnnnnnnnnnnnnnnnnnnnnnnnnntnnnnnnnnnnnnanntnnnnnnnnnnnnnnnnnnntnnnnnnnnnnnnnnnnnnnnnnnnnnnnnnnnnnnnnnnnnnnnnnnnnnnnnnnnnnnnnnnnnnnnnnnnnnnnnnnnnnnnannnnnnnntnnnnnnnnnnnnnnnnnnttnnnnnnnnnnnnnnnnntnnnnnnnnnnnnnnnnnnnnnnnnnnnnnnnnnnnnnnnnnnnnnnnnnnnnnnnnnnnnnnnnnn

SEQ ID NO: 844 - DNA, 4000 bp, Escherichia coli
  misc_feature (123)..(123): n is a, c, g, or t
  misc_feature (141)..(141): n is a, c, g, or t
  misc_feature (144)..(144): n is a, c, g, or t
  misc_feature (165)..(165): n is a, c, g, or t
  misc_feature (206)..(206): n is a, c, g, or t
  misc_feature (243)..(243): n is a, c, g, or t
  misc_feature (363)..(363): n is a, c, g, or t
  misc_feature (375)..(375): n is a, c, g, or t
  misc_feature (741)..(741): n is a, c, g, or t
  misc_feature (747)..(747): n is a, c, g, or t
  misc_feature (2079)..(2079): n is a, c, g, or t
  misc_feature (2139)..(2139): n is a, c, g, or t
  misc_feature (2157)..(2157): n is a, c, g, or t
  misc_feature (2252)..(2252): n is a, c, g, or t
  misc_feature (2258)..(2258): n is a, c, g, or t
  misc_feature (2264)..(2264): n is a, c, g, or t
  misc_feature (2270)..(2270): n is a, c, g, or t
  misc_feature (2276)..(2276): n is a, c, g, or t
  misc_feature (2279)..(2279): n is a, c, g, or t
  misc_feature (2285)..(2285): n is a, c, g, or t
  misc_feature (2291)..(2291): n is a, c, g, or t
  misc_feature (2294)..(2294): n is a, c, g, or t
  misc_feature (2315)..(2315): n is a, c, g, or t
  misc_feature (2327)..(2327): n is a, c, g, or t
  misc_feature (2330)..(2330): n is a, c, g, or t
  misc_feature (2333)..(2333): n is a, c, g, or t
  misc_feature (2339)..(2339): n is a, c, g, or t
  misc_feature (2342)..(2342): n is a, c, g, or t
  misc_feature (2411)..(2411): n is a, c, g, or t
  misc_feature (2414)..(2414): n is a, c, g, or t
  misc_feature (2423)..(2423): n is a, c, g, or t
  misc_feature (2441)..(2441): n is a, c, g, or t
  misc_feature (2446)..(2447): n is a, c, g, or t
  misc_feature (2453)..(2453): n is a, c, g, or t
  misc_feature (2456)..(2456): n is a, c, g, or t
  misc_feature (2465)..(2465): n is a, c, g, or t
  misc_feature (2474)..(2474): n is a, c, g, or t
  misc_feature (2483)..(2483): n is a, c, g, or t
  misc_feature (2486)..(2486): n is a, c, g, or t
  misc_feature (2489)..(2489): n is a, c, g, or t
  misc_feature (2498)..(2498): n is a, c, g, or t
  misc_feature (2525)..(2525): n is a, c, g, or t
  misc_feature (2534)..(2534): n is a, c, g, or t
  misc_feature (2726)..(2726): n is a, c, g, or t
  misc_feature (2744)..(2744): n is a, c, g, or t
  misc_feature (3029)..(3029): n is a, c, g, or t
  misc_feature (3077)..(3077): n is a, c, g, or t
  misc_feature (3101)..(3101): n is a, c, g, or t
  misc_feature (3104)..(3104): n is a, c, g, or t
  misc_feature (3173)..(3173): n is a, c, g, or t
  misc_feature (3188)..(3188): n is a, c, g, or t
  misc_feature (3230)..(3230): n is a, c, g, or t
  misc_feature (3299)..(3299): n is a, c, g, or t
  misc_feature (3314)..(3314): n is a, c, g, or t
  misc_feature (3431)..(3431): n is a, c, g, or t
  misc_feature (3452)..(3452): n is a, c, g, or t
  misc_feature (3612)..(3612): n is a, c, g, or t
  misc_feature (3623)..(3623): n is a, c, g, or t
  misc_feature (3701)..(3701): n is a, c, g, or t
  misc_feature (3722)..(3722): n is a, c, g, or t
  misc_feature (3767)..(3767): n is a, c, g, or t
  misc_feature (3770)..(3770): n is a, c, g, or t
  misc_feature (3776)..(3776): n is a, c, g, or t
  misc_feature (3779)..(3779): n is a, c, g, or t
  misc_feature (3818)..(3818): n is a, c, g, or t
  misc_feature (3830)..(3830): n is a, c, g, or t
  misc_feature (3886)..(3886): n is a, c, g, or t
  misc_feature (3897)..(3897): n is a, c, g, or t
  misc_feature (3909)..(3909): n is a, c, g, or t
  misc_feature (3912)..(3912): n is a, c, g, or t
  misc_feature (3915)..(3915): n is a, c, g, or t
  misc_feature (3921)..(3921): n is a, c, g, or t
  misc_feature (3942)..(3943): n is a, c, g, or t
  misc_feature (3984)..(3984): n is a, c, g, or t
  misc_feature (4000)..(4000): n is a, c, g, or t
ttttcggaaagttcttgagcaacagctttacgagcttcgctaagcttgtttccggctgatatcaaagcttcgtagctctttgatagtgaagcttcaaggtttaacttctcatcgtcaaagttntctatggtcaagagctcnccntcaatattatcgcagtaagcnagaatatcctctatggtactaccgtatttctttttaagagnctttatgagctctagacgctcaattgcttcatctagntctgatggatcaaatgtcatttcgtcgacagtatctcttagaacagatacggcttcttcaagtctatagtatgcatcattgcatgattctaaaagctcattcagctttcctgagtactcngcaagtgattcnatgtatgaaagggcagaacctaaagtgctatatgcaccacgttcaccatctataagatcataggcgtggcttgcatcacttgtaatcttctctgagtttttgagcatgtcaaggcgttcctctagctcggtgtcttctcctgggacaagctttgcggatttaatctcgctgatttcaaacttgtaaaaatcaagttttcttgcattctcagaagagagtgagagaagtttgtttagcttcgctttcttttctatatagctttgatattcattagaataagaactcttaagcttgtttatttgttcaaaaccataggtgtcgacaagtgtcaggtgattttcggtgtttagtagtgattgattgtcntactgnccgtgaatatctgcaagcttttggcaggtgagctgaagctctgataatgtaactagtctgccattcagtttgcaaaggttttttccgttagaatttatttctctagaaataattacttcttcgccgtcaatttcacccgaaagttcaataattgctttgtctgtcccaaaacgaacaaacgacgaatcagccctgcttccaagtgcaaggcttatcgccgttactactattgattttccgcttccggtttctccggtaatgatattcagtcctgagtaaaagtcaacatcggtgtttttgataatagcaaaatctctgatactgatgtggtttatcattacttgtgattccttaaaataagcatgttgttaaaaatggataggatttcttctacatgatcttcgtggtcgatgatgagtagaagggtattgtctcctgcaatggagccgacaacatgaggcaagccaatgttgtcaatagcctcgccggctgcagcgccgcaacctgaaagagttttaatgattattaagttgtgtgcagatgcaaatgaagtaatcgtttctctaaagatttttacaaatcgatctgagataggtgcattctgctgcgtgcttactgcatatttatacttgcctgttgatgacagtaccttgattagctgtagctctttgatgtcgcgagatatagtcgcctgtgtaacatcaaagccttcgctctttagcatagccgctagtttctcttgagtttcaatttcgttgtttgagataatctcaagtatcttgttttgtctcgagtaacgcataataataacctctcctggcaaagatgcctccctattttgataattataacacatgtatagttataattaaagataatttgaatggggatttacaaatattgacatataagctctctggttagacaaacatctgttcatatgttataatatcaagcgaaaattaggagagataaagtatgagaattataggtatagaccctggttatgccattatgggctggggaattttagacctaaagggaaataaattcagtgttgttgattacggttcgattacaactgatgcaggcgtagaggcacctaagagacttcagcatatatatgccgagcttggagctattattgcaaaatatcagcctgaggaagctgcgatagaggaactgttttttaataacaatgcaaagacggtaattcttgtaggagaagcaagaggtatcgcagttttagcatgtgcaaatgcaggactagagatatcagaatatacacctttacagataaagcaggctcttgtcggatacggaagagctganaagaagcaggttcaggcaatggttaaggcaatcctaaacctaaaggaagttcctaagccngatgataccgcagatgcngttgcagcagcgatttgccacggacacagtcgtggtaggagggtaattaagtgataagatacattaagggaactatatatcatcaaatggatggntctatnatagtngagaanagctcnggnatgggntttcanatnatgatttccgcaggatctagnttttataagctngtnganggagangangtcaaagttcatacttcaatgatagttaaggaggatgacataagcctctatggcttttctgatagggangancttgaactntttgagcttttgataacngtaannggtatnggngcaaagggngctatgtcnataatgagngtnctnagtcctaangcgctaaagtttgcgattgcatcaggngatagcaantccatagcaaaggcgaatggtgtcggaaagaagacagcagagagaatcatcatagatcttaaggataaagtgggaagctttgatgaagcagagctagatggtcctatagatgataagatatttgttaatgacgatactcgctcggaggctaagatagctttgataagccttggttattcacagcaggaggcngagaatgccataagcaanattaagggtgagaatttgacgatagaggattatatcaagcttgcactcaagcagatgtaggtaataggaatggaagatagaattacaaaaacaagtgccaatgaatttgaggagagacaggaggtcggtcttagaccgcagcgtcttgatgattttattgggcaaagtcatgttaaggaaaatctaaagatatttatagaggcggcaaagctaagaggtgagccactagaccatgttttgttctacggccctccaggacttggtaagacgacacttgcgggaatnattgcaaatgagcttggtgttgatattaagattacttctggccctgcnattggaagagctgcagatcttgcngcnattttgactaatctaaacgaaaacgatgttctttttatagatgagatacatagacttaatagatctgtngaggaagtcctttantctgcgatggaggactatgctcttgatatagttataggaaanggaccgtctgcaaggtcgataagactcgatatagcaaggtttactttgataggtgcaactacgagggcnggtagcctttctgcncctctaagagatagatttggcgtcatagacaagttcgaagtatatggaagcgatgagcttatcaatattattggtagatctgcatccttgcttggggtgacgacagatgaagatgcnctttatgagatggcaagatgntcaagaggaactcctcgtgttgcaaataggatacttaagcgcgtaagggactttgctcaggttagcggaaaatcacatattgactttgaaacggctcagcagtcacttgctgctcttggtgttgatgcacttggtcttgagaaactagatagagagattntagatgcgatnataacaaggtttaacggtggtccagtgggtatagatacaattgctgcatcgattggtgaggagagaattaccatcgangacgcctacgagccatatttnatacagcaaggattgctttatagaacgcagaagggcaggatggcnacngagctngcntataagcaccttggaatcgcctatagcggtgacaaaaanatcgatgcacangaagatagtgcagagtaatttggagaaatagatgcatataaacgattttgattatnagcttccagangagctgattgcncanaanccacanaaggacagggacaaatgtcgnntgatggttttgagacgaagcgacaatagcatagagcatagncatttctttgatatan

SEQ ID NO: 845 - DNA, 4000 bp, Escherichia coli
  misc_feature (2)..(7): n is a, c, g, or t
  misc_feature (9)..(9): n is a, c, g, or t
  misc_feature (11)..(11): n is a, c, g, or t
  misc_feature (14)..(15): n is a, c, g, or t
  misc_feature (17)..(18): n is a, c, g, or t
  misc_feature (20)..(21): n is a, c, g, or t
  misc_feature (23)..(25): n is a, c, g, or t
  misc_feature (27)..(34): n is a, c, g, or t
  misc_feature (37)..(41): n is a, c, g, or t
  misc_feature (45)..(45): n is a, c, g, or t
  misc_feature (47)..(49): n is a, c, g, or t
  misc_feature (52)..(52): n is a, c, g, or t
  misc_feature (55)..(61): n is a, c, g, or t
  misc_feature (63)..(78): n is a, c, g, or t
  misc_feature (80)..(85): n is a, c, g, or t
  misc_feature (87)..(89): n is a, c, g, or t
  misc_feature (91)..(91): n is a, c, g, or t
  misc_feature (93)..(97): n is a, c, g, or t
  misc_feature (99)..(101): n is a, c, g, or t
  misc_feature (103)..(104): n is a, c, g, or t
  misc_feature (106)..(106): n is a, c, g, or t
  misc_feature (108)..(111): n is a, c, g, or t
  misc_feature (114)..(116): n is a, c, g, or t
  misc_feature (120)..(120): n is a, c, g, or t
  misc_feature (122)..(126): n is a, c, g, or t
  misc_feature (128)..(128): n is a, c, g, or t
  misc_feature (131)..(132): n is a, c, g, or t
  misc_feature (134)..(136): n is a, c, g, or t
  misc_feature (139)..(140): n is a, c, g, or t
  misc_feature (144)..(146): n is a, c, g, or t
  misc_feature (148)..(149): n is a, c, g, or t
  misc_feature (151)..(152): n is a, c, g, or t
  misc_feature (154)..(154): n is a, c, g, or t
  misc_feature (156)..(157): n is a, c, g, or t
  misc_feature (159)..(162): n is a, c, g, or t
  misc_feature (165)..(166): n is a, c, g, or t
  misc_feature (168)..(171): n is a, c, g, or t
  misc_feature (173)..(183): n is a, c, g, or t
  misc_feature (186)..(187): n is a, c, g, or t
  misc_feature (189)..(198): n is a, c, g, or t
  misc_feature (200)..(201): n is a, c, g, or t
  misc_feature (204)..(204): n is a, c, g, or t
  misc_feature (206)..(206): n is a, c, g, or t
  misc_feature (209)..(209): n is a, c, g, or t
  misc_feature (215)..(215): n is a, c, g, or t
  misc_feature (218)..(219): n is a, c, g, or t
  misc_feature (222)..(222): n is a, c, g, or t
  misc_feature (224)..(232): n is a, c, g, or t
  misc_feature (235)..(235): n is a, c, g, or t
  misc_feature (237)..(242): n is a, c, g, or t
  misc_feature (244)..(245): n is a, c, g, or t
  misc_feature (248)..(248): n is a, c, g, or t
  misc_feature (253)..(254): n is a, c, g, or t
  misc_feature (256)..(257): n is a, c, g, or t
  misc_feature (260)..(270): n is a, c, g, or t
  misc_feature (272)..(272): n is a, c, g, or t
  misc_feature (274)..(274): n is a, c, g, or t
  misc_feature (276)..(276): n is a, c, g, or t
  misc_feature (278)..(278): n is a, c, g, or t
  misc_feature (280)..(284): n is a, c, g, or t
  misc_feature (286)..(286): n is a, c, g, or t
  misc_feature (288)..(291): n is a, c, g, or t
  misc_feature (293)..(295): n is a, c, g, or t
  misc_feature (297)..(298): n is a, c, g, or t
  misc_feature (300)..(301): n is a, c, g, or t
  misc_feature (304)..(304): n is a, c, g, or t
  misc_feature (311)..(311): n is a, c, g, or t
  misc_feature (313)..(313): n is a, c, g, or t
  misc_feature (315)..(315): n is a, c, g, or t
  misc_feature (322)..(322): n is a, c, g, or t
  misc_feature (325)..(325): n is a, c, g, or t
  misc_feature (327)..(330): n is a, c, g, or t
  misc_feature (336)..(338): n is a, c, g, or t
  misc_feature (340)..(340): n is a, c, g, or t
  misc_feature (343)..(345): n is a, c, g, or t
  misc_feature (351)..(351): n is a, c, g, or t
  misc_feature (353)..(357): n is a, c, g, or t
  misc_feature (359)..(359): n is a, c, g, or t
  misc_feature (362)..(367): n is a, c, g, or t
  misc_feature (369)..(370): n is a, c, g, or t
  misc_feature (378)..(378): n is a, c, g, or t
  misc_feature (380)..(381): n is a, c, g, or t
  misc_feature (386)..(386): n is a, c, g, or t
  misc_feature (391)..(392): n is a, c, g, or t
  misc_feature (397)..(397): n is a, c, g, or t
  misc_feature (399)..(399): n is a, c, g, or t
  misc_feature (401)..(401): n is a, c, g, or t
  misc_feature (403)..(403): n is a, c, g, or t
  misc_feature (406)..(406): n is a, c, g, or t
  misc_feature (409)..(409): n is a, c, g, or t
  misc_feature (412)..(412): n is a, c, g, or t
  misc_feature (414)..(415): n is a, c, g, or t
  misc_feature (417)..(422): n is a, c, g, or t
  misc_feature (424)..(426): n is a, c, g, or t
  misc_feature (429)..(431): n is a, c, g, or t
  misc_feature (434)..(435): n is a, c, g, or t
  misc_feature (437)..(437): n is a, c, g, or t
  misc_feature (445)..(445): n is a, c, g, or t
  misc_feature (742)..(742): n is a, c, g, or t
  misc_feature (1648)..(1648): n is a, c, g, or t
  misc_feature (1789)..(1789): n is a, c, g, or t
  misc_feature (1965)..(1966): n is a, c, g, or t
  misc_feature (1968)..(1971): n is a, c, g, or t
  misc_feature (1973)..(1973): n is a, c, g, or t
  misc_feature (1992)..(1993): n is a, c, g, or t
  misc_feature (2014)..(2014): n is a, c, g, or t
  misc_feature (2140)..(2140): n is a, c, g, or t
  misc_feature (2200)..(2200): n is a, c, g, or t
  misc_feature (2237)..(2237): n is a, c, g, or t
  misc_feature (2417)..(2417): n is a, c, g, or t
  misc_feature (2810)..(2810): n is a, c, g, or t
gnnnnnngnangannannannannnannnnnnnncannnnncagnannncgncgnnnnnnncnnnnnnnnnnnnnnnngnnnnnncnnngntnnnnngnnntnntntnnnnagnnnttcntnnnnngncgnngnnnacnncgcnnngnngnngncnncnnnngannannnntnnnnnnnnnnngannannnnnnnnnngnngangncgncgacgncgnngangnnnnnnnnncgncnnnnnngnnggnggagnngnngcnnnnnnnnnnngntncntngnnnnncncnnnngnnncnncnncgncgacganangngacgagncgngnnnngaggtnnngntgnnngaaaanannnnncngcnnnnnnannaaacgaancnnacgangaagnngacgngngngncgncgncgngnngnnnnnncnnnaannncgnntncttactcncgaagactggccacgtgaagtcgatatcaaagcgtaaggcgaaaacaaccacggtgtcgcagaagaaaccgtcgaacgaggtggcgctggtggaaatgccgcgcgcatcgcgcgcgctgacgactgcaaacgacaagcgctcgaccgcacacacgtggaagtcgtgtccgtttgctattgcgcaaggatccgagccggcgcccgccggatcgcaacagtgcggtaactgcagagcgttggatttgttttatcttgattcgtcgtggaatcaatgaccgacgccagagacgcattttngcctaacgacgtatatgtatgcacacgcttattgattttatcgcgcgatcgattgaaatattgaatattgaaatagtaatcgtcgccgcggcgcggcgacgtcgcgcgatcggtttctctcgcttctactacgcgaggcgtcaatttaacgtacaatcatatcgctgtgctgagaattaaaagctgcgtctaagacgcacaagtgaacgagacagaagtatgaaactagcagcaagagctcttcgcgttgacgctgcgaccttcgcccggtcgcacggtgtttcctcgcggacccgcgttcatttgcggttggctcgccatgcggttcttaatttcgttcgccatggtcatgaaagcttgctcaacgttcgtcgcattcttcgccgacgtctctatgaacgggatcccaatctcatccgcgaacgccttcgccgtcgcgtaatccaccaccttttgactcgtcaagtcgctcttattccccaccagcaacttgttcacattttcgttcgcgtagcgatcgatctcgttcaaccatcccttcaccgcctcaaaactctccatgtcggtcacatcgtacacgacgatgatgccgtgcgcgccgcggtagtacgacgacgtgatcgtccgaaatcgttcctgccccgcggtgtcccaaatttgaagcttgatcgtcttaccctccagctccacagtgcgaatcttaaaatcaaccccgatcgtcgagatatacgtccccgtgtacgtatcgtccgcgaagcgaagcaacagacacgacttaccgacgcccgagtcgccgatgagctgcgcgcgcgcgtcgatagatccgccctcgtcagtcctcgcgtctccctcgcctccgttcgcgcctcccgcgcccgcgcgtcgatcccgtcctcgtccgcgtcnccttcgctcgcgtccgcgcgcgcccgtccctcgatccctcgcgtcaccgcgcgtcgcggtcgagcgttcgcgtcgcgacgatcgcccgtctcaacggcacgcggcgcgttcgcgcgcgcgtcgcgttcgcgcgcgcgcgcncgcgtcgcgcgcgcgcgcgccgaggcgtcggtcgtcgcggcgactcgttcgacgcaccaggagcttgaacaggtaatcgtactcgggattcatcgtcgcgcgcgcgagattctggcgcgcgcgggcgtcgcgcgcgcgcgatggcgcgcgatttagcgccccgaaccctagtgcgnngnnnngnatagaaggacggtgtgagnncatcacgaagtcaactgtttnggcggcggcgcgacgcgcgcgcgcgcgcgcgcggccgcacacgacgacgcgcctcgcgccgtcgacgcgcgcaaacgtcgctcgcacgccgcgcgcgcgtcgcgccgccgcgcccgcgacgcgcgncgcgcgggagcgcgcgaaaacgacgcgcgaacgcctcgcgaggcggcgccgacatgacgnacgcgccgatggacgccgacggcgcgggcgcgagggncgacggggacgcgcgcacggcgaatctggtggtgacgaaaccgaaggacatcggcgacgcggatttcgcgaattatttttgcacgtacgggtacctgtatcaccagaaggacatgctggaggatcagaatcgaatgacggcgtacagcgacgcggtgcgattgaatccggattcgttcanggggaaggtggtgctggacgtggggacgggatctggtgtgctcgcgatgtgggcggcgcaagcgggggcgaagaaggtgtacgcggtggaggcgacgcacatggctgtgcaagcgaggaaaatcgtcgcggcgaacgggctgagcgacgtcgtggaggtgatacaaggatcgatggaggaggtggaactgccggagaaggtggacgtgatcatcagtgaatggatggggtactttttattgcgcgagtcgatgtttgattcggtgctgtgcgcgagggataagtggatgaagccgggaggggcgatgtttccgtcgcacgcgaagatgtatctgagcgcgattaagtcgaacaagagtgggcaaaaatatcaagagcttcaagagagcttgancgtgtgggaggatttcgtgcggaacacgcacgaaaattatggcatagacttgtcgtgcatgaacggcgaatacgaagatgagcaaaaagagcactatttgaacaccgcggcgtgggtggacattcacccgtcgcaagtcatggctaagccgtttacgttggcgagctttgacttgaacacgtgcacgatggacgacatcaaagttcttcgcgacgtcgacttcaagctgcgcctgttcgatggactcgcagggccttcgggggagacgcgcgtcggcgcgttcgcgggctggttcgacgtcacgttcgcgggatccaaggagaacccgtgcgagaacccggtcgagctcacgacagcaccggacgcgaacggcgccacgcactggggtcaacaagcgttctacatgtttcctgaggtatacgccagcgatggtcacttcatttctggtaagtttgacatggttcgtcgcaaggaaaaccaacgcctgtacagcgttcggatgaactggacgcagtccgacacggacgctgggccgccgaacgagtccatcggcacgcgtgggatcgtttggcagattgagtgagcgctcaaccctatcactaatactagtacggtttaaccaaagctcacgcacatttttccgcacgtctcgtccgtctctagtccgcgttgactgtttgactccccaacgcgcgacgacctcactcgcacgcgcgcggcgatcgcgctccatgtccgccgcgagcgcccttgcgagcgcgcgcgacgcgttcgacgacgaggactacgacgaatcgctgcaaatatgcgacgacgctctgggaaccggcgacgaaggtgaaaaagtggcgctgctgtgtcaccgctccaagacatttctagcggtcgggctcgcgcaagaggcgttcgcggacgccgtagacgcggtggcgctcgagggcgacaactccgaggcgctgctcaggctcgggatcgcggcgtacgagatcggggcgtatgcaaaggcacgggaagcgctcgagcgcggcgtcggcgccgagccgagcgggacgagccgacgcgcgacaacgatgaagtggctcgaaaaggcgaaaacggcggaaatgaaggcgagagatggcggcgaagatgcatcgccacacgcgaacgacgagcgtttcaagcgggcgtggtatcagtcgcagacgcac

SEQ ID NO: 846 - DNA, 4000 bp, Escherichia coli
  misc_feature (1986)..(1986): n is a, c, g, or t
  misc_feature (1988)..(1988): n is a, c, g, or t
ttacaaaaaaaccagagcctgagcttgaaatctttacgtctataagtttatcctcttcattttctttgtcgtttttagcggcggtgcgataccattcggctgcttttttatagttctttttcgcattggtgtctttatcgccataatagtacatagaggctaaggccatttgagattttttgtagttttggttaattgctttgacgtaccactcttttgctttttttagatccttttgtactactataccaaactcataaaaaatacccatttgatgctgtgatgcagcattgcccaaatcggctgcttttttaaataatttgaacgccttgggcttgtccttcttaacgcctaggccggccaagtaatgcttagcaagattagttattgctttaacattgcccaaatcggctgctttgttgtaatattcaaaagctttctctgcattgatttcaactacgtcttttccagtaatgtacaaatatgctagtgtgttataagcttgcgctacgccttggtctgcagccttgttggcccaatataatgattttttataatcacgttttacatatatggctcttagatagtatttggctaatttgtcttgagcttcggcataaccaagctcagcagctttgataaataattcaacagctttatctgtatttttatcaaaaccctctccatttttatgcatttctgcaagatcaaataatgattctttatcgccttgatctactgctttttgataccaataaattgcttcatgataatttttactagtgccttttcctagataatgttgtaaggcaatatccttcattgaatttacattgccctgaagtgcggcttgggtgtcccagtataaagatttagccttatcaatatcaacccctaatccaagatagtatcgatctgataaggctgtctgtgcgtaaatgttacccaactctgctgctcttttatagtactcggtttcaagcttttcttgcttagttggtgatgtaagtccaattacaaagccaatgttatacaaagaggttgcgtcgcctttatcggcagatttttggtaatactcaattgctttatcaaaatccacttgaacggtaaatccgtatgtgtaatcaagcgctttttcaaaatctacattgcgatcctgactagctatcttgccagataggacgtcggccttatattgggcatctgtatcacctttttgagtggctttttcataataagccagagccctgggaatgtttatggatgtgccttttccatattcgtacatatgtccaagctcaaattgagagttcgcactgtcaattgcatcagctctttcaaaataatcttttgctatatcaaagtcttgctcgataccatacccatgtaggtgaatttttcctaaaagccataaggcacttatactctctttatacttaattgatttttcaaggtactgtcttgcctgaacataatcttgcttaacgccacgtccgacataatgcatatctccaagtcttaacataacaccagaatcaaacttttcagaagctgccaaatagtgtttaaaggctagtttataatcatcatctataccttctggtgcataataataagccattgctaaatatcttgttagcataggtttaaaagattccatatcctcttcttcaagtgcttgcttaaaattaaaaatagatgttttataatcacctttttgcattgcatctagaccttccgagaatccagcatgtgacacagatattgttagtgttataaaaagtgagattaataatttcattgctctccaaatggttggttaatcttactcaagttaagtgtttaattgatacataatttgttgctatttttcaatctttgttgtttttgttaagttaagtattaatacaaaaaacattaggacgtatagtgttacaaaggtattagatattggctctttcatccagccctcaattgggtagaatngngcagaaagttctggaatccagatgcatgcaaatagaacgattaatgtaattgtatttttcatgataatgcctgttgttaaaaaccaccattatcaaaaataaatgctaactaaaaatgaagattgaatgttttattactgaagtttgttgaaagctaaatgtgtgtcaatccaccgattaacccaccaaacataacaaataacagccataaaatgataattgctggaatagaggcaattgcccacttaaccataaaccacaccattgataaaaatggcattttaatgtctgtaacctctacttttgaaacctctgaatccatcattcacccctgcctaaatcaacataaaatatagccaacataataacgataatctggctaaatatcaagccaggccatgttatgatttttgcactaagtttgcagtcaccacatatctaagcgaccctcctgcaactactgcgttaaacggataacaagttactaatttgagctctgcttggttgctgctaatatttatatctactttgtcagaatcaattatttttatggtgcttacttggtattggtagttttgtttggtatagattgaatccacttcaaattgatcacctattgcaacatcttctaaaaaatcaaagtgcgtatctcgatgagctgatatgattgttgtacccgctctccccggatgtcttgattcaatattgcgcccagggccaaaggcaagcacgttgcccgtgtctccctcaagcacgattaaatcttgattgtgcttggctgatttaagccttatgacagggtgtgaatccatccagttccagggttttacttgatagcctgttttgttagcaacattccaggctgattgaatcatatattgggcagcttcagctttaatcggcatgtaggcgccgtaagcaaaagtactaatgccgataattgccagtagtattgatttattcatgatgttttcctagagcgagtaacaactgacaatagaataagagcaagccctagcatcatccatagctgtgcattggtcgctgttttagcggctttaaccttattagcaaccacttgggtggttgtggcttgattgctcggttttgacggtgttatgtccactgcaactaatgaggtaaattttgagaccagatgatgctcaagcgcaatattggtgatatcggcttgcaccttgtctcgatcaatgcgtctattttgcgctcggtattgatgcatcatttgctcgattttacgtctagcccaaagcacatcaatgccagttgtgttgttattggcgctaatatcaatatctttggtgaatacaccgttagcggtatcgccactaatactgagcttgctagggatggcgttgagtttgtaaactgctgtgatcacctcacctttgtataaatcagagatggatcctaatgcttgctcagcattaatatccatcgggaagttgatattaatatttgtcattgctggagattcaagcttgtcaaatagctccagcattttagtttctacttcatcgatattaccaatgaaagtataagtgcctttaccgtattcagacaaagtagtcattagatgagagtttggtgcagatccgataccaattgtaaacagacggtcttcatcaatattttgacgaacgacacggaatatctcatcttcattgcccacctgtccatcagttaaaaagatgatttggcgtaggtagttatcagcactagattctcttgaatcaaaagcatatttaatcgcctcaagtggctctgtgccaccatcagcacttaaagcattagcaaaacgaacaccatgcttcttgttcatattaatggcgggcatggcgctatcaaagagtgggtcaaagcctgagtcaaaatcaataatattaaatcgatcagttgggttaagtctattgattgcctgaaccaatgctttagatgcttgtagcatagatgatccaagcatagagcctgatgaatcaataacaaagataagc

SEQ ID NO: 847 - DNA, 4000 bp, Escherichia coli
  misc_feature (502)..(502): n is a, c, g, or t
  misc_feature (733)..(733): n is a, c, g, or t
  misc_feature (943)..(943): n is a, c, g, or t
  misc_feature (1381)..(1381): n is a, c, g, or t
  misc_feature (1500)..(1500): n is a, c, g, or t
  misc_feature (1638)..(1638): n is a, c, g, or t
  misc_feature (1642)..(1642): n is a, c, g, or t
  misc_feature (1979)..(1979): n is a, c, g, or t
  misc_feature (1988)..(1988): n is a, c, g, or t
  misc_feature (2319)..(2319): n is a, c, g, or t
  misc_feature (3005)..(3005): n is a, c, g, or t
acatattacgggtaatcctactgatttggtcgttttattgttgatattaaatgtataatcggcattcagggttaaccctttgataatagttgcttttaagaaggcacctatacgagtataagagtcattagtcttgtcatctcctgcttgtttaaggtatgcgatatcatttttcatatcgattccctgataagtaccataaggaccgaagaaacttccccagcgccacatatacgtataagtattacggcgggtattaggggtggtgtatgccttgtcactataactgaagcggccaccgatttgtaaccaatttgttatgtcggaagtgacattcatattagcgttgtatttattcaacttatccgggttgaatgtcatcactccttcctcgtgattatagccaacggacaaaaaataggatgtttttccactggttccctgtattgatatattgtgactttgtgcgggtttccagtctcgaaacataattccgaccacntcccaatctgcataatatagtgcgctgccatcttctcccaaatcaaaatcatcacccggaatcatttcgcgatatccggcttttttacctccgtgtctttgtttccaagcttcagcttttgctatgaaattgtcatccatgtacataccgaacaattcattctcgagattggcacgagtgttggccgcacgcaaagctctggcctgtgtagctacatccggatagttcggnagtatggttggtgtatcccaggagaaattattggtataattgattgtgactttatctgttttctttgcagattttgttgttactaatataacaccaaatgctgctcttgtaccatagatagaagtggaggctgcatctttcaaaacagatatattatcgatatcctgtgtatttaaatatgagatatcgtccattggcacaccatctacnacaataagcgggttactggttgcactgttactcagtgttccggtaccacggatagtcatggttggtttgctgtttagttttccactggtattagtgatggtcaatcccggtactacaccttgcagagctttggacacatcggattgtggacgggcttccaaagtcttgctgacatctacagtggatactgctccggtaaggtttgcctttttctgggttccataacctaccactaccacttcatctagtaattcgttgtcctctttcaggacaactttcatgcttttagttgctttcacatcttgtggttggtatcctacaaatgtgatttgcagagtggtacctacttttacatttagtgaaaatttgccatccatgtcggttacaatcccattggttgtccctttctctacgacactggcaccaataatcggttcnccgtttgcatctactactacacccgtcacggtttgtatttgcatttgttcagtcaccttgtaactactgccggaagcagtttgattagccattgcattgctgctacctataattaaggnagtaatagccatggctataaggaggttgctgttcgctaatcctcgtttcttgcgatcttcattcataaaagatagatgatttaattgttttgtttttcatttgatttctcaggaaaatgcaggtaaaggtaaaatagnaggntaggctaagctatccttggtttggataattatttatcataggcatttcatttaaaggttttaatttttatgttatctctatttgtttttaataagtcctgttaatccttgtttttggccagtttaattaatatcaattggctttgttgattcttttaagagataaattgtttattattaacaaaggtttagaaactctttggagttctactatggcaaagatatattttattttaatatcaagaacaaatattttatataatttagatttatatttgtatattcacattatgacgcttctctgttttataaaaatgatctgtgaatacatttataancgatggttnttaaggtttagaaacattttttagatattgtgcgcgcttttaggactcttcgatgttcatggagtgaaactcgattaaaccattcataggtgtttcttctataacatctatctctactccgaattcctgtgctacttcttgtaaaatatctggatacgcataagctagtgagcctacaaagcggatgggatagtttatataatcgtattggcatacgttgcggttaaagaaactacggagattgttagttaataggttatatacatattcattatccatataatctcctaagaaatacgcaatggttcctaaaaaacgattagggaaaggnagattatatacagattccatgacatcattgaccgagatacgaaacttctcatgaaattcatttgccaattctttgggagctagtcctttaagaaggtcggctaaaaaaagttttccaagaacggctccactgccttcatctcctaaaatatatccggcagctttcacatttttgactataattttaccatcgtaaaaacaggaatttgatccggtacccaagatacaggcaattccggcttcacatttaaataaaccacgagctgctgccagcaaatcgctttcaacctgaatgggagttttgaattgtgccactaaagaggcacctaagatatttttcttttcatatgaactgcatccggcaccatagtaatatacttgatccagtttttttttgaagaatgattccggtagtcccaacctgacgcttctgctaatttctcttctagtctggaagaaagggtttagcccttcggtaaacacacgttgtacgagatgattgtcttcaaccaatgcccattccgttcttgtagaaccactttccgcaataagtttcatttcgcagcctttttgatttggatacaaatatataatattttttgtaatttgatttgttttgatcggaaagttttttcatatcaaataaatgcattcggaaatgtagttccctctttgaatgcttgtgcngaacaatcttttgtttttatccttgtgtcggacctgatcaaatcattcttatttaatagattgtatgaagtttataaaaagaaaatctcagccggattgactacctggctgagatgaattgaaatattaaatcttataatggttatctgcggttaaatccggattttaatttatccgatatttccttctttaatcagatattcggcaatctggacagcattcagtgcggctccttttttgatttgatcacctacaatccagaaggttaatccacagtcattggtcaggtctttacggatacgacctacataaacgggatctttgcctgccaggaacaagggcatcggatattctttctcggcaggattgtcttgcaataccaatccttcacctttggcaaaagcttcacgagcttcttctatcgaaataggacgttctgtttccacccaaatactttcagagtgagcacgaagtgccggaacacgtacacaagtagcacttactttcacgtcagagtgcatgattttgcgtgtttcgttatacattttcatttcctctttcgtatatccgttttctgtgaatacatcaatttgaggaatcaggttgaaggccagctgatacgcaaacttttcaacagtgacaggttcattggctaaaacctgacgatactgttcgtagagttcgtccatagctgctgcaccggcaccgctcgctgcctggtaagtagatacatgcacagtttttatatgagaaagctcttcgatggctttcagtgcgacaaccatctgaatggttgtgcaattcgggttggcaatcacaccacgtggacgatctttagcatcagctgcatttacttcgggcactaccaagggtacatcggcatccatacggaaagcgctggagttatcgatcattaccgcaccatactgggtaatagtcttctcaaactctttagacgtgcctgcaccggccgaagtgaaagcaatgtccacccc

SEQ ID NO: 848 - DNA, 4000 bp, Escherichia coli
  misc_feature (1)..(1): n is a, c, g, or t
  misc_feature (8)..(8): n is a, c, g, or t
  misc_feature (13)..(13): n is a, c, g, or t
  misc_feature (17)..(17): n is a, c, g, or t
  misc_feature (19)..(20): n is a, c, g, or t
  misc_feature (25)..(25): n is a, c, g, or t
  misc_feature (31)..(32): n is a, c, g, or t
  misc_feature (43)..(46): n is a, c, g, or t
  misc_feature (49)..(49): n is a, c, g, or t
  misc_feature (52)..(53): n is a, c, g, or t
  misc_feature (55)..(55): n is a, c, g, or t
  misc_feature (59)..(61): n is a, c, g, or t
  misc_feature (64)..(64): n is a, c, g, or t
  misc_feature (70)..(70): n is a, c, g, or t
  misc_feature (73)..(74): n is a, c, g, or t
  misc_feature (76)..(77): n is a, c, g, or t
  misc_feature (79)..(82): n is a, c, g, or t
  misc_feature (85)..(85): n is a, c, g, or t
  misc_feature (87)..(89): n is a, c, g, or t
  misc_feature (91)..(92): n is a, c, g, or t
  misc_feature (98)..(101): n is a, c, g, or t
  misc_feature (110)..(110): n is a, c, g, or t
  misc_feature (112)..(114): n is a, c, g, or t
  misc_feature (121)..(121): n is a, c, g, or t
  misc_feature (123)..(123): n is a, c, g, or t
  misc_feature (125)..(125): n is a, c, g, or t
  misc_feature (130)..(131): n is a, c, g, or t
  misc_feature (133)..(133): n is a, c, g, or t
  misc_feature (142)..(142): n is a, c, g, or t
  misc_feature (145)..(145): n is a, c, g, or t
  misc_feature (147)..(148): n is a, c, g, or t
  misc_feature (151)..(151): n is a, c, g, or t
  misc_feature (154)..(154): n is a, c, g, or t
  misc_feature (157)..(160): n is a, c, g, or t
  misc_feature (166)..(166): n is a, c, g, or t
  misc_feature (168)..(168): n is a, c, g, or t
  misc_feature (171)..(175): n is a, c, g, or t
  misc_feature (181)..(183): n is a, c, g, or t
  misc_feature (185)..(185): n is a, c, g, or t
  misc_feature (192)..(192): n is a, c, g, or t
  misc_feature (194)..(194): n is a, c, g, or t
  misc_feature (198)..(198): n is a, c, g, or t
  misc_feature (204)..(204): n is a, c, g, or t
  misc_feature (206)..(206): n is a, c, g, or t
  misc_feature (210)..(210): n is a, c, g, or t
  misc_feature (217)..(217): n is a, c, g, or t
  misc_feature (220)..(221): n is a, c, g, or t
  misc_feature (224)..(225): n is a, c, g, or t
  misc_feature (229)..(229): n is a, c, g, or t
  misc_feature (236)..(237): n is a, c, g, or t
  misc_feature (241)..(242): n is a, c, g, or t
  misc_feature (244)..(244): n is a, c, g, or t
  misc_feature (246)..(246): n is a, c, g, or t
  misc_feature (251)..(251): n is a, c, g, or t
  misc_feature (254)..(254): n is a, c, g, or t
  misc_feature (256)..(256): n is a, c, g, or t
  misc_feature (258)..(258): n is a, c, g, or t
  misc_feature (262)..(263): n is a, c, g, or t
  misc_feature (267)..(268): n is a, c, g, or t
  misc_feature (271)..(271): n is a, c, g, or t
  misc_feature (273)..(275): n is a, c, g, or t
  misc_feature (280)..(280): n is a, c, g, or t
  misc_feature (285)..(287): n is a, c, g, or t
  misc_feature (298)..(299): n is a, c, g, or t
  misc_feature (301)..(303): n is a, c, g, or t
  misc_feature (305)..(305): n is a, c, g, or t
  misc_feature (309)..(309): n is a, c, g, or t
  misc_feature (313)..(313): n is a, c, g, or t
  misc_feature (317)..(317): n is a, c, g, or t
  misc_feature (332)..(333): n is a, c, g, or t
  misc_feature (339)..(339): n is a, c, g, or t
  misc_feature (342)..(342): n is a, c, g, or t
  misc_feature (349)..(349): n is a, c, g, or t
  misc_feature (351)..(351): n is a, c, g, or t
  misc_feature (355)..(355): n is a, c, g, or t
  misc_feature (359)..(359): n is a, c, g, or t
  misc_feature (361)..(362): n is a, c, g, or t
  misc_feature (366)..(367): n is a, c, g, or t
  misc_feature (369)..(369): n is a, c, g, or t
  misc_feature (373)..(373): n is a, c, g, or t
  misc_feature (378)..(378): n is a, c, g, or t
  misc_feature (381)..(383): n is a, c, g, or t
  misc_feature (387)..(387): n is a, c, g, or t
  misc_feature (389)..(392): n is a, c, g, or t
  misc_feature (396)..(400): n is a, c, g, or t
  misc_feature (402)..(402): n is a, c, g, or t
  misc_feature (405)..(406): n is a, c, g, or t
  misc_feature (410)..(410): n is a, c, g, or t
  misc_feature (413)..(414): n is a, c, g, or t
  misc_feature (417)..(417): n is a, c, g, or t
  misc_feature (420)..(421): n is a, c, g, or t
  misc_feature (428)..(429): n is a, c, g, or t
  misc_feature (431)..(431): n is a, c, g, or t
  misc_feature (438)..(440): n is a, c, g, or t
  misc_feature (442)..(450): n is a, c, g, or t
  misc_feature (452)..(453): n is a, c, g, or t
  misc_feature (456)..(457): n is a, c, g, or t
  misc_feature (459)..(459): n is a, c, g, or t
  misc_feature (461)..(463): n is a, c, g, or t
  misc_feature (466)..(466): n is a, c, g, or t
  misc_feature (470)..(470): n is a, c, g, or t
  misc_feature (473)..(474): n is a, c, g, or t
  misc_feature (479)..(479): n is a, c, g, or t
  misc_feature (486)..(486): n is a, c, g, or t
  misc_feature (491)..(491): n is a, c, g, or t
  misc_feature (848)..(848): n is a, c, g, or t
  misc_feature (1331)..(1331): n is a, c, g, or t
  misc_feature (1985)..(1985): n is a, c, g, or t
  misc_feature (3244)..(3244): n is a, c, g, or t
  misc_feature (3663)..(3663): n is a, c, g, or t
  misc_feature (3667)..(3667): n is a, c, g, or t
  misc_feature (3673)..(3673): n is a, c, g, or t
  misc_feature (3688)..(3688): n is a, c, g, or t
  misc_feature (3697)..(3697): n is a, c, g, or t
  misc_feature (3700)..(3700): n is a, c, g, or t
ngctcgangcacngctngnngcacngctggnngcagagcgggnnnnacnccnngngctnnncgnagagcngcnncnngnnnngcnannngnngcacannnngtggcacanannntggcacncnanctcgnncncaatctcgngancnntcncgngannnntctcgncntcnnnnncgcccnnncnggcgcancngccngcgcancngcantcgcagntgnnatnncagntgctctnngcanngntnccggnacngntnccgnntcgnncgncnnntcgcnctgcnnntcgtccggccnncnnncntgancgcncgcntgactgtccgcctgnncgtcangcngtgcgtnangcgntgcntnncggnncnctgncgggngcnnngacngnnnnttgnnnnngncgnngtcntcnncgncgnnatcgtcnncnatatcgnnncnnnnnnnnntnngannancnnnggnaccnccnncggcncccccgncggcncccccgacggcgccactgcccatcagcctttcaatcagatcatcgagctgttcaagcgaactgtaatcgagccgcaaactgccgccctttccgtcgaacgcgatatcgacatgcaggccgagcgcattgccgagcgcacgttccagcgccagggtgtccgtatccttggccgctgcctgaggcttgcccttgcctttggaggcgccggccgaacgaccacggcgcgcgcggcgttccttgccaagacgctcggcatcacgaacgctcagaccttcatcgataatctgccgcgcgagcgccgcaggatccgcggcgcgcaggatcgcccgggcgtgaccagcgctgagttcgccctcngccagcattgcccttacatcttcaggcagatcgagcaggcgggtcatattggcaatatggctgcggctcttgccgacaacctcagcgacctgttcctgggtcttgccgaaatcatgggacagccgggcatatgcctccgcctcttcaagcggcgacagctcgtcgcgctggatgttttcaatcaatgcgaccgcgagcgcttcggcatcgttgaagtcgcgaatgatcaccggggcttcatgcacctgggcgcgctgggccgcacgccagcggcgttcgccagcgacgatttcaaaattcccgggatcgctccgcgtcgggcgaacgatcaaaggctgaagaataccctgctcgcggatcgagttggtcagatcgcggagcgcttcatcggcgaagtgccggcgcggctgcaacggattcggaataaggttcgcaatcgggaccatacggaacccgacagcggctccatgcgaggtgcctcgngaatcaaccgggctatccgctgccgccgccgcggcaccggctgaaacagccgcgcctgctggaattgttgtccgagttgccggcggggcttcggcctggggcaccgggtcggcagcgggtgccggtcgggcaccggcatcgaccgcttcttcggccgccgcgatattggtgcgatcctcgccgaacaaggcctcaaggccgcgtccaagctggcgcgggcggggtttttcttcactcatcgggattctcctgtcgtaccgccttcagggccagttgatgtgccgtctgatggatccgttgatacaccgcccgattcagcggcatcctgccggatctcggtgctggcagccttgtcgcgcagactgtccggcaccagactacccgttccggttgtgttcgtgtctttattcttctgtgcatcacggcggaggacttcgcccgccaggtgaacataagcctgtgatccggtgcaggcgagatcatataacagcaccggcttcccatgcgagggagcttctgaaacccttacattacggggaataacggtatcgtataccttgtcgccgaagtagctgcgcacatcgtccgacaccagggaagacagcttgttgcgggtatcgtacatggtcagcacgatcccttcgagttgcaatntagggttgaaccgacctgttacacgatcaatcgtccgcacaagctggctcagcccttcaagtgccaggaactcgcattgcagcggcaccagtaccgtatcggccgcgaccagaccgttcagggtcagcaggcccagcgccggcggacaatcgattagcacatagtcgaactgcgccacggcgctgcggatcgcatctctcagcaggtattcccgccggtccatgtcgacgagttccagctcggctgcggacaggtccatcgtcgatgccacgatgacgaggcccggcacggctgtatcgatcaacgcctggtcgagcgtgatctccccgagcagcaggtcgtaagtgccggaggtccggcgcgcgctctcaattccaagacccgtcgacgcgttgccctggggatcgagatcaaccaccagcacccggcgcccgacagcggcaagcgcggttgcaagattaatcgccgtcgtggtcttgccgaccccgcccttctggttggcaactgcaatgatccggcccggccgcaccggagacgcctcaaccgcatcgtcagctgccttttccaacggcggagggggcgcagtcaacgtatctgccggggtatcgggaaagtcttctgccatgagtctggaccagttgttgctattagggccgggatgcgtccccggaagctgttcttgtctatccggtcgcgcgccggtgcgtctccgcaggccgcacctgtcaagcgccgggcgttagcgtttcttcaggcccgtaatccgcaatatacggctttcggagctggtgacactttcaaatgtctggtgctttattctccagcgtttctccgcctcggtcaattcttcctgccagcgcccgcccttcatgaacaggcagcgctccgcaccaagcaaatcggccattgcacagagcttctcaagcggcgccagcgcccgggcagtcagaacatcaaccgagctttccaccgattcgtgacgctgcggccaccgttcccgcgcgacatcctcgacgcgggcggttgtgaccgtcacgggcgcattggtcgccgtcgccacctcgcgcagaaaagcgctcttgcgggtgtgggattcgatcagttccgtcggcagccccgtcacgatggcaagcaccaggcccgggaaacccgcgccgctgccgatatcggtgattgaccgcgcatcatccggcaggtgttcaactagctgaattgaatcacgcatatgccggtcccagaggtccgggatactgttgcgngaaacaaggttgagagtctgctgccattcctcgagatgcgccgcataaacccgcagccgttccattgtttcacgtgaaacaatcgcgatttcttcaaatttttcaggtgttaagggggaatcagcagtcataaatcatgcagctttctcgccgcggcggacatgacgaagcaacgccgtcagcgccgccggggtcacgccggggatccggcttgcagcgccgagtgtcgcggggcgggcggtgcccagtttttcccgcatttcgttggacagaccaccgatccggccataatccagcccgtccggcagagcgagcgcttcatccttgcggaacgcggtgatatccgcctgctggcggtccagatacccggcatacagggaatcattcgccacctgctgcaggatcgccggggcaaaagncgcngtttcnggccacacccgaagnaccgcctcnatncccgcatcgggcccgctgccggtatgcgcgagcattttcagcgccgtccgcggcaccccgtcctgcgagacctttatgccatgcgccgccaattcctgcggtttcgccgtcagggcagtcaatgttttgcgggcgacatcgagcgccgcgatcttttcggcaaatgcggtttcccgcaccgatccgacacaaccgagcgcaatgcccgccccggtcaggcgctgatccgcattatcggcccgcagggtcagcctgtactcggcgcgcgacgtgaacatgcgatagggctccgccgtgccg

SEQ ID NO: 849 - DNA, 4000 bp, Escherichia coli
  misc_feature (384)..(384): n is a, c, g, or t
  misc_feature (531)..(531): n is a, c, g, or t
  misc_feature (729)..(729): n is a, c, g, or t
  misc_feature (1040)..(1040): n is a, c, g, or t
  misc_feature (1180)..(1180): n is a, c, g, or t
  misc_feature (1985)..(1985): n is a, c, g, or t
  misc_feature (2557)..(2557): n is a, c, g, or t
  misc_feature (2568)..(2568): n is a, c, g, or t
  misc_feature (2582)..(2582): n is a, c, g, or t
  misc_feature (2639)..(2642): n is a, c, g, or t
  misc_feature (2681)..(2683): n is a, c, g, or t
  misc_feature (2696)..(2696): n is a, c, g, or t
  misc_feature (2706)..(2706): n is a, c, g, or t
  misc_feature (2708)..(2708): n is a, c, g, or t
  misc_feature (2715)..(2716): n is a, c, g, or t
  misc_feature (2727)..(2727): n is a, c, g, or t
  misc_feature (2730)..(2730): n is a, c, g, or t
  misc_feature (2733)..(2733): n is a, c, g, or t
  misc_feature (2735)..(2736): n is a, c, g, or t
  misc_feature (2742)..(2743): n is a, c, g, or t
  misc_feature (2745)..(2745): n is a, c, g, or t
  misc_feature (2748)..(2748): n is a, c, g, or t
  misc_feature (2754)..(2757): n is a, c, g, or t
  misc_feature (2762)..(2762): n is a, c, g, or t
  misc_feature (2775)..(2775): n is a, c, g, or t
  misc_feature (2778)..(2778): n is a, c, g, or t
  misc_feature (2781)..(2781): n is a, c, g, or t
  misc_feature (2787)..(2787): n is a, c, g, or t
  misc_feature (2790)..(2790): n is a, c, g, or t
  misc_feature (2793)..(2793): n is a, c, g, or t
  misc_feature (2798)..(2798): n is a, c, g, or t
  misc_feature (2802)..(2802): n is a, c, g, or t
  misc_feature (2805)..(2805): n is a, c, g, or t
  misc_feature (2814)..(2816): n is a, c, g, or t
  misc_feature (2819)..(2819): n is a, c, g, or t
  misc_feature (2826)..(2827): n is a, c, g, or t
  misc_feature (2830)..(2831): n is a, c, g, or t
  misc_feature (2835)..(2838): n is a, c, g, or t
  misc_feature (2841)..(2841): n is a, c, g, or t
  misc_feature (2844)..(2844): n is a, c, g, or t
  misc_feature (2847)..(2847): n is a, c, g, or t
  misc_feature (2850)..(2850): n is a, c, g, or t
  misc_feature (2852)..(2853): n is a, c, g, or t
  misc_feature (2855)..(2862): n is a, c, g, or t
  misc_feature (2870)..(2871): n is a, c, g, or t
  misc_feature (2874)..(2874): n is a, c, g, or t
  misc_feature (2876)..(2877): n is a, c, g, or t
  misc_feature (2880)..(2880): n is a, c, g, or t
  misc_feature (2894)..(2894): n is a, c, g, or t
  misc_feature (2898)..(2898): n is a, c, g, or t
  misc_feature (2901)..(2901): n is a, c, g, or t
  misc_feature (2904)..(2904): n is a, c, g, or t
  misc_feature (2908)..(2908): n is a, c, g, or t
  misc_feature (2910)..(2910): n is a, c, g, or t
  misc_feature (2912)..(2913): n is a, c, g, or t
  misc_feature (2916)..(2918): n is a, c, g, or t
  misc_feature (2922)..(2924): n is a, c, g, or t
  misc_feature (2931)..(2933): n is a, c, g, or t
  misc_feature (2935)..(2935): n is a, c, g, or t
  misc_feature (2937)..(2941): n is a, c, g, or t
  misc_feature (2943)..(2946): n is a, c, g, or t
  misc_feature (2951)..(2952): n is a, c, g, or t
  misc_feature (2954)..(2962): n is a, c, g, or t
  misc_feature (2964)..(2964): n is a, c, g, or t
  misc_feature (2972)..(2974): n is a, c, g, or t
  misc_feature (2976)..(2979): n is a, c, g, or t
  misc_feature (2981)..(2981): n is a, c, g, or t
  misc_feature (2983)..(2984): n is a, c, g, or t
  misc_feature (2986)..(2992): n is a, c, g, or t
  misc_feature (2994)..(2997): n is a, c, g, or t
  misc_feature (2999)..(3000): n is a, c, g, or t
  misc_feature (3002)..(3006): n is a, c, g, or t
  misc_feature (3009)..(3012): n is a, c, g, or t
  misc_feature (3014)..(3015): n is a, c, g, or t
  misc_feature (3018)..(3022): n is a, c, g, or t
  misc_feature (3026)..(3039): n is a, c, g, or t
  misc_feature (3041)..(3041): n is a, c, g, or t
  misc_feature (3043)..(3044): n is a, c, g, or t
  misc_feature (3046)..(3046): n is a, c, g, or t
  misc_feature (3048)..(3051): n is a, c, g, or t
  misc_feature (3053)..(3054): n is a, c, g, or t
  misc_feature (3056)..(3056): n is a, c, g, or t
  misc_feature (3058)..(3061): n is a, c, g, or t
  misc_feature (3064)..(3064): n is a, c, g, or t
  misc_feature (3067)..(3068): n is a, c, g, or t
  misc_feature (3070)..(3070): n is a, c, g, or t
  misc_feature (3073)..(3078): n is a, c, g, or t
  misc_feature (3080)..(3085): n is a, c, g, or t
  misc_feature (3088)..(3091): n is a, c, g, or t
  misc_feature (3094)..(3095): n is a, c, g, or t
  misc_feature (3097)..(3101): n is a, c, g, or t
  misc_feature (3103)..(3103): n is a, c, g, or t
  misc_feature (3106)..(3109): n is a, c, g, or t
  misc_feature (3112)..(3118): n is a, c, g, or t
  misc_feature (3121)..(3127): n is a, c, g, or t
  misc_feature (3129)..(3130): n is a, c, g, or t
  misc_feature (3134)..(3140): n is a, c, g, or t
  misc_feature (3142)..(3143): n is a, c, g, or t
  misc_feature (3145)..(3145): n is a, c, g, or t
  misc_feature (3148)..(3149): n is a, c, g, or t
  misc_feature (3151)..(3151): n is a, c, g, or t
  misc_feature (3153)..(3154): n is a, c, g, or t
  misc_feature (3156)..(3157): n is a, c, g, or t
  misc_feature (3160)..(3160): n is a, c, g, or t
  misc_feature (3163)..(3167): n is a, c, g, or t
  misc_feature (3169)..(3174): n is a, c, g, or t
  misc_feature (3177)..(3178): n is a, c, g, or t
  misc_feature (3180)..(3187): n is a, c, g, or t
  misc_feature (3192)..(3194): n is a, c, g, or t
  misc_feature (3196)..(3200): n is a, c, g, or t
  misc_feature (3203)..(3203): n is a, c, g, or t
  misc_feature (3205)..(3205): n is a, c, g, or t
  misc_feature (3207)..(3212): n is a, c, g, or t
  misc_feature (3214)..(3217): n is a, c, g, or t
  misc_feature (3220)..(3231): n is a, c, g, or t
  misc_feature (3235)..(3241): n is a, c, g, or t
  misc_feature (3245)..(3246): n is a, c, g, or t
  misc_feature (3248)..(3252): n is a, c, g, or t
  misc_feature (3254)..(3255): n is a, c, g, or t
  misc_feature (3258)..(3259): n is a, c, g, or t
  misc_feature (3261)..(3266): n is a, c, g, or t
  misc_feature (3268)..(3272): n is a, c, g, or t
  misc_feature (3274)..(3278): n is a, c, g, or t
  misc_feature (3280)..(3280): n is a, c, g, or t
  misc_feature (3282)..(3286): n is a, c, g, or t
  misc_feature (3289)..(3290): n is a, c, g, or t
  misc_feature (3292)..(3293): n is a, c, g, or t
  misc_feature (3296)..(3297): n is a, c, g, or t
  misc_feature (3300)..(3300): n is a, c, g, or t
  misc_feature (3302)..(3304): n is a, c, g, or t
  misc_feature (3306)..(3309): n is a, c, g, or t
  misc_feature (3311)..(3311): n is a, c, g, or t
  misc_feature (3314)..(3314): n is a, c, g, or t
  misc_feature (3317)..(3321): n is a, c, g, or t
  misc_feature (3323)..(3324): n is a, c, g, or t
  misc_feature (3327)..(3330): n is a, c, g, or t
  misc_feature (3332)..(3332): n is a, c, g, or t
  misc_feature (3334)..(3366): n is a, c, g, or t
  misc_feature (3368)..(3370): n is a, c, g, or t
  misc_feature (3377)..(3377): n is a, c, g, or t
  misc_feature (3379)..(3384): n is a, c, g, or t
  misc_feature (3387)..(3396): n is a, c, g, or t
  misc_feature (3398)..(3399): n is a, c, g, or t
  misc_feature (3401)..(3401): n is a, c, g, or t
  misc_feature (3403)..(3403): n is a, c, g, or t
  misc_feature (3405)..(3411): n is a, c, g, or t
  misc_feature (3413)..(3414): n is a, c, g, or t
  misc_feature (3416)..(3417): n is a, c, g, or t
  misc_feature (3421)..(3421): n is a, c, g, or t
  misc_feature (3423)..(3423): n is a, c, g, or t
  misc_feature (3425)..(3431): n is a, c, g, or t
  misc_feature (3433)..(3433): n is a, c, g, or t
  misc_feature (3436)..(3440): n is a, c, g, or t
  misc_feature (3442)..(3449): n is a, c, g, or t
  misc_feature (3451)..(3457): n is a, c, g, or t
  misc_feature (3459)..(3460): n is a, c, g, or t
  misc_feature (3462)..(3463): n is a, c, g, or t
  misc_feature (3466)..(3469): n is a, c, g, or t
  misc_feature (3471)..(3471): n is a, c, g, or t
  misc_feature (3473)..(3473): n is a, c, g, or t
  misc_feature (3475)..(3478): n is a, c, g, or t
  misc_feature (3481)..(3483): n is a, c, g, or t
  misc_feature (3485)..(3485): n is a, c, g, or t
  misc_feature (3487)..(3488): n is a, c, g, or t
  misc_feature (3490)..(3491): n is a, c, g, or t
  misc_feature (3493)..(3499): n is a, c, g, or t
  misc_feature (3501)..(3502): n is a, c, g, or t
  misc_feature (3504)..(3507): n is a, c, g, or t
  misc_feature (3512)..(3512): n is a, c, g, or t
  misc_feature (3514)..(3516): n is a, c, g, or t
  misc_feature (3518)..(3519): n is a, c, g, or t
  misc_feature (3522)..(3524): n is a, c, g, or t
  misc_feature (3527)..(3549): n is a, c, g, or t
  misc_feature (3551)..(3556): n is a, c, g, or t
  misc_feature (3558)..(3558): n is a, c, g, or t
  misc_feature (3561)..(3566): n is a, c, g, or t
  misc_feature (3569)..(3569): n is a, c, g, or t
  misc_feature (3573)..(3574): n is a, c, g, or t
  misc_feature (3576)..(3576): n is a, c, g, or t
  misc_feature (3578)..(3579): n is a, c, g, or t
  misc_feature (3581)..(3584): n is a, c, g, or t
  misc_feature (3586)..(3586): n is a, c, g, or t
  misc_feature (3589)..(3589): n is a, c, g, or t
  misc_feature (3591)..(3591): n is a, c, g, or t
  misc_feature (3594)..(3596): n is a, c, g, or t
  misc_feature (3599)..(3607): n is a, c, g, or t
  misc_feature (3610)..(3610): n is a, c, g, or t
  misc_feature (3612)..(3613): n is a, c, g, or t
  misc_feature (3615)..(3615): n is a, c, g, or t
  misc_feature (3617)..(3619): n is a, c, g, or t
  misc_feature (3621)..(3623): n is a, c, g, or t
  misc_feature (3625)..(3627): n is a, c, g, or t
  misc_feature (3629)..(3636): n is a, c, g, or t
  misc_feature (3638)..(3638): n is a, c, g, or t
  misc_feature (3640)..(3642): n is a, c, g, or t
  misc_feature (3644)..(3650): n is a, c, g, or t
  misc_feature (3656)..(3658): n is a, c, g, or t
  misc_feature (3660)..(3660): n is a, c, g, or t
  misc_feature (3662)..(3663): n is a, c, g, or t
  misc_feature (3665)..(3666): n is a, c, g, or t
  misc_feature (3669)..(3670): n is a, c, g, or t
  misc_feature (3672)..(3672): n is a, c, g, or t
  misc_feature (3674)..(3675): n is a, c, g, or t
  misc_feature (3677)..(3679): n is a, c, g, or t
  misc_feature (3681)..(3683): n is a, c, g, or t
  misc_feature (3685)..(3685): n is a, c, g, or t
  misc_feature (3688)..(3688): n is a, c, g, or t
  misc_feature (3692)..(3693): n is a, c, g, or t
  misc_feature (3695)..(3695): n is a, c, g, or t
  misc_feature (3697)..(3697): n is a, c, g, or t
  misc_feature (3699)..(3700): n is a, c, g, or t
  misc_feature (3703)..(3703): n is a, c, g, or t
  misc_feature (3707)..(3707): n is a, c, g, or t
  misc_feature (3709)..(3709): n is a, c, g, or t
  misc_feature (3711)..(3712): n is a, c, g, or t
  misc_feature (3714)..(3715): n is a, c, g, or t
  misc_feature (3718)..(3721): n is a, c, g, or t
  misc_feature (3723)..(3725): n is a, c, g, or t
  misc_feature (3727)..(3735): n is a, c, g, or t
  misc_feature (3739)..(3745): n is a, c, g, or t
  misc_feature (3747)..(3749): n is a, c, g, or t
  misc_feature (3751)..(3751): n is a, c, g, or t
  misc_feature (3759)..(3759): n is a, c, g, or t
  misc_feature (3761)..(3761): n is a, c, g, or t
  misc_feature (3767)..(3768): n is a, c, g, or t
  misc_feature (3777)..(3780): n is a, c, g, or t
  misc_feature (3783)..(3784): n is a, c, g, or t
  misc_feature (3786)..(3787): n is a, c, g, or t
  misc_feature (3791)..(3792): n is a, c, g, or t
  misc_feature (3803)..(3804): n is a, c, g, or t
  misc_feature (3807)..(3808): n is a, c, g, or t
  misc_feature (3817)..(3819): n is a, c, g, or t
  misc_feature (3822)..(3824): n is a, c, g, or t
  misc_feature (3827)..(3833): n is a, c, g, or t
  misc_feature (3835)..(3835): n is a, c, g, or t
  misc_feature (3837)..(3838): n is a, c, g, or t
  misc_feature (3840)..(3841): n is a, c, g, or t
  misc_feature (3843)..(3843): n is a, c, g, or t
  misc_feature (3848)..(3850): n is a, c, g, or t
  misc_feature (3854)..(3855): n is a, c, g, or t
  misc_feature (3860)..(3862): n is a, c, g, or t
  misc_feature (3864)..(3866): n is a, c, g, or t
  misc_feature (3868)..(3875): n is a, c, g, or t
  misc_feature (3877)..(3877): n is a, c, g, or t
  misc_feature (3879)..(3880): n is a, c, g, or t
  misc_feature (3882)..(3883): n is a, c, g, or t
  misc_feature (3887)..(3889): n is a, c, g, or t
  misc_feature (3894)..(3895): n is a, c, g, or t
  misc_feature (3897)..(3899): n is a, c, g, or t
  misc_feature (3901)..(3906): n is a, c, g, or t
  misc_feature (3908)..(3910): n is a, c, g, or t
  misc_feature (3912)..(3912): n is a, c, g, or t
  misc_feature (3914)..(3915): n is a, c, g, or t
  misc_feature (3917)..(3917): n is a, c, g, or t
  misc_feature (3920)..(3923): n is a, c, g, or t
  misc_feature (3926)..(3926): n is a, c, g, or t
  misc_feature (3928)..(3929): n is a, c, g, or t
  misc_feature (3931)..(3934): n is a, c, g, or t
  misc_feature (3939)..(3939): n is a, c, g, or t
  misc_feature (3942)..(3943): n is a, c, g, or t
  misc_feature (3945)..(3946): n is a, c, g, or t
  misc_feature (3948)..(3949): n is a, c, g, or t
  misc_feature (3951)..(3951): n is a, c, g, or t
  misc_feature (3955)..(3956): n is a, c, g, or t
  misc_feature (3958)..(3958): n is a, c, g, or t
  misc_feature (3962)..(3963): n is a, c, g, or t
  misc_feature (3968)..(3969): n is a, c, g, or t
  misc_feature (3971)..(3971): n is a, c, g, or t
  misc_feature (3973)..(3976): n is a, c, g, or t
  misc_feature (3978)..(3978): n is a, c, g, or t
  misc_feature (3981)..(3981): n is a, c, g, or t
  misc_feature (3984)..(3984): n is a, c, g, or t
  misc_feature (3987)..(3987): n is a, c, g, or t
  misc_feature (3991)..(3991): n is a, c, g, or t
  misc_feature (3993)..(3993): n is a, c, g, or t
  misc_feature (3996)..(3997): n is a, c, g, or t
aagggattaatgccttgtttcaccaccgggcttccctattaccgggtctcttcaacaaaatatgcacacccctcgtaatgctcctcccccacggccttgtccgttggatcatgcgaaccacgaaattagtgaagctagatcgataatccgacaaataacatgcgaaatatttgtcacatcaaacaaaaatcgtatctttgcaccgctttttagccccgtaccgtgtgatgggaaattaggaagcaaaataactaattttgagtaacacaaaaattaaagaaaatgaagacatttgagttagaaggaaaaggaagagagatcgtcgctcgttccgctgatcagaaaagagccttgaaagcaatgcgtaagaacaatgaaattccngctgtattatacggtggcgaaaaagtaactcacttcacggttacaaaagaagccgttcgtaagttggtttacactccggagattttcgttgttgagttaagcattgacggtaacaagacgatggcaatcgttaaggacatgcagttncaacctgtaactgacgaaatccttcacatggacttcttggaagtatctaaggacaaagccgtagtaatggaagttccggttgttttggaaggtcacgcagaaggtgttaaagccggtggtaagttgtctcttcaaatgagaaaactgaaagtgaaagctatatacgatcaaatccctgaaaagttgacgattaatgtngatcaccttggcttaggtaagactatgcaggtaggtgctttgcacttcgaaggtcttgaattgatgaacgctaaaaacgctgttgtttgcgccgttcaattgactcgtgccgctcgtggtgctcaggctaaaggataatctgaggtaaaaacattattacaatacatgaaggggaggatattcatagaatgttcttcccctttcttttatagattcgaggataatgaaatatttgataacaggacttggtaatatcggttccgaatattggggaacccgtcataatataggtttccgggttgtcaaccatntggtagagagcgtaggaggcaatttcactgaggagcgatacggggcaatcgcacgcatacgggtgaaaaactgtgacttgatcgtgctaaagccgaatacctttatgaacctcagcggcaacgccgttcggtactggttncaaaaagagaacattcccgtggaaaatctattgattgtcgtagatgatctggcattgccattcggaaccttacgtctgaaaccaaagggtagcgacgccgggcataacgggttgaagaatatcgcccagttattgaatacgcaggaatattcccgccttcgtttcggcataggcagcgattttccacggggcggacagatcgattacgtgctagggaaatttcccccggaggaattgcaattgatgccagagatattggatcgtgcgacagagatcatcaagagcttctgcctcgccggcatccagattacgatgaatcaatttaataataaataaaaagagactgagaatacagatatgaacgaggtacgtatcgataaatggatgtgggcgacccgtatctttaagacccgcacgatagccgcggaagcttgcaagaaagggcgtatcatgataggtggagtaacgatcaaaccttcccgcatgatcaaggttggcgatgtgatccaagtgcgtaaaccgccgatcaccttctcttttaaggtaatcggattgatcgagaatcgtgtgggcgcgaagctcgtcccgaattacttggagaacgtgacaaccccggatcagtatgagattctggagatgaaccgtatctccggtttcgtgaaccgtgcgaaaggtctcggacgtcctaccaagaaagaccgtcgtgaactggagcaattcactgagccggaattcatggatgacggattcgatttcgagttcgactttggagaagaggatgaggagtaagcatgctgatttccantcaattacatttaccaatattttcatcaagaagtaaaagtattttcacctagaggtaaaactgtttacatactgatgtaacgacatttacctctagaggaaaaaacatttaccattagaggtaaatgtcgttacaacggtatgtaaacggcaattattcctattgattctcctcggaaagcagattcccctcctcatcccagctacgccagacaccagatttcttccctgccgtatagaacatctcatacaacaaatttcccttatcgctccagatacgccaagggccgtccttttgcccttccttataagaagccaggccgatcagctggccgttatcgctatacgtgcgccattcaccatggaagatcccgtgatagtaggaacgcacctcggcgatcttgccatccggataatagatcacataggttccctcgggacggccatccttcaggtacagctccatcttgagcatgccatcctcatagaattccgtatagcggcccgtatacggggtggtttgtgtctcatcggtataatactgtccctcgctcaataccaagtcttgcgccngcacggtccangaggctcccgccanaaaagcggaaagtaacaatagctttttattcatgatacattcttatctaaattatannnnaaaagacaccgagggatctttccggatacctcagtgccnnnaacaaattcacancctattcaangncaagctnnattaatattcngtnttntnnggatcnnanttngtccannnngcagnccagtcattcttnccntcnaaagcnccnttntaagntacnttntcgaagaannngtngttcaannccnnatcnnnnaantcngcnccntnnannnnnnnngctacganngangnntantcaccatctttagngatnatntcnttgntngnngcnnnagtnnngttgctnnngncnnnnntnnnnaagtnntnnnnnnnnntntcatcctnnnannnntncnncnnnnnnncnnnnannannnnnttnnnnanngcnnnnncatnnnnnnnnnnnnnntncnnancnnnngnncnannnncgnaanncnagnnnnnnannnnnnagnnnnaannannnnngntgnnnntannnnnnnggnnnnnnncnncctnnnnnnnannanccnngncnncnntancannnnngnnnnnnttnncnnnnnnnncagcnnntnnnnnatngnannnnnngnnnnagnnnnnnnnnnnnaagnnnnnnntggnnannnnngnnttnntnnnnnnannnnngnnnnnancnnnnncgnngnnatnngantnnnannnntnagngtnnnnngnntcnnnnanannnnnnnnnnnnnnnnnnnnnnnnnnnnnnnnntnnnccgtatnannnnnntcnnnnnnnnnntnntnancnnnnnnntnntnngcgntnannnnnnngncannnnncnnnnnnnngnnnnnnncnnannaannnncntncnnnnatnnnancnnanngnnnnnnncnncnnnnccgcnannnannccnnngannnnnnnnnnnnnnnnnnnnnnntnnnnnncnaannnnnnacnggcnnantnnannnnancgnanttnnnttnnnnnnnnnttncnncntnnnannnannngnnnnnnnntntnnntnnnnnnnaccagnnncncnntnnatnntngnntnnntnnnangantcanncnancnntancacnantnntnngannnncnnngnnnnnnnnnaaannnnnnncnnncnctttatcngncgtaannacgatcggnnnntcnncnntacnntcggcgatgannttnncgcccggcnnnatnnncannnnnnngncnntnncncccgnnntaanngacannncnnngnnnnnnnnancnncnncaannntcaanntnnngnnnnnntnnncntnnangannnnttncnngnnnntcttntcnncnncnntnatcnntngatnngccgnnanannnncntcnaanatnaccncnttnnaag

SEQ ID NO: 850 - DNA, 4000 bp, Escherichia coli
  misc_feature (574)..(574): n is a, c, g, or t
  misc_feature (700)..(700): n is a, c, g, or t
  misc_feature (1017)..(1017): n is a, c, g, or t
  misc_feature (1502)..(1502): n is a, c, g, or t
  misc_feature (1976)..(1976): n is a, c, g, or t
  misc_feature (2021)..(2021): n is a, c, g, or t
  misc_feature (2141)..(2141): n is a, c, g, or t
  misc_feature (2417)..(2417): n is a, c, g, or t
  misc_feature (2678)..(2678): n is a, c, g, or t
  misc_feature (2883)..(2883): n is a, c, g, or t
  misc_feature (2912)..(2912): n is a, c, g, or t
  misc_feature (2918)..(2918): n is a, c, g, or t
  misc_feature (2967)..(2967): n is a, c, g, or t
  misc_feature (2975)..(2975): n is a, c, g, or t
  misc_feature (2990)..(2990): n is a, c, g, or t
  misc_feature (3215)..(3215): n is a, c, g, or t
  misc_feature (3242)..(3242): n is a, c, g, or t
  misc_feature (3247)..(3248): n is a, c, g, or t
  misc_feature (3257)..(3257): n is a, c, g, or t
  misc_feature (3266)..(3266): n is a, c, g, or t
  misc_feature (3272)..(3272): n is a, c, g, or t
  misc_feature (3275)..(3275): n is a, c, g, or t
  misc_feature (3279)..(3281): n is a, c, g, or t
  misc_feature (3284)..(3284): n is a, c, g, or t
  misc_feature (3313)..(3314): n is a, c, g, or t
  misc_feature (3327)..(3327): n is a, c, g, or t
  misc_feature (3335)..(3335): n is a, c, g, or t
  misc_feature (3338)..(3338): n is a, c, g, or t
  misc_feature (3347)..(3347): n is a, c, g, or t
  misc_feature (3350)..(3350): n is a, c, g, or t
  misc_feature (3359)..(3359): n is a, c, g, or t
  misc_feature (3365)..(3365): n is a, c, g, or t
  misc_feature (3368)..(3368): n is a, c, g, or t
  misc_feature (3371)..(3371): n is a, c, g, or t
  misc_feature (3374)..(3374): n is a, c, g, or t
  misc_feature (3389)..(3389): n is a, c, g, or t
  misc_feature (3392)..(3392): n is a, c, g, or t
  misc_feature (3395)..(3395): n is a, c, g, or t
  misc_feature (3401)..(3401): n is a, c, g, or t
  misc_feature (3404)..(3404): n is a, c, g, or t
  misc_feature (3419)..(3419): n is a, c, g, or t
  misc_feature (3427)..(3428): n is a, c, g, or t
  misc_feature (3434)..(3434): n is a, c, g, or t
  misc_feature (3437)..(3437): n is a, c, g, or t
  misc_feature (3443)..(3443): n is a, c, g, or t
  misc_feature (3449)..(3449): n is a, c, g, or t
  misc_feature (3452)..(3452): n is a, c, g, or t
  misc_feature (3464)..(3464): n is a, c, g, or t
  misc_feature (3476)..(3476): n is a, c, g, or t
  misc_feature (3482)..(3482): n is a, c, g, or t
  misc_feature (3506)..(3506): n is a, c, g, or t
  misc_feature (3512)..(3512): n is a, c, g, or t
  misc_feature (3516)..(3516): n is a, c, g, or t
  misc_feature (3518)..(3518): n is a, c, g, or t
  misc_feature (3524)..(3524): n is a, c, g, or t
  misc_feature (3530)..(3530): n is a, c, g, or t
  misc_feature (3554)..(3554): n is a, c, g, or t
  misc_feature (3560)..(3560): n is a, c, g, or t
  misc_feature (3566)..(3566): n is a, c, g, or t
  misc_feature (3575)..(3575): n is a, c, g, or t
  misc_feature (3577)..(3578): n is a, c, g, or t
  misc_feature (3584)..(3584): n is a, c, g, or t
  misc_feature (3596)..(3596): n is a, c, g, or t
  misc_feature (3602)..(3602): n is a, c, g, or t
  misc_feature (3605)..(3605): n is a, c, g, or t
  misc_feature (3621)..(3623): n is a, c, g, or t
  misc_feature (3627)..(3628): n is a, c, g, or t
  misc_feature (3631)..(3632): n is a, c, g, or t
  misc_feature (3635)..(3636): n is a, c, g, or t
  misc_feature (3638)..(3641): n is a, c, g, or t
  misc_feature (3643)..(3647): n is a, c, g, or t
  misc_feature (3649)..(3654): n is a, c, g, or t
  misc_feature (3656)..(3659): n is a, c, g, or t
  misc_feature (3663)..(3663): n is a, c, g, or t
  misc_feature (3665)..(3669): n is a, c, g, or t
  misc_feature (3671)..(3675): n is a, c, g, or t
  misc_feature (3677)..(3689): n is a, c, g, or t
  misc_feature (3691)..(3693): n is a, c, g, or t
  misc_feature (3695)..(3696): n is a, c, g, or t
  misc_feature (3698)..(3700): n is a, c, g, or t
  misc_feature (3702)..(3709): n is a, c, g, or t
  misc_feature (3712)..(3712): n is a, c, g, or t
  misc_feature (3714)..(3717): n is a, c, g, or t
  misc_feature (3719)..(3727): n is a, c, g, or t
  misc_feature (3729)..(3732): n is a, c, g, or t
  misc_feature (3734)..(3740): n is a, c, g, or t
  misc_feature (3742)..(3746): n is a, c, g, or t
  misc_feature (3748)..(3750): n is a, c, g, or t
  misc_feature (3752)..(3752): n is a, c, g, or t
  misc_feature (3754)..(3758): n is a, c, g, or t
  misc_feature (3760)..(3772): n is a, c, g, or t
  misc_feature (3774)..(3774): n is a, c, g, or t
  misc_feature (3776)..(3777): n is a, c, g, or t
  misc_feature (3780)..(3782): n is a, c, g, or t
  misc_feature (3784)..(3789): n is a, c, g, or t
  misc_feature (3792)..(3795): n is a, c, g, or t
  misc_feature (3797)..(3797): n is a, c, g, or t
  misc_feature (3800)..(3807): n is a, c, g, or t
  misc_feature (3809)..(3816): n is a, c, g, or t
  misc_feature (3818)..(3821): n is a, c, g, or t
  misc_feature (3823)..(3827): n is a, c, g, or t
  misc_feature (3831)..(3832): n is a, c, g, or t
  misc_feature (3835)..(3843): n is a, c, g, or t
  misc_feature (3845)..(3846): n is a, c, g, or t
  misc_feature (3848)..(3850): n is a, c, g, or t
  misc_feature (3852)..(3855): n is a, c, g, or t
  misc_feature (3857)..(3859): n is a, c, g, or t
  misc_feature (3861)..(3862): n is a, c, g, or t
  misc_feature (3865)..(3870): n is a, c, g, or t
  misc_feature (3872)..(3899): n is a, c, g, or t
  misc_feature (3901)..(3901): n is a, c, g, or t
  misc_feature (3903)..(3904): n is a, c, g, or t
  misc_feature (3907)..(3907): n is a, c, g, or t
  misc_feature (3909)..(3922): n is a, c, g, or t
  misc_feature (3924)..(3924): n is a, c, g, or t
  misc_feature (3926)..(3932): n is a, c, g, or t
  misc_feature (3934)..(3941): n is a, c, g, or t
  misc_feature (3943)..(3950): n is a, c, g, or t
  misc_feature (3952)..(3957): n is a, c, g, or t
  misc_feature (3959)..(3959): n is a, c, g, or t
  misc_feature (3961)..(3966): n is a, c, g, or t
  misc_feature (3968)..(3973): n is a, c, g, or t
  misc_feature (3976)..(3976): n is a, c, g, or t
  misc_feature (3979)..(3982): n is a, c, g, or t
  misc_feature (3984)..(3984): n is a, c, g, or t
  misc_feature (3986)..(3987): n is a, c, g, or t
  misc_feature (3990)..(3992): n is a, c, g, or t
  misc_feature (3994)..(3996): n is a, c, g, or t
  misc_feature (3998)..(4000): n is a, c, g, or t
gcagcgcgccgccgataagttcctgcatatgcaggtgccgtgcctcgggtatgtctttgaagacacggcagtcacgaaagcggtgcgacagcagacaccgctgatcaaggcggcaccgaatgcggccgccgcacgctgcattgacgccctcgcagaggcgttgatcacgggggatgagatgtgcatcaaacggggttggaaaggttttttacagcaaattttcaacttttcagcgtagccaaggaggaaaattcagatggcgggcgaattggtacaggcaaggagtattttagctatcgggcagaggctggaaatattctttgagaacagcgaggaggggacccaaggctacacgagccgcatagaagatatcaccggggatgaactcgttgtcgccatgcccgtggatgaacgccgcgttcctgtcatcccgcgcgtcggtgagaacctgtatgtgctcgcggccggggacgggtgccactaccgatttttcagcgttcatcacagtcacggccactatgaaggaaagcttcccgttctgcacatctctattcccgaagtcgcggagcgcttncagaaacgaggccttttccgcattcgggtgaacctgattgccaccatccgtcttgtcgacggacaggggcagatcgccgcgccgcagcgtgtgccgatcgtggatctcagcggaagcgggatggcnttctcctttgcaaagccggtgtcgctggactcatatgtagcgcttgaaatcaacgatgtgccgggcattgggacgatcgaactcatgtcacgggtaaagcgctcaacgcgtattgaacgtgaggacgacctgccgatctatcacatcggcgtgcaatttcaggggctctcacgcagcctgcgggatcagatcgtccgctacctcttccaggtacagcgcagtcaggtggagcgcgtaaaagatgactgacagcagaaagaagaccatggcaatgggcggccgaggcgatccgcacgcacgcatgcggatcgttgtgntcggttcctcgacgggaggcccccaggcgctgcaaaccgtgatcacgagtctgccggaggattttccctgtcccgtcgtcgtcgtgcagcatatgccgcccggctttaccaatgccctggcgggacgcctgcactgcgtttcgaaagtccgagtacaggaggcgcgggatggggatatactcaagccggggtgcgtgtacatcgcgcccggagatcgccacctgcgtgtcttaagtgagtccggtgcacggcgcattgtgctcagtgatgaaccgccggtcggcaatcatcggcccgcagttaatgtaatgtatgactctgttgcgcatctggggaaggatgtcgttgccgtgattctcacaggaatggggaatgacggacgcgaagggatgcgcaagatcaaagcaaacggcggctactgcattgcgcaggatgaagcaacctgcgttgtctacgggatgccaaaatccgtgattgacgcaggnctggccgatgagatatgcccattaccgcagatcgcgcatgcgattgaggcggctgtgagaagataggaagtagggggaatatcaatggataaccagtatatggacatgttcctggacgagtcacatgagcatcttcagtctctgaatgaaggcctgctccgcctcgaggagaacatggaggaggtcagcgccgtcaacgacatcttccgcaacgcgcacacgctcaagggcatgtccgcgacgatgggatttaccaagattgcggagctgacgcatgagatggaggatgttctggacctcgtccgcaaagaacaactcaaactcaatgaagacattatggatacgctgttcaaatgcctcgactctttggagcagatggtagacagcgtcggaaacggcgaggcggaggatgtcgtcgacgtttctgatctcgttgcaaagctcagctcgatctccaaggggacccctgcgccngccgcagcagcaccggcggcccccgcatctgccgggagcagcagnggagcggaggtcgatctcggctttgacgagatcgatctcgatgtcatgaaaaaggcaaaagaagccggcatgcatctctaccatgtcaaggttacactgatggaaacctgcgttctcaangcagcacgctcggttatggtcatgcatgccctcgatgaggtcggcgatgtcatcaagagcatcccgtctgcggaggatctcgagcaggagaagttcgagctcagctttgatgttgttgtggcgagctccgacgatgccgagtctgtgcagaacgctgtcgataccgtctccgaaattgaagatattgcggtcgaggaactcgaccccgataaaatcggcaaaggcggagatgctgcacctgcggctgcacccgccgcttctgcagctgccgccccngcaaagaaagagggggcaaaaaagcctgcggcggcgcccgccaagaagcagcatcaaagccagagtgttcgtgtcgatatcgaaaaactcgatacactgatgaacctcatgggcgagctcgtcatcaacaaggtgcgtctcgagcagatcggccagacacaccgcatgagcgatcttatggagaccctcgagcagatggaccgcgtgacgggcgatctgcagaacattgttatgaaggtccgcatggttccggtcagcgcngtattcaatcgcttcccccgcatggtgcgcgatgtttccaaggaactgggcaaggagatcaacctgacgatcgagggcgaagaaaccgaacttgaccgtactgtgatcgacgagatcggcgatccgatcatgcatctcctgcgcaactccctcgaccacggtgttgagagccctgatgcgcgtgaggcaaagggcaagccgcgtnccggtgaggtgggactcatcgcgcggcangagggnaacaacgttgtcatcatgattacggatgacggtgcgggtattgatgcgngcaagatncgccgcaaggcagtngaaaagggaatgatctctcaggaggaagcggaccgcctcgatgatgcagatgccgtccgcctcatcttcctgcccggcttctcgacggcagagaagatcacggatatctccggccgcggcgtcggcatggatgttgtgcgcagcaagatcgaggccctttcaggccatgtcgatgttgagacgcacatcgacgagggatccgtctttaagatcaagcttccgctnacactcgcgatcattcaggcgatgctngtgcnngtgcaggangagatgtangccatnccnctcnnntcnatcgacagcacgatcaacatcgagccganngatattcagaccntccagaanaangaggtcatngtnctgcgcggngagatnatnccnatnatccgcatggaggangcnctncaggtnccncatacgaaggactcngacgagcnnttcgtngtngtcgtncacgcnggngaggcgaaggcnggcatcgtcgtngacaanctgatcggccagcaggaaatcgtnatcaanacantnggcaanctcttngccggactcaagctcttcggcggngcaacngtgctnggcgacggnanngtcgcnctgattcttgangttgcnacnatgatacagcagtaannngggnnggnnaannannnngnnnnngnnnnnnannnngggnannnnncnnnnnannnnnnnnnnnnngnnntnnannntnnnnnnnnagnannnngnnnnnnnnntnnnnannnnnnngnnnnncnnnantnnnnngnnnnnnnnnnnnntncnnttnnngnnnnnnttnnnnanggnnnnnnnnannnnnnnngnnnngnnnnncccnntannnnnnnnnannannngnnnngnnntnncgnnnnnncnnnnnnnnnnnnnnnnnnnnnnnnnnnngntnncgntnnnnnnnnnnnnnntngnnnnnnngnnnnnnnngnnnnnnnngnnnnnnancnnnnnnannnnnncgntgnnnncnannaannnannnannn

SEQ ID NO: 851 - DNA, 4000 bp, Escherichia coli
  misc_feature (114)..(114): n is a, c, g, or t
  misc_feature (147)..(147): n is a, c, g, or t
  misc_feature (1776)..(1776): n is a, c, g, or t
  misc_feature (1842)..(1842): n is a, c, g, or t
  misc_feature (1991)..(1991): n is a, c, g, or t
  misc_feature (2034)..(2034): n is a, c, g, or t
  misc_feature (2039)..(2040): n is a, c, g, or t
  misc_feature (2608)..(2608): n is a, c, g, or t
ggtagtagtatcctcttgaggcactagatgggatagtaacgttctggtttagtagagcgtggtttgagttgagcggaacagtggcaagcagggtgtcggtggaggagatcgttnccaagttgtttgtactcaggtaaatttcaaccnaaccgcctgtaaatgcgttgaggctcgtgttcacgagtacagcgtttcctggtccaactaccgtggggagaacctgagcggtagcaccagaactcgcggtagctgaggcgtaactagttgcgaaaggaatcaccagcgaggcgaggattgctaccagtaacacttttgacagaaaacactttttttcgtccattttgtacacccttttagggtaaccaacaaaccacgagtaaatatataaggaaagctattgacttgtaaaaacctagaaaaaaactggttttttcttcaaaaagaaaaaaggggtggtcactcgtagatttcgtatatccaagatgacagagttgtttgctgcaatccgactgcgttatagtaatatcttggacctgtgttgagtacgtacgtgtagtactgttgcgttgaataggcccagtacaccgagccagagacgtttgacacgctcaagaagtacacagagtttgcgttcagcgtaatcggcgatggaagaacgaccgtgtaccagcctgtgccgttcacctggatgtttgcggagaacaggtttgacgagaacacgctggttccaagcgagacttgtaccattccgttaccagcgaggtacagcttgattatgccaacctgcgccgtgctcgaattcgtgaagaacgcttggcttgctggagcttgtgaggttatgagcatgtagaacagctggcttgcaagcgtcgccgctactacagcgggtatgctcacggtgaagctggttgaggctgagtagttgagtaggtccaccgcggtaacggtgtatgtccctgcgggaacgttgggtaccgtgaacacaccggtgaagtcgccgttaccatttgtggtgaagttggctacttgttggtttccgaagaacaccgccacgggcacaaacgagctaaaggtcacacccgttatcgaaatgtttgtgccgggtgatccagaatacgatgagagagctatagcgggtaggagtttgagtagggctcttgcgctgttacccatcgcatcctttgcgactacgtcaacggttatcgcagggcttggtggaactgtgaagcttagcgaaaagcctcctgtggagtttgtggtcagagtgaaactcagtggtggggtaaagtcagcggtgacgttcaactgtgtgtttggtgcaaaccccaatccttggagtgtaacgctaacaccctcgtgaaccacctggggtgaaagttgtagcactgggcctacgacaaagttaacggacgctagcaaggttgagccaaagtatgcagagatttcgtacacacccgaagcggttccctgttgaaccgtaaatcttgcgctgaaccctcctgtcgaattgactgtggtggttatgggtgaaaacagcctcggtgtggaagttatggttaccgttgagccagctggttcgttcgtgctaccttcaaccactacttgggcgggtagtgcattcgtgttcactgaaggaggtatcacttcaagcgcgttgactcttacacttaaaagcgcgctcgcaagtcctgttgccacaggtgttccccaacctgacacggggtcgtaccctttggtcgcgctaaagcccagaacgtttgctatcccgtttgtgantgggcttgcgccgttgttaccgtcaacaatatcgttcaacgctttaaacgctccattttctccgantcctgggttttggtatagattcatgccttcgctatacagaaacggattaaggaaaccagctggcagtttgccgtgagcttgtaaatcgctgtctaaaaccgcggttgtcgcagcccaaagcggcgaagaaaggcttgtccctcctagtntatagtagatgtcaaatccgaagatgctgtaggcgttaacaancactnntgtgaatgggtcggcgtccgccgcaacgtcgggcacaattctaccgcttgtgccctgaattccgcacacgcttgcttggtaagtcggacaagagaatatttcgcttgagccgccacccgtgccccagccaaagaaaacgttggtgctccaagcggtttcgttgattctgccaccgccagtcgaaaatggtggagaagacgtgattgagcttaccgcctgagcgtaaagcgttgttccaccaactgaggtgacataggggtcgcttgcaggatatatcacgttcggaaagcccaagtggttgtccgcagaagagtcgccagaggacgcgaacacagaaatgccttctgccgctgcctgctgataaatctggtcgagggcgaagaccacttgttttgtcaggaaaggctcgggcgctccccagctctgagttatcacattaaccgcgccgctatccaccgcgtagttcacagcttcaaaaagagagtctccagcgtcgaaagcaagatataagttgatttttgcaccgggagccgctgcgtgagcccactgcgtatcaagcagagtttcnaatatccaacctgtaaccaagccggaggcaactggtacacctgtgggataaatcacgtttatctgagtgttcggcaaggaaaagtcggcgtcgaattgattaaggtcttgctgaacacctggtgctgtgtacgcgtctacaattcctatcgtgataccagtaccgttgtacccagaagagtaaagctgtgtgagtgagtatgcctgttgaatttgctgagggatataaggaccgtcttgaaacccacatccaaaagttgtggtgcatgacgtactgatttgcatgggctttatcgttttgttcaggttgatcacttggggtgtaaacagggtgtagttggtaagtccgaaaaccgcggccacctgcaaatttgagggtaactcaacgggttgggaattcgcgtagaacacttgtcctttgtagctataaagctgtattgttgttttaagcgcttggcttacctgtgaaaccgtgccctgagctcccacgatcagcctgtttgcgctagtgtatgtcacttgtaagccctgcgattcaaggtagttcacaactgcttgatactgcgattcactcggagaaaacatcgaatggaattgatcgggcgtaagatagtggtggtaaagcggggactgtgggttgtaaatctgagtgattagttgcgcaagctggtcgcggttttgaagcggtagtataatcgcaaaactcactagtgtgttagaaggtgcatttccgaccgtttttgctgagctcactattggtagtacgctaccaggaatacttacatactgcggttgttgagaagcattggctggtgtttgactcaacacactcatagctgtcagtgaaccggttatcgatgcaatcgccaaaagagtgaccactagataactcagacttccctttctaacgctcatactacatcaacgccaattatgtaaacttctatattaacttttcttattatcaaaaaagatattatacgattttaaaaaattgtacagtaatcacaaaaagaatataacaatatatatttcagtaaccttaaaaattttgaacatccccgacttcattctttgtatgaaacatcgagtgtgacgtgatgacaaacttattcatcgatattcggtacgcatacaactttgtgtaaaaacaaagttaatatggatacgttgattattatgaccaatgaccaccactatcgaaatagacggctacttagagcgaaagcttgacctacttgtgggacttgggctttacgccacaaagtctgaagcagtaagagacgcagttcgaaggctgctagagcaaaccgacatcacaaagattgcgcttgacatgtacttaaaaggctcagtgagtctaggtttttgttgtgaaatcgccgacctttca

SEQ ID NO: 852 - DNA, 4000 bp, Escherichia coli
  misc_feature (2)..(2): n is a, c, g, or t
  misc_feature (4)..(4): n is a, c, g, or t
  misc_feature (8)..(9): n is a, c, g, or t
  misc_feature (12)..(13): n is a, c, g, or t
  misc_feature (16)..(19): n is a, c, g, or t
  misc_feature (23)..(24): n is a, c, g, or t
  misc_feature (26)..(26): n is a, c, g, or t
  misc_feature (35)..(35): n is a, c, g, or t
  misc_feature (46)..(47): n is a, c, g, or t
  misc_feature (376)..(376): n is a, c, g, or t
  misc_feature (499)..(499): n is a, c, g, or t
  misc_feature (583)..(583): n is a, c, g, or t
  misc_feature (592)..(592): n is a, c, g, or t
  misc_feature (596)..(596): n is a, c, g, or t
  misc_feature (598)..(598): n is a, c, g, or t
  misc_feature (610)..(610): n is a, c, g, or t
  misc_feature (724)..(724): n is a, c, g, or t
  misc_feature (733)..(733): n is a, c, g, or t
  misc_feature (982)..(982): n is a, c, g, or t
  misc_feature (988)..(988): n is a, c, g, or t
  misc_feature (1291)..(1291): n is a, c, g, or t
  misc_feature (1692)..(1692): n is a, c, g, or t
  misc_feature (1851)..(1851): n is a, c, g, or t
  misc_feature (1989)..(1989): n is a, c, g, or t
  misc_feature (1991)..(1991): n is a, c, g, or t
  misc_feature (2343)..(2343): n is a, c, g, or t
  misc_feature (2487)..(2487): n is a, c, g, or t
  misc_feature (2850)..(2850): n is a, c, g, or t
  misc_feature (2910)..(2910): n is a, c, g, or t
  misc_feature (3013)..(3013): n is a, c, g, or t
  misc_feature (3210)..(3210): n is a, c, g, or t
  misc_feature (3212)..(3216): n is a, c, g, or t
  misc_feature (3218)..(3218): n is a, c, g, or t
  misc_feature (3220)..(3220): n is a, c, g, or t
  misc_feature (3222)..(3223): n is a, c, g, or t
  misc_feature (3228)..(3231): n is a, c, g, or t
  misc_feature (3235)..(3236): n is a, c, g, or t
  misc_feature (3238)..(3238): n is a, c, g, or t
  misc_feature (3243)..(3245): n is a, c, g, or t
  misc_feature (3247)..(3248): n is a, c, g, or t
  misc_feature (3250)..(3252): n is a, c, g, or t
  misc_feature (3254)..(3254): n is a, c, g, or t
  misc_feature (3257)..(3260): n is a, c, g, or t
  misc_feature (3262)..(3262): n is a, c, g, or t
  misc_feature (3265)..(3274): n is a, c, g, or t
  misc_feature (3276)..(3282): n is a, c, g, or t
  misc_feature (3284)..(3285): n is a, c, g, or t
  misc_feature (3287)..(3288): n is a, c, g, or t
  misc_feature (3290)..(3299): n is a, c, g, or t
  misc_feature (3301)..(3302): n is a, c, g, or t
  misc_feature (3304)..(3307): n is a, c, g, or t
  misc_feature (3309)..(3309): n is a, c, g, or t
  misc_feature (3311)..(3316): n is a, c, g, or t
  misc_feature (3318)..(3319): n is a, c, g, or t
  misc_feature (3321)..(3326): n is a, c, g, or t
  misc_feature (3328)..(3328): n is a, c, g, or t
  misc_feature (3331)..(3338): n is a, c, g, or t
  misc_feature (3341)..(3351): n is a, c, g, or t
  misc_feature (3353)..(3355): n is a, c, g, or t
  misc_feature (3357)..(3359): n is a, c, g, or t
  misc_feature (3361)..(3362): n is a, c, g, or t
  misc_feature (3364)..(3370): n is a, c, g, or t
  misc_feature (3372)..(3372): n is a, c, g, or t
  misc_feature (3374)..(3375): n is a, c, g, or t
  misc_feature (3377)..(3383): n is a, c, g, or t
  misc_feature (3385)..(3395): n is a, c, g, or t
  misc_feature (3397)..(3398): n is a, c, g, or t
  misc_feature (3400)..(3401): n is a, c, g, or t
  misc_feature (3403)..(3405): n is a, c, g, or t
  misc_feature (3407)..(3407): n is a, c, g, or t
  misc_feature (3411)..(3411): n is a, c, g, or t
  misc_feature (3413)..(3413): n is a, c, g, or t
  misc_feature (3415)..(3417): n is a, c, g, or t
  misc_feature (3419)..(3429): n is a, c, g, or t
  misc_feature (3431)..(3435): n is a, c, g, or t
  misc_feature (3438)..(3441): n is a, c, g, or t
  misc_feature (3443)..(3449): n is a, c, g, or t
  misc_feature (3451)..(3453): n is a, c, g, or t
  misc_feature (3468)..(3468): n is a, c, g, or t
  misc_feature (3473)..(3473): n is a, c, g, or t
  misc_feature (3487)..(3488): n is a, c, g, or t
  misc_feature (3490)..(3494): n is a, c, g, or t
  misc_feature (3496)..(3497): n is a, c, g, or t
  misc_feature (3500)..(3500): n is a, c, g, or t
  misc_feature (3502)..(3505): n is a, c, g, or t
  misc_feature (3507)..(3509): n is a, c, g, or t
  misc_feature (3511)..(3511): n is a, c, g, or t
  misc_feature (3513)..(3518): n is a, c, g, or t
  misc_feature (3520)..(3520): n is a, c, g, or t
  misc_feature (3523)..(3525): n is a, c, g, or t
  misc_feature (3527)..(3528): n is a, c, g, or t
  misc_feature (3530)..(3533): n is a, c, g, or t
  misc_feature (3535)..(3541): n is a, c, g, or t
  misc_feature (3543)..(3543): n is a, c, g, or t
  misc_feature (3545)..(3545): n is a, c, g, or t
  misc_feature (3547)..(3548): n is a, c, g, or t
  misc_feature (3550)..(3550): n is a, c, g, or t
  misc_feature (3552)..(3559): n is a, c, g, or t
  misc_feature (3562)..(3563): n is a, c, g, or t
  misc_feature (3565)..(3569): n is a, c, g, or t
  misc_feature (3571)..(3577): n is a, c, g, or t
  misc_feature (3579)..(3580): n is a, c, g, or t
  misc_feature (3582)..(3582): n is a, c, g, or t
  misc_feature (3584)..(3587): n is a, c, g, or t
  misc_feature (3589)..(3589): n is a, c, g, or t
  misc_feature (3594)..(3601): n is a, c, g, or t
  misc_feature (3603)..(3605): n is a, c, g, or t
  misc_feature (3608)..(3610): n is a, c, g, or t
  misc_feature (3613)..(3613): n is a, c, g, or t
  misc_feature (3615)..(3617): n is a, c, g, or t
  misc_feature (3620)..(3624): n is a, c, g, or t
  misc_feature (3626)..(3626): n is a, c, g, or t
  misc_feature (3628)..(3628): n is a, c, g, or t
  misc_feature (3630)..(3632): n is a, c, g, or t
  misc_feature (3634)..(3636): n is a, c, g, or t
  misc_feature (3639)..(3652): n is a, c, g, or t
  misc_feature (3654)..(3664): n is a, c, g, or t
  misc_feature (3666)..(3669): n is a, c, g, or t
  misc_feature (3672)..(3683): n is a, c, g, or t
  misc_feature (3687)..(3697): n is a, c, g, or t
  misc_feature (3699)..(3700): n is a, c, g, or t
  misc_feature (3702)..(3705): n is a, c, g, or t
  misc_feature (3707)..(3710): n is a, c, g, or t
  misc_feature (3712)..(3713): n is a, c, g, or t
  misc_feature (3715)..(3715): n is a, c, g, or t
  misc_feature (3717)..(3719): n is a, c, g, or t
  misc_feature (3722)..(3722): n is a, c, g, or t
  misc_feature (3725)..(3725): n is a, c, g, or t
  misc_feature (3727)..(3727): n is a, c, g, or t
  misc_feature (3729)..(3733): n is a, c, g, or t
  misc_feature (3736)..(3740): n is a, c, g, or t
  misc_feature (3742)..(3750): n is a, c, g, or t
  misc_feature (3752)..(3756): n is a, c, g, or t
  misc_feature (3760)..(3763): n is a, c, g, or t
  misc_feature (3765)..(3765): n is a, c, g, or t
  misc_feature (3767)..(3767): n is a, c, g, or t
  misc_feature (3769)..(3773): n is a, c, g, or t
  misc_feature (3775)..(3775): n is a, c, g, or t
  misc_feature (3777)..(3780): n is a, c, g, or t
  misc_feature (3782)..(3782): n is a, c, g, or t
  misc_feature (3784)..(3789): n is a, c, g, or t
  misc_feature (3792)..(3793): n is a, c, g, or t
  misc_feature (3795)..(3796): n is a, c, g, or t
  misc_feature (3800)..(3805): n is a, c, g, or t
  misc_feature (3807)..(3809): n is a, c, g, or t
  misc_feature (3812)..(3813): n is a, c, g, or t
  misc_feature (3816)..(3818): n is a, c, g, or t
  misc_feature (3820)..(3821): n is a, c, g, or t
  misc_feature (3823)..(3823): n is a, c, g, or t
  misc_feature (3825)..(3826): n is a, c, g, or t
  misc_feature (3829)..(3829): n is a, c, g, or t
  misc_feature (3832)..(3832): n is a, c, g, or t
  misc_feature (3835)..(3841): n is a, c, g, or t
  misc_feature (3844)..(3849): n is a, c, g, or t
  misc_feature (3851)..(3851): n is a, c, g, or t
  misc_feature (3853)..(3853): n is a, c, g, or t
  misc_feature (3856)..(3862): n is a, c, g, or t
  misc_feature (3864)..(3867): n is a, c, g, or t
  misc_feature (3869)..(3873): n is a, c, g, or t
  misc_feature (3875)..(3879): n is a, c, g, or t
  misc_feature (3881)..(3886): n is a, c, g, or t
  misc_feature (3888)..(3894): n is a, c, g, or t
  misc_feature (3898)..(3901): n is a, c, g, or t
  misc_feature (3904)..(3909): n is a, c, g, or t
  misc_feature (3911)..(3911): n is a, c, g, or t
  misc_feature (3916)..(3919): n is a, c, g, or t
  misc_feature (3921)..(3923): n is a, c, g, or t
  misc_feature (3925)..(3935): n is a, c, g, or t
  misc_feature (3938)..(3941): n is a, c, g, or t
  misc_feature (3943)..(3944): n is a, c, g, or t
gnantaannccnnctnnnntggnncnggggggccnaaaaaagaaannaattgttaattttatgtcaaatattctaattttaaagtatgttattactaggaattgatttaggaagctcttcagttaaggtttctgttattgatggagagtcaggcaagtgtctggctacagcgtttaatccatctgatgagatgaaaataatagccttgaaaccgggttgggcagagcaggatactgaaatctggtggtctaacctgaaggcttcaattgcagattgtacaaataagcttgggcagaagaaaaacgatatcggtgcaataggtatctcttatcagatgcacgggcttgtcactgttgataagaataataaagtattncgtccatctataatctggtgcgacagcagggctgtcccatatggtgaaaaagctttaaactatctgggcaatgatttctgtctttcacatcttctaaattcccctggtaattttacagctacnaaactagcctgggttaaggaatgtgagccggagttgtattccagaatagataagattatgctgccgggtgattatattgcgctnaggcttacnggananataagtacttcntattcaggactttcagaaggtattttttgggatttttcaactaaccgggtttcggcagagctgctgaaatattttggttttgattcaacccttttaccccaggcggctccttcnttctcgatnagcggaagacttcttaaatcaatagcatcggaattgggtttgcctgaaggaatacctgtctcatacagagccggggatcagccaaataatgctctatctctgaatgtttttaatccgggtgaagttgcagcaactgctggtacttctggagttatatatggaattactgacaagaaaaaatatgatcctctttcacgggttaatacgtttttgcatgtaaacaatagtgacacagatgcccgtctgggngttttnttatgcataagcggaacagggatactcaattcatggcttagacgaaatagtagtggtaaattgtcatataatgatatgaatgatatggctgcaaaagttgctccgggatctgatgggctttgcattttaccctttggcaacggtgccgaaaggatgcttgggaacaaagattcaggagcaaggattgaaggattgaactttaacactcataccaatgcacatatgttcagagcagctcaggagggaatagcattttcattcaggtatggactcgatattttaaaggaaacaggaattgatccnaaggtgatgagagccggtgaagcaaatatgttccttagtaaagttttcagggaaactttatcatcagttaccggaactacaattcatctttataatacagatggatcgataggagctgccagaggtgccggaatcggatgcggtttttacaagtcggaaaaagaagcatttaaaggacttgctgctgtaggtgtcactgaacctgacaaatcaaaatcaacagaatatgaaaaggcatatataaagtggaaggagttgctttcagagttgtaaaaaattgatttatctatgcggtttttacgcaaacttttcgaactttgcatttaatggctttaaatactaatcacatataaaaaattttcattatgatttacaaaggaaaaaaagaggtatatcccggnattggaaagattgaatatgagggtaaaaaatcgaaaaatccgttggctttcaggtggtataatcctgaagaggaagtgggcggaaaaaagatgaaagatcatcttcgttttgcagtcgcttactggcactcattctgtggtgatggttcagatccgttnggggatgctaccaggttctatccctggaaagatgctaaaaacgatgataaaacaaaacaaaggcttgatgctgcctttgagtttataacaaaaattggcgcaggttattattgttttcatgatactgatattgtaggngncggtactgtttttgaaatcgaaaaaagactggaaaaaattgttccggtgatgaaaaagatgcaggaacaaactggagttaaattactttggggtactgcaaatctcttttcaaatccaaggtatatgaatggcgctgcgacaaatcctgatttcactgttgttgctaatgcagctgttcagcttaagaatgctattgctgctactgttgcccttggtggtgagaattatgttttctggggaggccgtgaaggctatatgagccttcataataccgatatgaaaagggaacttgaacacatgggtacaatgttatccatggcacgtgactatggtagaaaaattggattcaangggacattccttgttgaaccaaaaccgatggagccatcaaaacatcaatacgattttgatgtagccaccataatcggattcttacgtcaacatggtctggataaagattttaaactgaatattgaagtcaatcatgccaccctngccggtcatactttccagcatgagctccaggttgctacagatgccggtcttcttggcagcattgatgccaacaaaggtgattatcagaacggttgggatacagatgagtttcctacaaatatctatgaggtcactgaagctatgatggttattcttcaggctggtggattttcaaccggaggtataaatttcgatgccaagataagacgtaattcaaccgatattgaagatattttcatagctcatgtaagcggcatggatacttttgccagggctcttgtaattgctgataaaattctgaaagatagcgactatcttaagatgagaaagaagagatatgaatcgttcgataaaggtgccggnaaagattttgaaaaaggtaaactaaccctggcaaaattgagagatattgcttctgaactnggagaacctgaaacaagaagcggtaagcaggagctctatgagcagctgataaatatgtatctggcataaaatattgtagggacgttacatgcaacgtccctanttatttatattggtgaagtaataacctcaaacacaggtggagaggccattgactttttaaccttgcataattcggctaccgagataacagcttctttatatttatccggaaaatccggaggcagtttgatatccagtttgatattgaccggcaatcctgtttcttcatcatactcggaactctgaattattttaatntnnnnngnangnnttttnnnnttannanaaaannntnntnnntntannnngntgnnnnnnnnnntnnnnnnnannannannnnnnnnnncnnannnncngnnnnnngnncnnnnnnangcnnnnnnnnatnnnnnnnnnnnannngnnnanntnnnnnnncngnnannnnnnngnnnnnnnnnnntnntnntnnnancatntnannntnnnnnnnnnnntnnnnntcnnnnannnnnnntnnnaacagcttccccggnaaaanatatttcagcatcnngnnnnntnnttncnnnnannntncnnnnnnanatnnntnncnnnntnnnnnnnantntnngntnnnnnnnngcnntnnnnnannnnnnncnngntnnnntncattnnnnnnnncnnnctnnnttntnnncannnnntncngnnntnnntcnnnnnnnnnnnnnntnnnnnnnnnnngnnnnagnnnnnnnnnnnngttnnnnnnnnnnntnntnnnnannnntnngngnnnganaantncnnnnnttnnnnnannnnnnnnnannnnnatcnnnngngntnnnnngnannnntntnnnnnnaanntnnctgnnnnnnannntgnntgnnncnntnannccntcnatnnnnnnnttnnnnnnanantannnnnnntnnnncnnnnntnnnnncnnnnnncnnnnnnnactnnnnttnnnnnntntaccnnnncnnngnnnnnnnnnnncannnnanncttgatattttctattggtgatgtttcgattggtccaccggtatgcataccggcat

SEQ ID NO: 853 - DNA, 4000 bp, Escherichia coli
  misc_feature (502)..(502): n is a, c, g, or t
  misc_feature (504)..(505): n is a, c, g, or t
  misc_feature (507)..(510): n is a, c, g, or t
  misc_feature (513)..(513): n is a, c, g, or t
  misc_feature (518)..(519): n is a, c, g, or t
  misc_feature (522)..(522): n is a, c, g, or t
  misc_feature (524)..(527): n is a, c, g, or t
  misc_feature (534)..(534): n is a, c, g, or t
  misc_feature (536)..(538): n is a, c, g, or t
  misc_feature (540)..(540): n is a, c, g, or t
  misc_feature (542)..(545): n is a, c, g, or t
  misc_feature (547)..(550): n is a, c, g, or t
  misc_feature (552)..(553): n is a, c, g, or t
  misc_feature (555)..(555): n is a, c, g, or t
  misc_feature (558)..(558): n is a, c, g, or t
  misc_feature (561)..(566): n is a, c, g, or t
  misc_feature (568)..(571): n is a, c, g, or t
  misc_feature (575)..(577): n is a, c, g, or t
  misc_feature (579)..(581): n is a, c, g, or t
  misc_feature (586)..(589): n is a, c, g, or t
  misc_feature (591)..(592): n is a, c, g, or t
  misc_feature (594)..(595): n is a, c, g, or t
  misc_feature (597)..(598): n is a, c, g, or t
  misc_feature (600)..(600): n is a, c, g, or t
  misc_feature (607)..(607): n is a, c, g, or t
  misc_feature (609)..(609): n is a, c, g, or t
  misc_feature (613)..(613): n is a, c, g, or t
  misc_feature (615)..(616): n is a, c, g, or t
  misc_feature (618)..(621): n is a, c, g, or t
  misc_feature (623)..(623): n is a, c, g, or t
  misc_feature (625)..(626): n is a, c, g, or t
  misc_feature (629)..(631): n is a, c, g, or t
  misc_feature (634)..(638): n is a, c, g, or t
  misc_feature (640)..(643): n is a, c, g, or t
  misc_feature (646)..(647): n is a, c, g, or t
  misc_feature (649)..(650): n is a, c, g, or t
  misc_feature (658)..(661): n is a, c, g, or t
  misc_feature (664)..(665): n is a, c, g, or t
  misc_feature (668)..(668): n is a, c, g, or t
  misc_feature (672)..(672): n is a, c, g, or t
  misc_feature (674)..(676): n is a, c, g, or t
  misc_feature (678)..(680): n is a, c, g, or t
  misc_feature (683)..(685): n is a, c, g, or t
  misc_feature (687)..(688): n is a, c, g, or t
  misc_feature (690)..(691): n is a, c, g, or t
  misc_feature (693)..(694): n is a, c, g, or t
  misc_feature (697)..(697): n is a, c, g, or t
  misc_feature (699)..(699): n is a, c, g, or t
  misc_feature (701)..(707): n is a, c, g, or t
  misc_feature (709)..(710): n is a, c, g, or t
  misc_feature (715)..(716): n is a, c, g, or t
  misc_feature (718)..(719): n is a, c, g, or t
  misc_feature (722)..(723): n is a, c, g, or t
  misc_feature (725)..(725): n is a, c, g, or t
  misc_feature (728)..(728): n is a, c, g, or t
  misc_feature (732)..(732): n is a, c, g, or t
  misc_feature (734)..(739): n is a, c, g, or t
  misc_feature (741)..(741): n is a, c, g, or t
  misc_feature (745)..(747): n is a, c, g, or t
  misc_feature (752)..(752): n is a, c, g, or t
  misc_feature (755)..(755): n is a, c, g, or t
  misc_feature (759)..(762): n is a, c, g, or t
  misc_feature (765)..(765): n is a, c, g, or t
  misc_feature (767)..(780): n is a, c, g, or t
  misc_feature (782)..(782): n is a, c, g, or t
  misc_feature (784)..(784): n is a, c, g, or t
  misc_feature (788)..(790): n is a, c, g, or t
  misc_feature (794)..(796): n is a, c, g, or t
  misc_feature (799)..(800): n is a, c, g, or t
  misc_feature (804)..(805): n is a, c, g, or t
  misc_feature (807)..(807): n is a, c, g, or t
  misc_feature (809)..(809): n is a, c, g, or t
  misc_feature (812)..(813): n is a, c, g, or t
  misc_feature (886)..(888): n is a, c, g, or t
  misc_feature (893)..(893): n is a, c, g, or t
  misc_feature (895)..(899): n is a, c, g, or t
  misc_feature (903)..(905): n is a, c, g, or t
  misc_feature (909)..(909): n is a, c, g, or t
  misc_feature (914)..(914): n is a, c, g, or t
  misc_feature (917)..(921): n is a, c, g, or t
  misc_feature (924)..(924): n is a, c, g, or t
  misc_feature (927)..(927): n is a, c, g, or t
  misc_feature (931)..(931): n is a, c, g, or t
  misc_feature (942)..(942): n is a, c, g, or t
  misc_feature (945)..(946): n is a, c, g, or t
  misc_feature (950)..(950): n is a, c, g, or t
  misc_feature (953)..(953): n is a, c, g, or t
  misc_feature (1975)..(1975): n is a, c, g, or t
  misc_feature (1992)..(1992): n is a, c, g, or t
tgggcagcgagtccagcatggcgcgcgtgctcaaggccgccgggcagcgcaagcgccgaggacgtgccaaggcacccagggcaacaaagccgcccaccacccacatcgccaccgcctcaggccaggtctggtgctgggacatgacctacctgcccgccagggtgatgggccgctggttccacctgaacctgatccttgccctgtacagccggaagatcgtgggtgccgaggtgcacgacagcgatgactccgaccacgccgtgcacctggtgcgccgcaccgcgctggctgagggcatcgcggcgatgacaccgaagcccgtgctgcatggcgacaacggctccacgagcaaggccaccacggtgttgaccatgctcaactggcagggcatcaagccctcctactcgcggcctcgtgtcagcgatgacaacgcgtttgcagagtcgttgttccgcacggccaaataccgccaggagttccaggcgcagggctttgagacacngnncnnnnccngcgcnnggncnnnngggttcntnnntngnnnnannnncnngnacngcnnnnnngnnnnccgnnntnnnagccnnnngnngnncnncncccccgncngatnanncnnnntngnnggnnnggnnnnngnnnnatnncnnggcccaannnngcnnccnggcncnnngnnnggnnncnncnngnnacngntnnnnnnncnncgggnngnnccnnantcnggancnnnnnnanatgnnnaaaanggntgcnnnngtncnnnnnnnnnnnnnnangnctgnnngacnnnggnnacanntncnttnncgcgcgccgggccgcgcctcaaggccgtgagttgttcgcgctgcgcatcgttgagcaccagttccgtcttggnnnttccncnnnnnaagnnncggnggccnccnnnnnggnggngtgngggttagtccnaannatgngangcaaattcaactgctatattagttgtgcgtaatttgtatcgcaatcgcgataaactgcttcgacagactcatattaaggacacggtatgcgaaaaagcttattgaatttccttgcatcagcggcgctcagcttcggccttgcaagccccgttgctgcgcaggatgccatcaagatcggtcagatcgaggcccagaccggcccgtctagcagtctgggtttcatggccacacagggtgcaaagcttgcagttcaccagatcaatcaagccggtggcgtggaggtcggtggcaagaagtacccgatcgacctagactcgcccgacacacagggcagtcctcagcagggcctgattcagcttaagaagatgctcgagcaggaccaccggaagtacatctttgggccgacgctctcgaacgtcttcaatggggtgcgtgagtacgctcgcggctacgatggcaaactgctgatgttcgcgccggccaccgctgcgcaccccgagctgggcaagcccggttacggctttctgctgcgcccagtcctcttcgacactgccccggagggtttcggcacctacatggtcgaaatgcttcgcagcaagggcgcgaagaaggtcgccatcctgatgcagaacgacgccttcggacggttcgcggtggacatctacaaggacagcttcgccaaggcagggatcgaaattcagacacattggttcgaggcaagcaccaaggactactcggctgtgttggcgcgcatcgccgcatggaagccagactacctcttccctggttacaccgacgccgcgctctacgacattgtgcagcaggctacccagctcgggctcaccaaattctggctggtgcgcggctcgctcggccccgccatccgcaacaaggcctcgatcgacgaatacatcgcctatatgcccaaatactttgaagaggccgagaaagtcgactctaaagtggcgaaattcatcaaggactacaaggacttcttcaaggtcaaggacttcccgtacganctggccccgcttctgtntatggcatcctatgaccacgtcttcatgcttgccgaggccatgaagcgcgcgggctcgatcaacgacgtggctgcgatcaagaaggaacttttgtcgatgacctacgacggtctatgggtgcagaaattcgaccccgtaggcggtggcatccacagctatgagattgcagagatgcggcgcggcggtgccctcaagatgactctcgtgaagccggccagcaaatgatgcaattgatcgcgggccagttgatcaacggaatcatcgtgggttccctctacggaatcatcgcgctggcggtatcgttgacgagcggaatcacgggcgtcgtaaacttcgcgctgggtgcattcatgttggtcggtgcctacctcacctggcacctcaacgaaacctacggcgtggccttcccgtttgccgtgatcttggttatgggtgtggtcgccttgatcggcctagtggccgatgtgctgctgttccgccatacgcgcaacaacctgatcaacggcttgatcgtctcgatcggtctggtctcagtgatcgtggcgctcgtgcacatgacgtggacatccaccccgcagaacatgcagcccttcgtcacgggcgtattcaccgtgggtggggtagtcgtgccgaagatgaagctactgatgggggtggtgctcatattgatcgtcagcatgacctacctgggactcacgcggacgtggatggggcgcgcggcctacgcctatgcgcaaaaccccgaggccgctgccttgatgggggtcgctaccggtcgcctccaggttggcgtggccgcctttggtgcggccttgtgcggactcgctgggtcgatgtacgccacgctttactcactgacccccgacattggcgcgctgtacatgctgaagggcgtcgaaggggcgctactggccggcatcggcagcgtgatcggggcgctgttcggcggcattctaatcggtgtggccgaaggcctgggttcggtgttcctgccgcttgcattcaacgacgcctatggcttgctgatgctggtactagtgctgcttttcaggccggccggtctgttcgggaggcgttgatgcgagtgcttctgcttgtgttgtgtggcgctgtcgcgctcgtcccagcgctcaccgcgaacaacgtcgtgctgtcggtgctcacgttcacgttcatcctgggcatccttgccgtcagcttcaaccttatctacggaatcactggccaactcacgctctttcacgcggcggccttcggtgtaggggcgtacgccacccacctctcgatggcccactggtccatctccttctggctgggatcggccttcgcgatgggctgcgtggccgtggtctcgctgctcctgggcatcgtgtgctttcgcttcaggctcaaggagttctacttcgcggtcgtgaccctggcgttcgcagaaatgatccgcctggtggtgatgaattggcacggcctgaccaatggctcgctaggaatcaacttcaacctcaagcccagcgtgggggtacccggagtcggagcgctggtcatcgaagggcctgtacgttggtactacttttcgctagcttgtgtcgtcgttatcgtgctggcatatcaactggtcgtgaactcatggataggcaacgcgttcaaggccatacgcctcaacgaggacgtggcagcctccctcggcctcaatgccttccgctacaagcttctgtcgttcgtgctgggcagcatgggggcctcgttcgccggcggtctgtactcgcactacatgggtttcgtcgacccgcacctgctcgacatcaaccagtcgctggccatcttgtcgatggcgctgatcggcggcacggggtcggtggccgcccccgtggtcggggcgttggtggtcactgcactgccgcacctgatcgacctcaatgccgagtggcgtctgttgatctatggcctcatcttaatcctcacaatcctgctcatgcctcaaggcatcgtcggatcactgcagaggcttcg

SEQ ID NO: 854 - DNA, 4000 bp, Escherichia coli
  misc_feature (4)..(5): n is a, c, g, or t
  misc_feature (7)..(8): n is a, c, g, or t
  misc_feature (10)..(10): n is a, c, g, or t
  misc_feature (13)..(14): n is a, c, g, or t
  misc_feature (16)..(16): n is a, c, g, or t
  misc_feature (23)..(25): n is a, c, g, or t
  misc_feature (27)..(28): n is a, c, g, or t
  misc_feature (34)..(34): n is a, c, g, or t
  misc_feature (37)..(38): n is a, c, g, or t
  misc_feature (41)..(41): n is a, c, g, or t
  misc_feature (44)..(44): n is a, c, g, or t
  misc_feature (46)..(48): n is a, c, g, or t
  misc_feature (54)..(54): n is a, c, g, or t
  misc_feature (56)..(56): n is a, c, g, or t
  misc_feature (58)..(58): n is a, c, g, or t
  misc_feature (61)..(65): n is a, c, g, or t
  misc_feature (68)..(69): n is a, c, g, or t
  misc_feature (71)..(71): n is a, c, g, or t
  misc_feature (73)..(73): n is a, c, g, or t
  misc_feature (75)..(75): n is a, c, g, or t
  misc_feature (78)..(79): n is a, c, g, or t
  misc_feature (81)..(83): n is a, c, g, or t
  misc_feature (85)..(85): n is a, c, g, or t
  misc_feature (88)..(89): n is a, c, g, or t
  misc_feature (92)..(93): n is a, c, g, or t
  misc_feature (95)..(96): n is a, c, g, or t
  misc_feature (100)..(101): n is a, c, g, or t
  misc_feature (106)..(106): n is a, c, g, or t
  misc_feature (108)..(108): n is a, c, g, or t
  misc_feature (110)..(110): n is a, c, g, or t
  misc_feature (115)..(115): n is a, c, g, or t
  misc_feature (118)..(118): n is a, c, g, or t
  misc_feature (120)..(122): n is a, c, g, or t
  misc_feature (125)..(125): n is a, c, g, or t
  misc_feature (129)..(129): n is a, c, g, or t
  misc_feature (131)..(131): n is a, c, g, or t
  misc_feature (133)..(134): n is a, c, g, or t
  misc_feature (137)..(138): n is a, c, g, or t
  misc_feature (140)..(145): n is a, c, g, or t
  misc_feature (149)..(150): n is a, c, g, or t
  misc_feature (153)..(158): n is a, c, g, or t
  misc_feature (160)..(161): n is a, c, g, or t
  misc_feature (163)..(167): n is a, c, g, or t
  misc_feature (170)..(174): n is a, c, g, or t
  misc_feature (176)..(177): n is a, c, g, or t
  misc_feature (179)..(183): n is a, c, g, or t
  misc_feature (185)..(185): n is a, c, g, or t
  misc_feature (188)..(188): n is a, c, g, or t
  misc_feature (190)..(194): n is a, c, g, or t
  misc_feature (198)..(198): n is a, c, g, or t
  misc_feature (200)..(201): n is a, c, g, or t
  misc_feature (203)..(203): n is a, c, g, or t
  misc_feature (205)..(207): n is a, c, g, or t
  misc_feature (210)..(211): n is a, c, g, or t
  misc_feature (213)..(213): n is a, c, g, or t
  misc_feature (215)..(215): n is a, c, g, or t
  misc_feature (217)..(219): n is a, c, g, or t
  misc_feature (222)..(224): n is a, c, g, or t
  misc_feature (227)..(227): n is a, c, g, or t
  misc_feature (230)..(233): n is a, c, g, or t
  misc_feature (235)..(236): n is a, c, g, or t
  misc_feature (238)..(245): n is a, c, g, or t
  misc_feature (247)..(247): n is a, c, g, or t
  misc_feature (249)..(252): n is a, c, g, or t
  misc_feature (256)..(256): n is a, c, g, or t
  misc_feature (258)..(259): n is a, c, g, or t
  misc_feature (261)..(261): n is a, c, g, or t
  misc_feature (263)..(263): n is a, c, g, or t
  misc_feature (265)..(265): n is a, c, g, or t
  misc_feature (268)..(271): n is a, c, g, or t
  misc_feature (275)..(275): n is a, c, g, or t
  misc_feature (277)..(278): n is a, c, g, or t
  misc_feature (282)..(284): n is a, c, g, or t
  misc_feature (287)..(294): n is a, c, g, or t
  misc_feature (296)..(297): n is a, c, g, or t
  misc_feature (299)..(304): n is a, c, g, or t
  misc_feature (306)..(312): n is a, c, g, or t
  misc_feature (314)..(314): n is a, c, g, or t
  misc_feature (316)..(320): n is a, c, g, or t
  misc_feature (322)..(325): n is a, c, g, or t
  misc_feature (327)..(329): n is a, c, g, or t
  misc_feature (331)..(332): n is a, c, g, or t
  misc_feature (334)..(334): n is a, c, g, or t
  misc_feature (336)..(336): n is a, c, g, or t
  misc_feature (339)..(349): n is a, c, g, or t
  misc_feature (351)..(352): n is a, c, g, or t
  misc_feature (354)..(354): n is a, c, g, or t
  misc_feature (356)..(363): n is a, c, g, or t
  misc_feature (366)..(368): n is a, c, g, or t
  misc_feature (370)..(371): n is a, c, g, or t
  misc_feature (375)..(375): n is a, c, g, or t
  misc_feature (377)..(379): n is a, c, g, or t
  misc_feature (381)..(381): n is a, c, g, or t
  misc_feature (385)..(385): n is a, c, g, or t
  misc_feature (388)..(389): n is a, c, g, or t
  misc_feature (391)..(391): n is a, c, g, or t
  misc_feature (393)..(396): n is a, c, g, or t
  misc_feature (398)..(400): n is a, c, g, or t
  misc_feature (402)..(403): n is a, c, g, or t
  misc_feature (405)..(405): n is a, c, g, or t
  misc_feature (408)..(408): n is a, c, g, or t
  misc_feature (410)..(410): n is a, c, g, or t
  misc_feature (412)..(413): n is a, c, g, or t
  misc_feature (418)..(419): n is a, c, g, or t
  misc_feature (423)..(425): n is a, c, g, or t
  misc_feature (427)..(427): n is a, c, g, or t
  misc_feature (431)..(431): n is a, c, g, or t
  misc_feature (433)..(435): n is a, c, g, or t
  misc_feature (437)..(437): n is a, c, g, or t
  misc_feature (439)..(442): n is a, c, g, or t
  misc_feature (444)..(446): n is a, c, g, or t
  misc_feature (448)..(455): n is a, c, g, or t
  misc_feature (457)..(457): n is a, c, g, or t
  misc_feature (459)..(459): n is a, c, g, or t
  misc_feature (462)..(462): n is a, c, g, or t
  misc_feature (464)..(464): n is a, c, g, or t
  misc_feature (466)..(466): n is a, c, g, or t
  misc_feature (468)..(468): n is a, c, g, or t
  misc_feature (471)..(472): n is a, c, g, or t
  misc_feature (474)..(482): n is a, c, g, or t
  misc_feature (485)..(485): n is a, c, g, or t
  misc_feature (488)..(488): n is a, c, g, or t
  misc_feature (490)..(492): n is a, c, g, or t
  misc_feature (495)..(500): n is a, c, g, or t
  misc_feature (502)..(503): n is a, c, g, or t
  misc_feature (506)..(511): n is a, c, g, or t
  misc_feature (513)..(518): n is a, c, g, or t
  misc_feature (520)..(525): n is a, c, g, or t
  misc_feature (527)..(527): n is a, c, g, or t
  misc_feature (529)..(530): n is a, c, g, or t
  misc_feature (532)..(532): n is a, c, g, or t
  misc_feature (534)..(535): n is a, c, g, or t
  misc_feature (537)..(541): n is a, c, g, or t
  misc_feature (543)..(543): n is a, c, g, or t
  misc_feature (545)..(552): n is a, c, g, or t
  misc_feature (556)..(560): n is a, c, g, or t
  misc_feature (563)..(564): n is a, c, g, or t
  misc_feature (567)..(568): n is a, c, g, or t
  misc_feature (570)..(571): n is a, c, g, or t
  misc_feature (575)..(578): n is a, c, g, or t
  misc_feature (580)..(581): n is a, c, g, or t
  misc_feature (583)..(587): n is a, c, g, or t
  misc_feature (589)..(593): n is a, c, g, or t
  misc_feature (597)..(597): n is a, c, g, or t
  misc_feature (599)..(602): n is a, c, g, or t
  misc_feature (604)..(604): n is a, c, g, or t
  misc_feature (606)..(606): n is a, c, g, or t
  misc_feature (611)..(613): n is a, c, g, or t
  misc_feature (615)..(616): n is a, c, g, or t
  misc_feature (618)..(620): n is a, c, g, or t
  misc_feature (622)..(622): n is a, c, g, or t
  misc_feature (625)..(630): n is a, c, g, or t
  misc_feature (633)..(633): n is a, c, g, or t
  misc_feature (638)..(641): n is a, c, g, or t
  misc_feature (643)..(644): n is a, c, g, or t
  misc_feature (646)..(652): n is a, c, g, or t
  misc_feature (654)..(655): n is a, c, g, or t
  misc_feature (657)..(657): n is a, c, g, or t
  misc_feature (659)..(666): n is a, c, g, or t
  misc_feature (668)..(672): n is a, c, g, or t
  misc_feature (675)..(676): n is a, c, g, or t
  misc_feature (679)..(689): n is a, c, g, or t
  misc_feature (691)..(691): n is a, c, g, or t
  misc_feature (694)..(698): n is a, c, g, or t
  misc_feature (701)..(702): n is a, c, g, or t
  misc_feature (704)..(704): n is a, c, g, or t
  misc_feature (707)..(708): n is a, c, g, or t
  misc_feature (710)..(711): n is a, c, g, or t
  misc_feature (713)..(714): n is a, c, g, or t
  misc_feature (716)..(718): n is a, c, g, or t
  misc_feature (720)..(723): n is a, c, g, or t
  misc_feature (728)..(729): n is a, c, g, or t
  misc_feature (734)..(739): n is a, c, g, or t
  misc_feature (741)..(747): n is a, c, g, or t
  misc_feature (749)..(755): n is a, c, g, or t
  misc_feature (757)..(767): n is a, c, g, or t
  misc_feature (769)..(771): n is a, c, g, or t
  misc_feature (775)..(778): n is a, c, g, or t
  misc_feature (780)..(780): n is a, c, g, or t
  misc_feature (782)..(782): n is a, c, g, or t
  misc_feature (784)..(786): n is a, c, g, or t
  misc_feature (788)..(790): n is a, c, g, or t
  misc_feature (792)..(794): n is a, c, g, or t
  misc_feature (796)..(798): n is a, c, g, or t
  misc_feature (800)..(801): n is a, c, g, or t
  misc_feature (803)..(804): n is a, c, g, or t
  misc_feature (806)..(809): n is a, c, g, or t
  misc_feature (812)..(816): n is a, c, g, or t
  misc_feature (818)..(819): n is a, c, g, or t
  misc_feature (821)..(824): n is a, c, g, or t
  misc_feature (826)..(827): n is a, c, g, or t
  misc_feature (829)..(830): n is a, c, g, or t
  misc_feature (832)..(837): n is a, c, g, or t
  misc_feature (839)..(839): n is a, c, g, or t
  misc_feature (841)..(842): n is a, c, g, or t
  misc_feature (850)..(850): n is a, c, g, or t
  misc_feature (858)..(858): n is a, c, g, or t
  misc_feature (861)..(861): n is a, c, g, or t
  misc_feature (863)..(864): n is a, c, g, or t
  misc_feature (869)..(869): n is a, c, g, or t
  misc_feature (873)..(873): n is a, c, g, or t
  misc_feature (883)..(883): n is a, c, g, or t
  misc_feature (885)..(885): n is a, c, g, or t
  misc_feature (892)..(893): n is a, c, g, or t
  misc_feature (909)..(910): n is a, c, g, or t
  misc_feature (925)..(928): n is a, c, g, or t
  misc_feature (939)..(939): n is a, c, g, or t
  misc_feature (1044)..(1044): n is a, c, g, or t
  misc_feature (1108)..(1108): n is a, c, g, or t
  misc_feature (1120)..(1120): n is a, c, g, or t
  misc_feature (1123)..(1123): n is a, c, g, or t
  misc_feature (1624)..(1624): n is a, c, g, or t
tagnnanncngcnngngaaaatnnnannaaaaanatnncanaantnnnaacaanantngannnnnaannanangnaannannnanacnncanngnnaaanncaaantnanagccnaanannnaanctcngnannaannannnnnngaanntgnnnnnnannannnnnatnnnnnannannnnnancangnnnnnaagnanngnannnaannanangnnnaannncanagnnnnannannnnnnnncngnnnnaaancnnanangnagnnnnaaancnnagcnnnaannnnnnnnannannnnnnannnnnnncnannnnnannnncnnnanntnanagnnnnnnnnnnnannanannnnnnnngtnnngnnaagnannngnatcnaanntngnnnncnnngnnangtntngnnctaanngtgnnncnaagngnnngntnnnnannnannnnnnnngnangcnanananaannannnnnnnnnttngtntnnnaannnnnntnnttnnnnnngnnnnnntnnnnnntntnntngnngnnnnngnannnnnnnnaggnnnnnttnnagnngnnggannnngnnannnnncnnnnntagnannnngngnatgtnnncnngnnncngtnnnnnntantggannnngnnannnnnnngnntnannnnnnnntnnnnntcnnctnnnnnnnnnnncnggnnnnncanntncannanncnntnnngnnnntgganntgtcnnnnnngnnnnnnnannnnnnngnnnnnnnnnnncnnnaaannnngnancnnnannncnnnannntnntnngnnnnagnnnnnannannnnanngnnannnnnntncnngaaaaccngcagaganaanannaacancttnatcttgtaananttgtggnnccagactaaagccaanngcaaagttttgtggnnnntgtggcacccnacgttcgtaatcactattatagagaaaagccaaatcgtaattattggaattaacagaggacgaagaggaatctctaaacggagaacatggcgaagcgctgcaaanagcatacaggatattgtcagctaccggtgaggcaaccgacgctgaaaaacttgtaccgattcantgggcgcatgtntcnggcgtaaactataacacgataggagatgccggcgaggaatttttagcaactctaagcaagaatgcaaagttcaaggtaagaaccacagtaaacccgatgggctatgacagggatagcgtagaaaagtttggtcttgatgaaaattttatacaaaagcaggaaagcattaaaaaatcatacaaaaagatgggagtcactccatcgttctcctgcattccttatgagatctatgatatgccacaggaaggcacacaagtagcctttgcggaaaccaacgcggcaatatatgcaaactcgattggaaagctaaagacaaacaaggaaagtgcgttttctgctctggcaagcgcaattactggcaaaagtccatactctgacctccgaaaggatgactccccaaccatgtcaattgcaatgaaggtttcagatccaaacgagctgacatttggactgttgggatattttgctggaaaggtggcggacaagtctgttgcaatttcnggcgtaaagaatttggataaaagatgtaacaagtcattgtgtgccagcatgggaacttctggaacctgtggcaagtttgttttggatgataattcaagcgcatccgaaaaggtagactttgatgaaaaggagatgcagaaagtttacgacgagctaaacaccgcagagtcgggtgacctgattacacttggcagcccacagcttggactggaggagatgagtggcctagcttcaatgctaaagggaagggcattcaagaaaagatgtctgatattttgcccaagggcaattcaggaacaggcaagacatctaggatatgcaggccaacttgaaagtgctgggtgtgaattgatgtcagattgttgtacatgtctaaccccattggttaccaaaaaggatgcagacagcgttaccacaaacagcatcaagggtgcatactatctgaaaaactcaaacggtttggatgtcaacctaaagccactatcagaaatagtgagggatgagacaagttgactctgaaaactattgtaaaaggaaaagtcactggcaaggttctcaagtccagccaaccaatcaactttctgggttctgttgataaaaaaacaggagcaattactgaccaaaaacatgatctgtttggaaaaaagattgcaggctccatcctagtttttccaaatgggataggcagcagcgttggcgcatacaccatctattcgctaaaatcaaataactctgctcctgccgcaatggcttgccaaaaagcggaccttacagttgcctctggatgtgcacttgcaaacattcctttgtttattttgtcgcctgacgaatatgacagtatgaaagacggggatgagatatcgcttggataagagtgtcaggaagaaaaaaagatacaaagatccttacaaaaaaagataccgagaaaatttaggttcctgaaccagattctgttatgttacatgcgcctgtaggcaaaactcgtacaaaatcatcaatactaaatggctttgcaatctcctcattgcttgacaaaaattcgtaacgaattctttttgcaacatcaggcatatcttgtcctgtaggttctatcatggcgtagcaaactgctgtatttttcaggcttggtggaccacaagtaagcaaataactttcttcatgcttgattatagcaacacacatcttcaaacttgatatttttacaaagttgcgctgtccttcaatcataaaagagcccttggccatagactgtccgctgggagcaccttttttgacctggtctgggttaacccagtaagcgcttgaaccatagaacgcttccttccatactttgctaaagcacactgtggcatgagcaacttcagtaaggcttgcaggcgtggatgtaacattatcctttaacagaaaaaatggtgaaccggaaatttcagcatggaaaactttgtcatttttctgaagatgctttcggataatagcagagtttgacgaagagtcacgtcctcctattgccaagacaccatctatcgtgtaaaaccatcgataccgttcaaaccagtttttctttctaacctgtgtaaaaccaacaggctttgcactctcacctttctcaatcactttttctaaatcctttttagttttttttagtaatttttcaatggagccaatggcagctttttgcttttttgattcgttgaataatgcggaagcagttgtgggaagagacgagttcaaatccaccttgattttttcatcctcaactttgagatatgttattcctttttcttttacaatctctgagttgttcttttttagcaaggcagtaattttagaatcatccattgatgaaattccttgagaaagtccttcaaaaagtgagtttgctactgcagcaattttttccgatttttcagttactatcttaattgcctttgtttgctcatgaactcttgtttccaattctgaaatttttttggtaaacgaggagctctgaattgtttttcctttgctaagaatattttcggtgaaaactgtatcaagaccatccataaagctagcaattttttcatggttttctccttctaaggaaattggattaacatacatctcatcatttcgaacaatttcaggatcatgttgaccatttacaacattgttaataatttgtgtggcggagtcaaataatcgctttacctcctcattcgacgtttcttctcctttcttttttgattctacttttgctaatcttgttatttcctcaatatactttctgggcaatcccaaggtttttcctatccattttgccacagggatggattcagaacgaatagcctcaaaacctttctcagtcatattcaaaacatccaagttgtcttgcgg

SEQ ID NO: 855 - DNA, 4000 bp, Escherichia coli
  misc_feature (1)..(1): n is a, c, g, or t
  misc_feature (3)..(3): n is a, c, g, or t
  misc_feature (6)..(6): n is a, c, g, or t
  misc_feature (8)..(8): n is a, c, g, or t
  misc_feature (10)..(13): n is a, c, g, or t
  misc_feature (15)..(17): n is a, c, g, or t
  misc_feature (19)..(19): n is a, c, g, or t
  misc_feature (21)..(27): n is a, c, g, or t
  misc_feature (29)..(29): n is a, c, g, or t
  misc_feature (32)..(37): n is a, c, g, or t
  misc_feature (40)..(43): n is a, c, g, or t
  misc_feature (46)..(47): n is a, c, g, or t
  misc_feature (49)..(50): n is a, c, g, or t
  misc_feature (52)..(52): n is a, c, g, or t
  misc_feature (56)..(58): n is a, c, g, or t
  misc_feature (61)..(61): n is a, c, g, or t
  misc_feature (63)..(63): n is a, c, g, or t
  misc_feature (65)..(66): n is a, c, g, or t
  misc_feature (68)..(76): n is a, c, g, or t
  misc_feature (78)..(89): n is a, c, g, or t
  misc_feature (91)..(97): n is a, c, g, or t
  misc_feature (99)..(102): n is a, c, g, or t
  misc_feature (108)..(112): n is a, c, g, or t
  misc_feature (115)..(116): n is a, c, g, or t
  misc_feature (119)..(119): n is a, c, g, or t
  misc_feature (122)..(122): n is a, c, g, or t
  misc_feature (124)..(127): n is a, c, g, or t
  misc_feature (130)..(134): n is a, c, g, or t
  misc_feature (136)..(142): n is a, c, g, or t
  misc_feature (144)..(144): n is a, c, g, or t
  misc_feature (147)..(148): n is a, c, g, or t
  misc_feature (150)..(151): n is a, c, g, or t
  misc_feature (153)..(156): n is a, c, g, or t
  misc_feature (158)..(159): n is a, c, g, or t
  misc_feature (162)..(162): n is a, c, g, or t
  misc_feature (165)..(173): n is a, c, g, or t
  misc_feature (175)..(176): n is a, c, g, or t
  misc_feature (178)..(181): n is a, c, g, or t
  misc_feature (183)..(183): n is a, c, g, or t
  misc_feature (187)..(187): n is a, c, g, or t
  misc_feature (190)..(190): n is a, c, g, or t
  misc_feature (192)..(192): n is a, c, g, or t
  misc_feature (194)..(194): n is a, c, g, or t
  misc_feature (197)..(201): n is a, c, g, or t
  misc_feature (203)..(206): n is a, c, g, or t
  misc_feature (208)..(212): n is a, c, g, or t
  misc_feature (215)..(222): n is a, c, g, or t
  misc_feature (224)..(228): n is a, c, g, or t
  misc_feature (230)..(232): n is a, c, g, or t
  misc_feature (234)..(240): n is a, c, g, or t
  misc_feature (242)..(242): n is a, c, g, or t
  misc_feature (244)..(244): n is a, c, g, or t
  misc_feature (246)..(248): n is a, c, g, or t
  misc_feature (250)..(257): n is a, c, g, or t
  misc_feature (259)..(267): n is a, c, g, or t
  misc_feature (269)..(269): n is a, c, g, or t
  misc_feature (271)..(271): n is a, c, g, or t
  misc_feature (273)..(275): n is a, c, g, or t
  misc_feature (279)..(280): n is a, c, g, or t
  misc_feature (282)..(293): n is a, c, g, or t
  misc_feature (295)..(296): n is a, c, g, or t
  misc_feature (298)..(304): n is a, c, g, or t
  misc_feature (307)..(318): n is a, c, g, or t
  misc_feature (320)..(322): n is a, c, g, or t
  misc_feature (324)..(330): n is a, c, g, or t
  misc_feature (333)..(333): n is a, c, g, or t
  misc_feature (335)..(342): n is a, c, g, or t
  misc_feature (346)..(348): n is a, c, g, or t
  misc_feature (350)..(353): n is a, c, g, or t
  misc_feature (355)..(362): n is a, c, g, or t
  misc_feature (365)..(365): n is a, c, g, or t
  misc_feature (367)..(367): n is a, c, g, or t
  misc_feature (369)..(374): n is a, c, g, or t
  misc_feature (376)..(382): n is a, c, g, or t
  misc_feature (385)..(404): n is a, c, g, or t
  misc_feature (406)..(413): n is a, c, g, or t
  misc_feature (416)..(416): n is a, c, g, or t
  misc_feature (418)..(421): n is a, c, g, or t
  misc_feature (423)..(428): n is a, c, g, or t
  misc_feature (430)..(430): n is a, c, g, or t
  misc_feature (433)..(433): n is a, c, g, or t
  misc_feature (435)..(435): n is a, c, g, or t
  misc_feature (437)..(438): n is a, c, g, or t
  misc_feature (440)..(440): n is a, c, g, or t
  misc_feature (443)..(447): n is a, c, g, or t
  misc_feature (449)..(449): n is a, c, g, or t
  misc_feature (451)..(451): n is a, c, g, or t
  misc_feature (453)..(463): n is a, c, g, or t
  misc_feature (465)..(465): n is a, c, g, or t
  misc_feature (468)..(470): n is a, c, g, or t
  misc_feature (474)..(475): n is a, c, g, or t
  misc_feature (477)..(478): n is a, c, g, or t
  misc_feature (480)..(480): n is a, c, g, or t
  misc_feature (482)..(484): n is a, c, g, or t
  misc_feature (486)..(507): n is a, c, g, or t
  misc_feature (509)..(514): n is a, c, g, or t
  misc_feature (516)..(516): n is a, c, g, or t
  misc_feature (520)..(522): n is a, c, g, or t
  misc_feature (524)..(535): n is a, c, g, or t
  misc_feature (538)..(539): n is a, c, g, or t
  misc_feature (541)..(541): n is a, c, g, or t
  misc_feature (543)..(548): n is a, c, g, or t
  misc_feature (550)..(557): n is a, c, g, or t
  misc_feature (559)..(563): n is a, c, g, or t
  misc_feature (565)..(566): n is a, c, g, or t
  misc_feature (568)..(575): n is a, c, g, or t
  misc_feature (580)..(581): n is a, c, g, or t
  misc_feature (584)..(589): n is a, c, g, or t
  misc_feature (591)..(594): n is a, c, g, or t
  misc_feature (597)..(597): n is a, c, g, or t
  misc_feature (599)..(604): n is a, c, g, or t
  misc_feature (606)..(606): n is a, c, g, or t
  misc_feature (608)..(612): n is a, c, g, or t
  misc_feature (614)..(617): n is a, c, g, or t
  misc_feature (619)..(620): n is a, c, g, or t
  misc_feature (622)..(633): n is a, c, g, or t
  misc_feature (635)..(636): n is a, c, g, or t
  misc_feature (638)..(640): n is a, c, g, or t
  misc_feature (643)..(645): n is a, c, g, or t
  misc_feature (648)..(649): n is a, c, g, or t
  misc_feature (651)..(651): n is a, c, g, or t
  misc_feature (653)..(663): n is a, c, g, or t
  misc_feature (666)..(673): n is a, c, g, or t
  misc_feature (675)..(679): n is a, c, g, or t
  misc_feature (681)..(683): n is a, c, g, or t
  misc_feature (686)..(691): n is a, c, g, or t
  misc_feature (693)..(701): n is a, c, g, or t
  misc_feature (703)..(703): n is a, c, g, or t
  misc_feature (709)..(710): n is a, c, g, or t
  misc_feature (712)..(715): n is a, c, g, or t
  misc_feature (717)..(717): n is a, c, g, or t
  misc_feature (720)..(721): n is a, c, g, or t
  misc_feature (723)..(725): n is a, c, g, or t
  misc_feature (727)..(736): n is a, c, g, or t
  misc_feature (739)..(739): n is a, c, g, or t
  misc_feature (741)..(741): n is a, c, g, or t
  misc_feature (743)..(745): n is a, c, g, or t
  misc_feature (747)..(759): n is a, c, g, or t
  misc_feature (761)..(761): n is a, c, g, or t
  misc_feature (763)..(766): n is a, c, g, or t
  misc_feature (768)..(769): n is a, c, g, or t
  misc_feature (771)..(773): n is a, c, g, or t
  misc_feature (775)..(775): n is a, c, g, or t
  misc_feature (777)..(784): n is a, c, g, or t
  misc_feature (787)..(789): n is a, c, g, or t
  misc_feature (791)..(797): n is a, c, g, or t
  misc_feature (799)..(803): n is a, c, g, or t
  misc_feature (805)..(807): n is a, c, g, or t
  misc_feature (810)..(810): n is a, c, g, or t
  misc_feature (813)..(816): n is a, c, g, or t
  misc_feature (818)..(825): n is a, c, g, or t
  misc_feature (827)..(828): n is a, c, g, or t
  misc_feature (830)..(835): n is a, c, g, or t
  misc_feature (837)..(837): n is a, c, g, or t
  misc_feature (839)..(840): n is a, c, g, or t
  misc_feature (842)..(842): n is a, c, g, or t
  misc_feature (870)..(870): n is a, c, g, or t
  misc_feature (874)..(874): n is a, c, g, or t
  misc_feature (877)..(877): n is a, c, g, or t
  misc_feature (880)..(880): n is a, c, g, or t
  misc_feature (891)..(891): n is a, c, g, or t
  misc_feature (893)..(895): n is a, c, g, or t
  misc_feature (898)..(898): n is a, c, g, or t
  misc_feature (909)..(910): n is a, c, g, or t
  misc_feature (917)..(917): n is a, c, g, or t
  misc_feature (928)..(928): n is a, c, g, or t
  misc_feature (932)..(932): n is a, c, g, or t
  misc_feature (936)..(936): n is a, c, g, or t
  misc_feature (940)..(940): n is a, c, g, or t
  misc_feature (971)..(972): n is a, c, g, or t
  misc_feature (975)..(975): n is a, c, g, or t
  misc_feature (982)..(983): n is a, c, g, or t
  misc_feature (985)..(985): n is a, c, g, or t
  misc_feature (987)..(988): n is a, c, g, or t
  misc_feature (990)..(991): n is a, c, g, or t
  misc_feature (996)..(996): n is a, c, g, or t
  misc_feature (999)..(1000): n is a, c, g, or t
  misc_feature (1014)..(1014): n is a, c, g, or t
  misc_feature (1019)..(1021): n is a, c, g, or t
  misc_feature (1027)..(1030): n is a, c, g, or t
  misc_feature (1041)..(1041): n is a, c, g, or t
  misc_feature (1043)..(1046): n is a, c, g, or t
  misc_feature (1051)..(1051): n is a, c, g, or t
  misc_feature (1053)..(1055): n is a, c, g, or t
  misc_feature (1057)..(1057): n is a, c, g, or t
  misc_feature (1066)..(1066): n is a, c, g, or t
  misc_feature (1071)..(1071): n is a, c, g, or t
  misc_feature (1076)..(1076): n is a, c, g, or t
  misc_feature (1079)..(1085): n is a, c, g, or t
  misc_feature (1093)..(1094): n is a, c, g, or t
  misc_feature (1097)..(1097): n is a, c, g, or t
  misc_feature (1100)..(1100): n is a, c, g, or t
  misc_feature (1102)..(1102): n is a, c, g, or t
  misc_feature (1104)..(1104): n is a, c, g, or t
  misc_feature (1106)..(1106): n is a, c, g, or t
  misc_feature (1109)..(1109): n is a, c, g, or t
  misc_feature (1114)..(1114): n is a, c, g, or t
  misc_feature (1119)..(1119): n is a, c, g, or t
  misc_feature (1126)..(1127): n is a, c, g, or t
  misc_feature (1131)..(1131): n is a, c, g, or t
  misc_feature (1156)..(1156): n is a, c, g, or t
  misc_feature (1160)..(1160): n is a, c, g, or t
  misc_feature (1165)..(1165): n is a, c, g, or t
  misc_feature (1175)..(1175): n is a, c, g, or t
  misc_feature (1203)..(1203): n is a, c, g, or t
  misc_feature (1210)..(1210): n is a, c, g, or t
  misc_feature (1215)..(1215): n is a, c, g, or t
  misc_feature (1217)..(1217): n is a, c, g, or t
  misc_feature (1244)..(1244): n is a, c, g, or t
  misc_feature (1248)..(1248): n is a, c, g, or t
  misc_feature (1251)..(1252): n is a, c, g, or t
  misc_feature (1255)..(1255): n is a, c, g, or t
  misc_feature (1263)..(1263): n is a, c, g, or t
  misc_feature (1272)..(1272): n is a, c, g, or t
  misc_feature (1275)..(1275): n is a, c, g, or t
  misc_feature (1294)..(1298): n is a, c, g, or t
  misc_feature (1302)..(1302): n is a, c, g, or t
  misc_feature (1304)..(1305): n is a, c, g, or t
  misc_feature (1353)..(1353): n is a, c, g, or t
  misc_feature (1355)..(1355): n is a, c, g, or t
  misc_feature (1377)..(1377): n is a, c, g, or t
  misc_feature (1379)..(1379): n is a, c, g, or t
  misc_feature (1990)..(1990): n is a, c, g, or t
  misc_feature (2062)..(2062): n is a, c, g, or t
  misc_feature (2323)..(2323): n is a, c, g, or t
  misc_feature (2362)..(2362): n is a, c, g, or t
  misc_feature (2404)..(2404): n is a, c, g, or t
  misc_feature (2407)..(2407): n is a, c, g, or t
  misc_feature (2527)..(2527): n is a, c, g, or t
  misc_feature (2530)..(2530): n is a, c, g, or t
  misc_feature (2545)..(2545): n is a, c, g, or t
  misc_feature (2566)..(2566): n is a, c, g, or t
  misc_feature (2608)..(2608): n is a, c, g, or t
  misc_feature (2626)..(2626): n is a, c, g, or t
  misc_feature (2638)..(2638): n is a, c, g, or t
  misc_feature (2737)..(2737): n is a, c, g, or t
  misc_feature (3398)..(3398): n is a, c, g, or t
  misc_feature (3789)..(3789): n is a, c, g, or t
  misc_feature (3798)..(3799): n is a, c, g, or t
  misc_feature (3801)..(3801): n is a, c, g, or t
  misc_feature (3903)..(3903): n is a, c, g, or t
  misc_feature (3918)..(3918): n is a, c, g, or t
nanagngngnnnnannncncnnnnnnngngannnnnngcnnnnaanntnncngggnnnaananannannnnnnnnntnnnnnnnnnnnnannnnnnngnnnnaggagnnnnntcnnagngcngnnnngcnnnnncnnnnnnncntgnngnncnnnnannagngannnnnnnnntnngnnnngngaangangngngannnnncnnnncnnnnnatnnnnnnnntnnnnngnnnannnnnnntncncnnngnnnnnnnngnnnnnnnnngngngnnngatnngnnnnnnnnnnnnannannnnnnnatnnnnnnnnnnnncnnnannnnnnntgngnnnnnnnnggannnannnngnnnnnnnnagngnannnnnngnnnnnnncgnnnnnnnnnnnnnnnnnnnnannnnnnnnatncnnnncnnnnnngnganangnngngannnnnangnannnnnnnnnnngnagnnnctgnngnnanannncnnnnnnnnnnnnnnnnnnnnnntnnnnnnanccgnnncnnnnnnnnnnnnagnnantnnnnnngnnnnnnnnannnnnanngnnnnnnnnctcgnnaannnnnncnnnnaantnnnnnngnannnnngnnnnanngnnnnnnnnnnnnannannngcnnnagnnantnnnnnnnnnnnacnnnnnnnnannnnnannngtnnnnnnannnnnnnnngntgacgnntnnnngntgnngnnngnnnnnnnnnngangntnnngnnnnnnnnnnnnngnannnnanncnnngnannnnnnnnccnnnannnnnnngnnnnnannntancgnnnntnnnnnnnngnnannnnnngncnngnaagttccgacccgcacgaaaggcgtaangatntgngcnctgtctcaacnannnacncggtgaaattnnagtaccngtgaagatgcnggtnaccngcgncaggacggaaagaccccatggagctttactnnagnttgatanngngnntnngtgtnacnngtacaggataggtnggagnnnaagaannnnggacgccagtntnnnnggagncnnngntgggatacnacccntgtgncannnnnnntctaaccnncanccntnancnggntgggngacantgtcagnngggnagtttgactggggcggtcgcctccnaaantgtancggaggcgcncaaaggttccctcagaatggttggaaancattcgnagagngnaaaggcagaagggagcttgactgcganaccnacnngtngagcaggnacgaaagtnggncttagtgatccggtggtannnnntggnanngccatcgctcaacggataaaagctaccctggggataacaggcttatcncncccaagagttcacatcgacggngnggtttggcacctcgatgtcggctcatcgcatcctggggctgaagtcggtcccaagggttgggctgttcgcccattaaagcggtacgcgagctgggttcagaacgtcgtgagacagttcggtccctatccgtcgcgggcgttggaaatttgagaggagctgtccttagtacgagaggaccgggatggacacaccgctggtgtaccagttgttctgccaagagcatcgctgggtagctatgtgtggacgggataaacgctgaaagcatctaagcgtgaagcccccctcgagatgagatttcccatcattttaaatgagtaagacccctgagagacgatcaggtagataggctagaagtggaagtgccgcgaggcatggagcggactagtactaatcggtcgaggacttaaccacgagttgtatagctggtagattgatggagttggatatagattcagttttgaaagaacgaaagttttttcagaagataaagtgtggtgacgatggcaagaaggatacacctgttcccatctcgaacacagaagttaagcttcttagcgccgatagtagttgggggtttctccctgcgagggtaggacgttgccacgcaaantgtgtaagctgggcctagtgcccagcttattttgtagctatttttctaatattttattttaagagaattttngaaggaagtttgctataataaaacggatgataaggaggaggtaaaatcatgaaatggattaaaagtacagtattaatggcgtttctatgcgttttatctgcttgtggaaatggcttatcaacagaggcggttcaagaccaaatcgtaagttctgaagagtcggtttccaattatcatattaccgtgaagcaatcggactataaggaagggtcgaaaacacctggagcacaaacggtggcgagtgctagcgcgtggaaaganggcacaggatacggctcgaaaatcgataaaaatgctggnaaggtaacgaaccaactcgaagtgattgcggatgccaatgtnggntttattcgctactatcaagacaagtgggaacaaaccatcacggcagcctcaagtcttcaaaatacggttgttttcccgtatgcaaaggtgattcaattaacgaaggaaattcatcaagangtnccttggaagaagacnttctctggatacgagaagacntatacaggaaacgacgaatcgattcgtaaggcattgacgtcngttcttggaattgcgacnacggatacgtcnaaagtcgagttaaaaatcaagacagatggcgctggaaatctgattacaaatgttgaaatcaaggtaacggatgaaggcgaacaaatgcgtaaagaatantcgattgcgtacttacaatttaatgaacaacaaaagaaagctttgccgcaataagggcgaagcttttttcgtaaaataaaccgctatgactacaaaaaaaggcgcttttttgttacaatagaaaagaacaaaatattgcgagaaatgaagaacattttgtagacatgcgagagggagaatgcttgcattctcccttttttataacaagaaaacatggaggaagaatatgggacgtgtgatatccgttgccaaccaaaaaggtggagttggtaagacaacttcgacagtgagtttggctgcagcacttgccgttcatggcaaaaaagtattgattattgatagtgaccctcaaggaaatgcgacgagtggtcttggcgtgcaaaaaggagagctagaacaagatgtatatgatgttttagtgaaccaagtaccaatggctgatgtcattgtaccgacaacgcgcgaaaacttgatgattgctccttctacgattcagttagcaggtgccgaaatcgagttaacgagtcaaccacgtcgtgaacaacgcttgaaggaagccgtgaagaagattaaagatgactacgattatatctttatcgactgcccaccttcactagggcatttgacaatgaatgcttttacggccagcgacacagttctnatccctgtgcaatgtgaatactacgcacttgaagggttgtcacaactcatgaacacgatcacgatggttcgcaagcacttcaatccgcagttgaagattgagggcgttcttttaacgatgtacgatgcgcgtacgaacttagggaacgaagtgaaagacgatgtgattaagtatttccgtgaaaaagtatataaaacaattattcctcgaaacgtacgtctatctgaggcgccaagttacggacaagcgattgtcgactatgatccacgctctcgtggtgctgaagtgtacatggagttagcaaaggaagtgttggcacatgagtaaaaatcaaaaaggaaaaggtcttggacgcggtattgatgcgctctttatgaatgacttggatacnatcgatgcnntngagcaagttcaagattcagaacaaattcaacaaattgctgtttcagaaattcgtccaaacccatatcaacctcgtaaagagttcgatgaagagggcttggcngaattagcagaatcnattcgtcaaaatggagtcttccaaccaatcatcgttcgtaagtcgaaaattaaaggctacgagcttgtggctggggaacgtc

SEQ ID NO: 856 - DNA, 4000 bp, Escherichia coli
  misc_feature (3)..(3): n is a, c, g, or t
  misc_feature (118)..(118): n is a, c, g, or t
  misc_feature (230)..(230): n is a, c, g, or t
  misc_feature (266)..(266): n is a, c, g, or t
  misc_feature (359)..(359): n is a, c, g, or t
  misc_feature (362)..(362): n is a, c, g, or t
  misc_feature (863)..(863): n is a, c, g, or t
  misc_feature (875)..(875): n is a, c, g, or t
  misc_feature (1984)..(1984): n is a, c, g, or t
  misc_feature (2643)..(2643): n is a, c, g, or t
  misc_feature (2892)..(2892): n is a, c, g, or t
tanctcgatcaatccgcttattcgtcgatggtgaagtcgtcacattccttcaatcagaaggcgagaaaatagacgtacgcgtcaaatcaaatttgactaatttagaggatattgatgngttactttctcagtctattacaacactaaccggagaaaatattcctctaaggcaattggtccactttgataccggcaagtctcgagagagtattcgacactataacttcagncgaacgatcaccttagaagcagatattgaccgagancgtattaacgaaatccaagttaacgaactaatcaaagaggagtgggcaagaattaagttcgaccatcctaacgtctcgctagatttctcgggngcnctcgatgatattcaagaaagtttagacgccatgctcttgctattcttacttggaattagcctaatttatctattaattgggacgcaatttaaaagctacttccaaccgctaatgattctagccaccgtccctttagcttttattggcgttgtaatcggcttaattatcacccaaaatcccctgagtttatatacgatgtatggcattgttgcgcttactggtatttcggtaaatagcgcaattgtgttgattgacgcggccaatacacgccgaaaatcgggcatgaatggcgtgcatgctattgtctttgcagcacggcgtcgagttgtaccgattttaattacatcgttcacaacgatcgcagggctgctctccttggcattaggtctcggtggaaactcgctactgtggggcccagttgcctcagcaattatgtggggattagcagtctccacaatgatgacgctttttgtaattccactactctataaaacgttctcncgataggtttantttgaatccgtcacccagacggattttgatgctcgcttacttaatttcaatttatgaattaaggcttcaggacaatcagaagtacataaacttttaaaatgctcttcagctaaaaaatcctgatctaccattgtgtgcagataattggtcaagctatcaaaataaccctctacatttaagagccctactggcttttcgtgaattcctaattgataccaagtccaagcctcaaagaactcgtccatagtaccgattcccccgggcattgcgataaatgcatctgccaaatccagcatctttgccttacgttcatgcatatccgaaacagtcactaattctgttagattttggtgcactacttccctggtacttaacccagtcggtatcactccggtcacctttcccccttgggtaataatgctatccgccaatatacccatcaatccgactctacctccgccgaagacgagctctatttcaccttcaacaagaatctttgcgagtcgtttggccgctaactcatacgcatctttagtcccttttctcgagccacaaaaaacagcaattcgtttgatcatttgttaattacctccgggtaatggtaacgctgttttatacttaacctgcttgagtgcaaagctcgatttgatattacctacacccggaatttttgataaaaaatttaaaataaacgcttctagtacttggatatctgctacgactactcgaatcaagtaatcggcttctcccgtcatgagataacactccattacctcagggcgtgctttgattgattcctcaaaacgctccagcgccgactccacctgacgctctaatgccacattaataaagacactcacttttaatccaacttttaaggaatcaatcaaggttacataccgactgatgtggccagatttctcaagcgcttttacgcgtgccaacgttggagaaggcgagagtccaacagctttggacagttcgatattggtgattctcgcgttattctgcaataaccttaatatttcccaatcaattgaatcaatcataataatcaaaataatatgctgtatataaataaatattagcataataattctgttaaatantgatttttaaagcataaacagaatcacatgctccataactttcgatatgatggacgctaaatacaaatttaaatggcaaacaagctggagcaacacacatgaccgatatgtccgaccaaaagcaaatgaatgtatcagcattttggcgagtactgcctcaagatttagatcctatcgagactcaagaatgggtagacgcttttaaccaactcgtcgcaatcgaaggtgaagagcgtgcaacttttttattgatgaaattgctagaacaagcgaggcgacttagggttcctatgcctcccgtgctcaatacaccgtactcaaacacgatatcgttggcagaccagcctccgttcccaggaaatcttgacgcagaggctaaattatctgccattattcgatggaacgctctagccatggttgtgagggcaaaccgcgtaaactcagatttaggtgggcacattgcaacctatacctcgtcagccgatctcttcgaggtagggttcaaccatttttttagagctggtctcgatggtgattgcgtatattttcagccgcactcggctcctggcgtttattcaagagcctttctcgaggggcgattaagcgaagaaaacgttgctaattatcgacaagaaacaggtggtgtcggtctctcctcntattgtcacccatggctgatgccggatttttggcagtttcccactgggtcgatgggcctaggtgcgatcaccgctatctatcaagcacgtttcatccgctaccttgagaacagagaacttcataatacgagtgaccgcaaagtttggtgttttgtgggcgatggagaaatggatgagccggagtctatcgccggactctcattagcctcacgcgaggggcttgataatctcattttcgttgtgaactgnaatttacagcgcttggatggtcccgtgcgcggtaatagctcgatcgtccaggaacttgaaggtcttttcggcggcgctggatggaatgtgattaaggtaatgtggggatctgattgggacccactgtttgcgattgaccaagagaacgtgattattaaaagactgcatgaaactgttgatggtgaatttcaaaagtacgcggcaacggatgggcaatttaatcgcgaaacattttttaataaatatccggaattgcagaaactcgtctcgcacttgtctgataaggatatcgatcggcttgagcgaggcggacatgacccaatcaaaatttattcagcctaccattcggcggtaagtcataaaggaagaccaactgtgattcttgctcaaactaaaaaaggatacggtatgggacactggggacaaggcaaaatgacgtcccatcaacagaaaaagttagaaaacgacgcattattcgcattccgggatcgtttctccattcccatacctgatgaggatgttgaaaatcttcggttttataaacccgaagaggatacaccggagatgaaatacttacatgagcaaagacataagctcggcggatatttaccagcgcgtatcaagaataaagaaaatttagctgcgccgaaacttaccgactttgccaaactaactggaggttcaggacaaagggagcaatccagcaccatggtattcgtacaaatgctgtctcagctattaaaaaataaagaattaggcaagcgggtagtgcctattgtagccgacgaggcacgtacctttggtatgcaatcattattccgacaagttgcaatttactctccctttggtcagttatatgaccccgaagaccgtgacgaactgttgtattacaaagaagcaaaaaatggtcaaattcttgaggagggaattacggaggcgggtgctatctcatcatggatagccgctgcaacatcctactcaacacacggcactactatgctgcctttttatattttctactcttgctttggttttcaacgaattggtgatttagtttatgccgccggagattcaagagctcgcggattcttgcttggagctacggccg

SEQ ID NO: 857 - DNA, 4000 bp, Escherichia coli
  misc_feature (81)..(81): n is a, c, g, or t
  misc_feature (439)..(439): n is a, c, g, or t
  misc_feature (1092)..(1092): n is a, c, g, or t
  misc_feature (1487)..(1487): n is a, c, g, or t
  misc_feature (1552)..(1552): n is a, c, g, or t
  misc_feature (1718)..(1718): n is a, c, g, or t
  misc_feature (1783)..(1784): n is a, c, g, or t
  misc_feature (1985)..(1985): n is a, c, g, or t
  misc_feature (1989)..(1989): n is a, c, g, or t
  misc_feature (3322)..(3322): n is a, c, g, or t
  misc_feature (3724)..(3724): n is a, c, g, or t
ccccaacctggcgcgacacaccactcctccggtggacggcttgagcttcgcgagagcggacggacggtcacggtcgagggngaggttcgttcgctcggcggatgatccgcctcccgtcgcttcccgcgaagacggtcccgccggcgacgcgcgtcctcgggcgtccgcggggtctcgggaagaaccgaggcatctctcgacgtgcgcgttgatgtcgtgcttcgggacctgtgcgtcgcacactgggcaagcgacgtacctggacttcgtgtccgccagacgccgctgggcgagtgcggacgtcgctccgcccgactgccgtcgtttcatccccggacgacgcgacgcgcacggcagggacgcacgcgccgcgcgcatcggcgagtgtcgttgtgatgcagagtcgccgaaacgcgcgtcggcacttccggggatttgngaagtttccagtcagcatgtgtgaaacacaacgttcgaatggaaacgccaaggtcccccagaccccagcgcgcgacgggcgcagacgacgctgggtctcctgaactatgcgtggcgatagcggagtcgatcgcgccgcgagcgtgatggagtcagcctcgaggtgcgcgccgagaccaccggacacgcgcgcgtgatctggagatattccgtttttcgtgtaccgtttcgttgttgcctcggccttagcgtcccccgtctccgagcctgaccgccacgctccctctccctcgctcgcaggtcctcctcgaacgtagcgtccgacgtgggcgagacggtgaaggacctggcgcggttcgcccccgcggcatccatcgccgtcgcgtccgcgtccgcgttcgtcatcacggcccgcgtcgcgaggcgcgcggcgtacgcggcgggcgtgtcgtgcgcgactcccgtgctcggcacgctgtggggcatcgcctccgtcggcggcgcgagcgcgctcgccggtcaggtggcgcggaccgtgctggagtggccgaacggcgccgtgccccagggcgtgcccgggtgggggggcatgaccctcgggggcctgcgacggccgctggagacgttacacggcacgagacagtttgagcacgncgcgagcgtcgaagcggtgaaggatgccatcttcggctcgctggcgtacgccgtgctcgggcgcggcgtgcagtccgcgctcccgagcgacatctcgcaccccggcgctctggcgaagcgctcgatgcgctccagcggcgcgcactacgcgacggaggcgcagaggcgcacgctcgccgggtggctgcgccgcgacgggtgccaccactgcgggtcgcgcgttgggaaagtggtcggtgatcacatgccgcccaacaagatggcgttcgggtcggcggcggcggcgcaggcggcgcgcgaggggtcgtggaagaccaggctgtggaacttcctgcgcatggtcccgaagcagaggttctacccgcagtgccggccgtgctcggacgtgcagtccnccgcggtgcgcacggggaaaaagattctcgtgcggcacaacggaggcgccaaggtgggcgccgcngtcgccgtcgccgtcgccgcgaggcactacgccatgaagcaccacccggaggagtacgggaagctgcagaagaaactcgaggggttcccgctgctcatcacgtgagacgcgatcgatcgattggccgtacagcgaggagtaccgaggcggagtaccgaggcggagncggagtcggagacggacgtagtctgacttgtattattaatacgtacgcgtgtaccatcataactnnctacgaactcgttctatcaatacacctatacgagcctaactacttgagcgccttgacttgctccacgacgagcgcctcgaaggtttcgcgcacgcccccctcggtctgctccatcggcaagtgtgcggcgctcggcaggagctcgaaccgcaggttctccggtcgaacgcccgatcgcgccagcgcgtcccgcagactctncgcnagacgcggaggcgtggtctcgtccttcgcgcccaccaccactagcgccttgaacggctttttgtccttcaaatcatcgtccttcaaatcacacagcctcggcatctcgcgccgcagccgcgcgccgtcgccgccgaaaccgccgagtccggcgcggaacagctgcagcagcccgacgtcccacccctcggcgagggtggggcgcacgtacgcgtcgcgggtttcgcggtccaggtcgccgtacgtcgcgccgctctccacggcggcggtctggcggcgcaccgagccgcgcacgacgttcagcccgggcccgttttgcgagacgaggaagcggaaccacgcgaaccgaagcgcgcggtccagtgggagcttcagcccgccgccgccgctcgagtttagggagcccgttttcgtttcgggatgttcggaatccgcctcgccctcgggcgcgtccccgacgaacacggcgggcgcgatcgcgagcagcgccgcgcaccgcggcgggtcgagcaaagccgcgtccagcgccacgggcgcgcccgcggagtggcccagcaacgccgcgcgctcgacgcccagcgcggacatcactttcaaagtcagctcggcggcgccctccgcgctgtacacgcggtggaacgactcgggcctgtccggcggcggcggcgggcgcgacgtcagtccgtacggcgggcggtctatggcgatcgtgcgcacgtttgcctccgccgcgacgcgcggaagcaggtgccggaacgagtacgtcgagccgttcgcgccgtgcatgcacaccagggcgtcgacgttttcgttcgcgcccgccgccgccgcggaggaggcgggcgggaggctctctttgtagtgcacgcagatgggcacgccgtccatctcgacggtgacgaacttggagtccgcgtccgcgagcgaagagggggggacgaggccctggagcggtttcgggtccggctcggagaagggctccaccacgagctcgtcgaagtccttctggaccttcgtgcgcccggcgtcgagcagcgaccgaacgaggtccgcgagcagatcgtctttcgacgcgcgcgcaaccgtcgatcgacgcgaaccgcgggtcggcgcgcggcgcgcggcgcatcgcgccgcggcgcgaggcccgcgcctcgagggcgtcgcgccactcggacgacgcggggagcacgccgcgctgtccacggcgtgaagcatcgcgcgcatgtcggtggacgcgcgcgtgcgttatgatgatgccacgacagtcgacgtggagacgtcagagcaagcgcgtgtgtgacaagtcagcggacgagcacttcccacacatnttcgaaacactttttcggctttcccgagacccgagggggcttcagaggcgcgggcgcggcgtgcaatgcccgcgcgtcccctccccgtggataccgcgggtgatggcgacacccctccgacgctcgcgcggagagaagagaagcgcgcgcacgtcccccgcgaggaatggcgcaggcttcaccccaaaccccctcgcgaaaaaggttcgggcgatgatttcggggcgaaaggagggcccgcgcgcgcgcgcctcgtgcgcggtgttctgcgcagccaggctgagctggaagtggcgagcccccgcaacttgaagctgtggggcttggattcggtggaggcgtacttcgagaccgaggaccgaaggacacaggctaaggtgtcgttggacgccttgcttcggnatcccgaaatctccccggctcgaaagcacgacgccgcggcgcggcaccacgtcgtctggggccgctcgacgttcgcctgcgccgagtgctggctcttgaaagggaactgcgtgtgccggtcactcgtcaaagcaacgaaagccgctcgtgaaagcagcgaaaggtcgcgtgttgaccgcgatcgggtcacgatgtctccgccgtacgcgcgggtcgtcgcgtacgcgcaccaaaacgaagtggcgcgcgggaacagcacggggaacttgatcccgg

SEQ ID NO: 858 - DNA, 4000 bp, Escherichia coli
  misc_feature (1507)..(1507): n is a, c, g, or t
  misc_feature (3358)..(3359): n is a, c, g, or t
  misc_feature (3363)..(3363): n is a, c, g, or t
  misc_feature (3892)..(3892): n is a, c, g, or t
  misc_feature (3921)..(3921): n is a, c, g, or t
gaaccaccggtcgtgcgagatgcacatcgtgacgccgttccaggacatcaccgcctcttccagcgcgcgcagcgtggtgacatccaagtcgttcgtgggctcgtccagcatcagcacgttcccgcccgacgtgagcgtcttcgccagctgcaggcggttgcgctcgccgccggacaagtcgcccaccttcttctgctggtcggagctcttgaagttgtaccacgagcagtacgcgcgcgcgttgacggttctgctgcccagggaaatttcctccgcccccccgctgagctcctcgaacaccgtcttgtccgcgttcaggcttccgcggtcctggtccacgtacatcagcttgacggtctcgcccaccgtcaccgtcccggcgtccggcgcgtcgacgccggtgatcatcttgaacagcgtcgtcttgcccgcgccgttagcgccgacgatgcccaccaccgcgcccgcggggatgatgcagtccaggccctcgatgagcagaccgcgcccctcgtaccccttcgagacaccggacacggtgatcacctccgaccccaaccgaggcgccgcggggatcgtgatgctgtccagctctgcgcgcgcggtgaacgcgttcgccgcgtcgcacagctcttcgtacgcgcgcagcctggctttgcccttcttctgctggcccttggcgttggagcgcacccactccagctcctggttgatcgtgcgctgcagcgagtcttgtttcttcccctccgcctccagccgcttggacttcgagtccagccaagtcgagtagttgccctcgaaggggatgccctcgccgcggtcgagctccaggatccaccccgcgacgttgtccaggaagtaccggtcgtgcgtgatggccaccaccgtgccggggaaactcgccaggaactgctccagccacgccacggactgcgcgtccaggtggttcgtgggctcgtccaagagcaggatgtcgggctgcgcgagcagcaggcggcagatggcgacgcgtcgcctctcgccgccggacaggttcttcacgagcgcgtccccggggggacagcgcagagcgtccatggcgcgcgacacggtgcggtcaatctcccaagcgtcggaggcatccagcttggtctgcagcgcgtccatgcgcgccatgagcttgtccatgtcgcagtccggctcggccatctgcatggagacgtcgttgtactccgccaagtcagccttgaccgccttgacgcccacctcgatgttctccatcaccgtctcgccgtcgtccagcggcggctcctggggaaggtacccgactttgatgccgtcgtcgaggtgtatttcgccgtcgaaatccttgtcgacgccggcgaggatcttcatcagcgtggacttacccgcgccgttcgcgcctaaaataccaatcttcgcgccgaggtacatcccgaggttaatgttcttgatgagctccttgccgttgggagtgaccttgcgcaccttgccgagagacaagatnattttacgcgtctccgtctggtacgccgagccctccttgaccttcccgggggacttgtggccttggttgccgccggtcttagcgccgccgccgccaccaccgccgccgccgccgctcttgcgcttgtccttcttgcccgcgcggacgcacaaatcgccgcgacgcgcggacgagcggcgcgcggtcgcgccggggaggcgcgcgccggcgacgccgtggcggaaatcgaaacccacgggcgactgggacgcgacgtggggcaccgccgaggcgcgcgcgccgcggcgcgccgagccgacggcgcgggggacggcgagggggagcgatgagcacacggaagccatcgtgggagagatcgcgagggggaaaggacgcgagctccgcgcgaccgccagtgacgaaagccttccctcgtcgctttatccgtcgccgtcgacgcgaaaagcgagcgacttcgccgccgacgcgcctgcagctgagcgcaaagccgtcggcaaaccaggctttcggagttccgaaaacgagccgcggaccgcacgcacagcacaattcacgacgcgatccgctagcatggccggcacgcgttcgaccgcggcgaaagcggcggcggaggagaaggcgatggacgattcgcttcacgtcgccgccccgctcgcgcacttggcgctcatagccctcgcggtcgcgccgctatttaccgcggtggagacgaatctgaacatcctcggcaccgcgacgttggctgtgttcgcgggggcgcaccgctccgtgcggccggtcgccgcggggaacaccgaggccatgaccaagcaggacgccatgcgcttccccctgatcggatcgtgcgtgctgttcgggttcttcctcctgttcaagttccttcccaaggacctggtgaacaagctcctgacgggatacttcgtgctgatcggcatcttcgcgttaaccggcacgctcgcgccggtggtgggcgcggggatgccccgcggcgtggccacccgggcgctgtacttcgggacgtgccccaagatcccgctcctgatggacgagcccacgcgcgtggagctgagcgtccccgagctgctcgcgggcgccggcggcgtcgcgttctgcggatggtacgtcgccgagaagcactggctggcgaacaacgcgctcgggctggcgttttcgctgcagggcatcgagttcctcaccctggactccgttcagatcggcgtgatcctgctcacggggctcttcttctacgatatcttctgggtgttcttcacgccggtcatggtcacggttgcgaaatcgttcgacgcgcccatcaagctgctgttcccgcgcgccgtcgcgccgggcgcggacgtcccgccgttctccatgctcggcctcggggacatcgtgatcccgggcatctacgtcgcgctgacgctgcgcatggaccacgcgcgcagggcgagggcgctcgcgaagggcctcccggcaccgcccgcgtacttcaacgcggtggtcttcgggtacttcgcggggctcgtcgcgaccatcgtcgtgatgcacgcgttcaaagccgcgcagccggcgctgctgtacatcgttcccggcgtgctggccgcgacgttcggccgcgcgctcgtcggggggggctggcgcgagatcaaagccgtgtgggggttcgacgaggccggggaggagctcgaggaggcccaggaaaagaaggccaagtgaagcgcgagccgagcgcgtaaaagcgcgtaaaagcgcgaaacgcgcgtacgaaagtacgtctctttttggaccgtctatacagtacgtactagcgagcgcgcgtctgtgagacgcggtaaaagccgatgcgcgttcgtnntttngttctgcgtttagttctgcttcggtcccctggcgtacgccatcgccgccgcctccgtggcgctcctcgcgccgaacccgcccccctgtcctctctgcgcgccctgcggcagcgccgtgagcgccgccgcgaacttctcgcgcgcaaactcgacggcgtcgcgcgcgcgccgcgcgacgacgtccccgacgctcaccctcgtttcgtcgatgtgcctgtcgatggcggtctcgtgcctcgccaggaacggtgcgacgaacgcgtcgtacacgtacagcgcgccctgcgtgcgcgggtgccacaggtacaccacgaacgccaccttcgcctcgctgtacatgggcagccaaaacacgaaccgatccgaaacctgcgtcccggcggtgtacagcgccatgaccgtccagtagatgcaccagccgcgcagcgcctcgggcttgcgtttgtgcttctccaacgcctgcgggtcgcgggtcgcgggtcgcgggccgttcggaaaaggagaaacggggaggaaggcggtcagaacncgccaccgcgagcgccgcgaggtggagtngagggggaagacatctggaagtccggccgcgctcgggacgggggacgggacgggaggcgcaccttgaagcacaggtacg

SEQ ID NO: 859 - DNA, 4000 bp, Escherichia coli
  misc_feature (206)..(206): n is a, c, g, or t
  misc_feature (1986)..(1986): n is a, c, g, or t
  misc_feature (3428)..(3428): n is a, c, g, or t
gattctcgttccagaacgccacgtgatgcagcaccgttcccggcacggagtttccgcccgcatcgactagcttcgggtgatacgccagcagccagccatcgaggggcactgtccaaatcaggtccggcggctgcggcattttcatgtgcgaggtgtgcgccggcaaattcatgggacccacgcgaagcgtgattgtatgcgtggcnatgtcgaaattcggatcgagcttgacccccttcgccaccgcgtggtgcatgccttcctgcatgaatccatgatgctcgtgctgcatgggcatcggtttcgctgcgccttccgtttgtttttcctgggcgagggctgcgctcgcggccagcaaaagcgttccgcaaatggctattgttttgattatttctttgatgaccgttttaatcattggacttctccgggtattccatctcttggaccggaccttctttcatcatactcccggccggatatgacggaatgaatcgccgtaagcgaattgttctgcgtgaactccatgcggaaagcagatagtatccgggcaatgaaaattcacgaacgcattaagccgcacttcggcgtcgttcttctgttctgcctgtgtttcggcgcagcgagccacgcgcagaagcccacagcgagcgaccagttggtgctcagcaatgtgaccgtcgtcgatgttcgtacgggcgctttgcatgcggaacaaaccgtagtcctcgaaggcaatcgcattgcttccgtggaaccgagcaaatcggcgaagcatccgcgcaatgcgccgatcgtgaatagccgcggccttttcctcatccccgggctctgggacatgcacgtgcacctggtgtttggcgactggtttccggatgcgcgagatatttcgctgccgctcttcatcgccaacggcgtcaccggcgtgcgggacatgggcagcgagctggacatcgtgcaggcatggcgcaacgaaattgcggccggacgcctggtcggcccgcgcatttacacctccgggcccatgctggatgggcccaggccccgctttccgagttccgtggcgattgccacaccggaagatgcgcatcgcaccgtcgcggatctcaagcgacgcggcgcggattttatcaagctgcaatcgctgattccgcgcgaagcagtttttgccatcgcggaagaagccaggaagcagcagatacctttcgagggacacgtgcccgactccgtccgggcgagcgaaatgtctgaaacgggcatgaaaagcttcgagcacctcatcggcatttttgaagggagctcgcccaacgaggacgatttcttgaaaggggacaagacagaagggaagttccttgcgacttacgatgcggcacgcgctgctgcgctggcggcgattctggcgaagaatcagacctggcaatgccccacgctggtgtgggaacgcggcggcaacctcgtcgatgtgagcgacttcagcaaagacacgcgcgtgaaatacgtgccggcagcatggaagaacaaaacgtggaaacgattcaccgatgaaatcacgcaaggctacggcacggatgatctcgacacgcgcaaacaattcatcgagagagaattagaagtcgtgcaaatgctgcgcaagaccggcgtgccatttctagccggaacggatacgcccgccggcgtccatattttccctgggttcagcttgcatgaagaattgcagcgattcgtggccgcgggtttcactccgctggacgcgctgcaaactgcgacgatcaatcctgcgcgttttttgggaatcgaagaccaggccggaaccgtcgaaaaaggaaagctcggggaccttttgctgctttccgccaatcctctcgaagatattgccaacacgcaaaagatcgcgggcgtcgtcgttaacggccgctattacagccgcgccgagctcgataagatgctcagccgcgtagaaatcgccgcggacggcccgagttcgcaagngataaaatgaataagtattcgtcgcaataatattgtgccgttcgtttttaatatttttttcacggagtagcctcttgacagcagaaccaagcaggcgtaagaaaacaactattggggtagggatttcaaagacttgagggaaccggcgtgttccgcaaccgcgacttccgctgttgaagtgtgtcgtaaaggaggttgtatgcctgcaaaccagccaagcgaggcacttcgcgcactttgttatgagcaccacgtggagatgaggctgaagcaaaacttttccaacggcgagcaaaacaccaggaaaactgcaatgtttgcttgtccggaggccagttgcctcgtccactacagcatctctggtggatatttcctggcaagccaaaacggacatagaaatgatttggaagtgattcccgcagtgcggtgcctcgacgacgggacgcccatgtaccttgccgaaatcgatttggacaagagggactatcgtttgtggatatgcccgcaatgcggcggcagacgcacgcatgagcaaggcttagtaggcgtggcgtcgcggggaaatcaggatgtcagcgggcaacgcgaagcagaatcgcaaactccgtaaagcttcaacacataatcttccggcatcattctcgcaacgaattaattcggtttgctccattcttttcccggcgatacgagttccagcccaacagcatacttctgtttttccacgcgttgacagtagacgacccgcgcttcggaatggatgccaagctcgggagaggtcagcagaacgatagaccctacgctccacacgtgttctgtcgccacgcgtatcccgcgcgcacttatgttttccgcaacggccaagctctacaatggctctttttgcgatccgcgggcgagatcggctagagcgctctggcataagataccgactcctgtagcgggagcctccatgggaggcggcacggagtcccggtgagggctagaggataatagtatgtcgcactgccactttgttgggtagcccctccgcgacttcgcaaaacatggcgtgtgtggccgtgtcgttggtagactttcgtgcacttcgaggtgcctgcgaaatgaagctgattcgattcggcgagatgggccgcgaaaagcccggcgtactacttgaggatggaacacggctggacgtttccggatttggttcggactacgacgaggattttttcgcgggcagcggaattgccaaacttcggaactggctggcgaggcaaggcgcttcgtcgctacgagtgcgggaatcggtgcgattggggccgccgatttgccgaccgagcaagattgtgtgcatcggactgaatttccgggaccacgcgcaagagagcggaatggaaattccgaaagagccggtgatttttttcaaggcgacttctgcgctggtgggaccaaatgatccnctggtgattccgaaaaatgcgacgaaagtggactgggaagtggaattggcggtcgtgatggagaaaaaagcgagttacgtcagcagagaaaccgcgatggatcacgtggccggttttgcgctgcacaacgattattcggagcgcagctttcagctggaacgcggagggcaatgggtaaaggggaagagcgcgaattcgttcgcgccgctgggaccgttcctggcaacaaaagacgaaattcgagatttcaatcagttgggaatgtggttgaaggtgaatggggaattccggcaaagaggttccacttccaagatgatttttgatgtgccggcgctagtggcgtatatcagcgaattcatgacgctgctgccgggagacgtgatcagcacggggacgccgccgggtgtgggcctggggatgaagccgccgcagtatctgaaagcgggcgacgtggtggaattggggatcgatgggttaggggagtcgcggcaggaagttgtggactaccgatgagagagaattcggggccggcggaaacattgcgatcagttttgatgcgagccgagagcgat

SEQ ID NO: 860 - DNA, 4000 bp, Escherichia coli
  misc_feature (829)..(829): n is a, c, g, or t
  misc_feature (1464)..(1464): n is a, c, g, or t
  misc_feature (1988)..(1988): n is a, c, g, or t
cgggttcgggtgagttcaccatcatccggatcaagctccttgtgcagaatcaggaatcgcttgatctgagaggctgataaatgtgcatccgaggcaagactttgattgacctgctcaatgcactcctgaatcaactggtaaacctgggggtgagccgcaagctcctgataacttgcgtaggagacgttattgcgctcggcccaattgccgaccgcatcaagatcaatatttacaaaggccgttacaaagtcacgaccatctccaaacgtcacgacttccttgatctccgggaagaatttaagtttgttttcaagaaatttaggcgcgaacatgctgctgtcagtcaacttaccgacatcctttgcccgatcaataatgcggagatggccttcgccatcgatgtagcccgcatcgcctgtgcgaacccagttgtcgtcggttttggtttctgaggttgcctctgcgttcttgaaatattcaagaaataccccgggacttctatacaagacctcgccgttgtcctcaatgcggagctcaacgccaggtggaggtgtacccacgctttctgaacgaacgaggccgtcgggctgcatggtgatgaataccgtggcctcggtctgcccgtacaactgcttgaggttaatgcctatagatcgataaaaatcaaaaatctcggggccaatcgcctctcccgctgtgtaggccacgcgcacgcggcccagacccagcgtatttttgagcggcccaaaaatgagcacctcgccaagcgcgtatttgatgcgatccataagcggcacggatttgccatccatcaagtcgacgccagtcntctttgcgaccgccatgaagtagttgaacaggcgctgcttgaacgggccagcatccttcatgcggatcatcacgctggtaagcacgctctcaaaaacgcgtggtggcgcaaaataataggtcggaccgatctcgcgaaggttctgcgcaacggtgctcgaactttcgggacaattaacgcaaaagcctgcgacaagccccatggcaaacgagaacgcgttatcacccacccacgccatgggcaggtaggccagtgtttcttcgtcggccgtaatattgtcaaaggcgtttgcgttttttgcggtgacgactaaattttcatgcgtcagcacaacacccttgggtcgaccggtcgtccccgaggtgtagagaataatcgccggatctgaaagccgtccggcagcgatctcttgatcgacaaggtcgggggttttcgcgagagcatttcgaccgcgcttcataacctcctgaatatccaccacaacattgggatcgtattttcgcaaccctttcgggtcgcagtagatgatcttttcaacgcgcgggcagtgctcttttatttcaagtgacttatcgacctgctcctggttttccgcaacgataaagcgagcctctgcatgctcgacaacgtattgnatttcttcagccactgagtcctggtaggcaggaacgggaataccgcccaacgactgcaccgcgagcatggcgccatagagtcgggggcggttgtcgccaatgatgacgagggtttcgccacgttgaaaaccgaggtcagaaagaccggcagccagcgccgtcgcctcgttacagaattcgttaagcgtccaggtctgccagatcccatacgctttttcgcgcattgcgggacgatcgccatcacgctgcagtcgaactttgagtagctgtgggaacgttcccatcagcgactcagtggaatcgctcatatcctcttcctcatatcagatcgcggtccgactctcttcggcccagaatggttgggcgacggtgaactcgcggagaatctcctcgcaagaagatcgaaattgattatgaggaattcgttaattgagcgcaaaaaattcggcgtgacgataatctcttaaaaaaaaagagggaacttaagaggcggcagggttgccacagatggctccgaaaatatncggaattaagggttttccctatatcagcaggttcggactgctgtaggcggccgtgatccgtcctcagcgaaccacgaaccctagcctcgggacggtcaggtaacccgtggcatcttcaaagctcggaatcatatcctccggaaccgtcatgtccgcccagactgggatcaacagattcccgtccggatctggtgattcccgaaaatggatttcgattactcgatcgccgataaattccacattgaggacttcggcatccttgagttcctcaaggccctcaagagcaggcgcgtcggtccgaatccagcgattgaatcgactgaggttgagctcatcatggaatccttcgaaagcggtcgttgcatgccaaccctcttcccatttataggtcgcgctgatatgccgcccctcgaaccattcacaccagaagtatccgggttctaccgcgcgattattccccgcctcgatccattgcttcctggcgccgacccccatgccggcaaggttcatcacggggcgcacgcagtaccaattacttgtatctggcgcgacaccggccgggccgcaccggtaaccgaacgctaacgaaacaaataatttgttgaaccagtggtggaactggggaaattttttccacgccaacgcatcaggctcttccataacggaacgacgctagcagttcaactttgcgggagtgaataaatcgggcttggactggcggtgggctggtaattcgcgggccgtcttcaggagtttaatcgtgacccggtagcgcacgttttatttgatcgactagaacgggatatcgtcgtcaaaatctcccccgggggcagcgtcagcctggccgtaatcgggcggcgcgctgctgggtgcatcgccaccgcggccaccgagcatctgcatatccgtagcaactatctcggtggtgtacttttcattgccgtcgcgatcctcccacttgcgggtttgcagacgcccttctacatagacctgagagcctttcttaagatattcccccgcaatttcagcaagacgtccgaagaacactacccggtgccattcggttttctcctgtctctcaccggactgcttgtctttccagctatcggtcgttgcgagcgtgacgttggcaatcgcgttgccatttgcggagtaccgtacctcaggatcgcgccctaaatttccaaccactattgccttgttgattcctcttgccataccttgatcctgcctatactttcgatgcgtgttctgtgttgttttgatttacccgtccaaacgagcctgtttcgccagtggtgacgaggtaacgctcggaataagtataccgccggcggcccttctgtcatctattgccggtgtgattatttttactgacgcacggccttctggcgtgatcggatgtcggagcgagtttggattgacggggtctggcgaattgtctataaccgacggagcgaacggtctttttgtgccggccagtcaacacacgatttcactcaagtgagcgcactcggagcaggaatgggagaaaccattgccatagacatccagcatgtctcgaaaattttcggtgcgcagtccgatcaagaagtgcgagcgcttgacgatgtctcggtggcaattctccagaacgagtttttcacgctgctcggcccatcaggctgcgggaagaccacgctgcttcggctgattgctggattcgagcagcccacaaacggatccattctgcttgagggcgctgagatcagcacgcttccgcctttcgagcgcccggtcaacactgttttccagaattacgcgctctttccgcacatgaccgtggctcagaatatcggcttcgggctggagatgcaggcccgctccaaggacgaggtgacctctacggttaccgagatgctcgacctcgtgcgcatgggcgcgctcaaggaccgccgaatcgaccagatctcaggcggtcagcaacagcgtgtagcgcttgcccgagccttggcgcctagacctaaagtatt

SEQ ID NO: 861 - DNA, 4000 bp, Escherichia coli
  misc_feature (1986)..(1986): n is a, c, g, or t
  misc_feature (1990)..(1991): n is a, c, g, or t
  misc_feature (2004)..(2004): n is a, c, g, or t
  misc_feature (2015)..(2015): n is a, c, g, or t
  misc_feature (2466)..(4000): n is a, c, g, or t
taacgtagtggtaaagaaattagagcagaagcaacacctccattgctgtaagcaaaagcgtcagtatcagttcctgttgctctagatagcgccgctctttgaaaaggaatgttcttttcttcagctgtttctgtaattaaatctctaagtttttgctgaacagcaggagcataggcaataacagggccttttccgttctcaatatgaccttccttctttttatctatcattggagtagtggtgtcatgagtcacatcagtaactatagctagatttggttttatagtatgtgatatcatctcagcaccgcgtaatccaatttcttcttgaacagaattggtgatgtaaagcccaaatggaagctgttttttattttcataaattagtcttgcaacttcagctatcataaagccacccattctgttgtctaaagctctgcaaacaaaatttgattcatttagtatatgaaattcatctggataggtaattacacagcctacatgaactcctaatttttcaacttcttcttttgttttacaaccgcagtcaataaaaatattttcaggtttaggagcttcttcattcgctttatttcttgtgtggattgcaggccaaccgaaaattcccttcacaactcctttcttagtatgaatatttacaattttactcggagcaatttgatgatcactaccaccatttcttatcacataaattaaaccattatcagaaatataattaacataccaagatatttcatctgcatgaccttctataactactttgtatttagcttcaggattaattacagctacggctgaaccataggtgtctgtgataaattcatctacatatggttttaagtaattcatccatattttttgcccttcccattcataacctgttggtgcagcattatttaaatatttttctaaaaaggaaattgattttttatttaatattgattctttactcataatatattttctgtttctgtaaaaataaaccatttctcacaccttaaaaacaattagtaaaacttattgtaaattttatgaataatttaccattgaacgtatcatctgtgatgtattaagttttgttaattgtaatatctttgtaataaaaatagaaccttttgaaaaaaatattttttcttttactttttcttcctttaactttagtagcgcaaaaaaaagattcagctccactagatttagaagattatctcttggttaaaagaggggataccttgactatagctttagatgaaatcgctattctaccaaaacatgattttaattcacctacagatgcccgttactattattggtttaagagaaaagtatttaaagcatatccctatgctaaaacagcctcacaaaggttggattcgttaaattctagattaaaaagaattaaaactaaaagagggaaaattaagtataccaaaaaagcacaaaagtatcttgaaggagaatttacagatcaattaaaaaaaatgactcgtacagaagggagaattctaataaaactaatctttagacaaactgggaaaactgccttcaataatattaaaacattaagaagtggatggaaagccttttggtataatacaactgcaaatttttttaaactttctcttaaaagtgaatatcatccagaatcaataaatgaagattatttgattgaagatgttcttcaaagggcttttattgaagaaagattagtggatcaaaagtcaaaacttactattgattttccaaaaatagcagctgctaaaaaaggcaaaataaatgtagaagtgtataaattgatgtttgcgaagaataaaaagaaggcttctaaaaaaaataacaaacgctaacataaaggtttttagtttattagaactaatgttatcaattctataaaaatatttcatttatttcttgtttaggttttcaaataaactgtatctttgcgacccgttttggggtataggtttcnagcnnatttatatttagnagttgtttgangtattggattgcaaaaagattaaaaaaaagattatttttttcttgttgattagaaaatagtttttacatttgcaaccgcttagaaaaacaagcgaagttcacagaggttttggaaggcatttaaagatagaaaatgttgttagttcgagtctaacatttctacaaaaatttagggggattattggttgagattacaccgatttaagatctttagatgagttcattgaaaatattgaaattgacagcgtaaacaaagagtaaagtaaccatgtttaacttcgttaaacaaattcttttgaaacttattcatacatattattaaaatatacaatgaagagtttgatcctggctcaggatgaacgctagcggcaggcttaacacatgcaagtcgaggggtaacaggagtgcttgcactcgctgacgaccggcgcacgggtgcgtaacgcgtatnnnnnnnnnnnnnnnnnnnnnnnnnnnnnnnnnnnnnnnnnnnnnnnnnnnnnnnnnnnnnnnnnnnnnnnnnnnnnnnnnnnnnnnnnnnnnnnnnnnnnnnnnnnnnnnnnnnnnnnnnnnnnnnnnnnnnnnnnnnnnnnnnnnnnnnnnnnnnnnnnnnnnnnnnnnnnnnnnnnnnnnnnnnnnnnnnnnnnnnnnnnnnnnnnnnnnnnnnnnnnnnnnnnnnnnnnnnnnnnnnnnnnnnnnnnnnnnnnnnnnnnnnnnnnnnnnnnnnnnnnnnnnnnnnnnnnnnnnnnnnnnnnnnnnnnnnnnnnnnnnnnnnnnnnnnnnnnnnnnnnnnnnnnnnnnnnnnnnnnnnnnnnnnnnnnnnnnnnnnnnnnnnnnnnnnnnnnnnnnnnnnnnnnnnnnnnnnnnnnnnnnnnnnnnnnnnnnnnnnnnnnnnnnnnnnnnnnnnnnnnnnnnnnnnnnnnnnnnnnnnnnnnnnnnnnnnnnnnnnnnnnnnnnnnnnnnnnnnnnnnnnnnnnnnnnnnnnnnnnnnnnnnnnnnnnnnnnnnnnnnnnnnnnnnnnnnnnnnnnnnnnnnnnnnnnnnnnnnnnnnnnnnnnnnnnnnnnnnnnnnnnnnnnnnnnnnnnnnnnnnnnnnnnnnnnnnnnnnnnnnnnnnnnnnnnnnnnnnnnnnnnnnnnnnnnnnnnnnnnnnnnnnnnnnnnnnnnnnnnnnnnnnnnnnnnnnnnnnnnnnnnnnnnnnnnnnnnnnnnnnnnnnnnnnnnnnnnnnnnnnnnnnnnnnnnnnnnnnnnnnnnnnnnnnnnnnnnnnnnnnnnnnnnnnnnnnnnnnnnnnnnnnnnnnnnnnnnnnnnnnnnnnnnnnnnnnnnnnnnnnnnnnnnnnnnnnnnnnnnnnnnnnnnnnnnnnnnnnnnnnnnnnnnnnnnnnnnnnnnnnnnnnnnnnnnnnnnnnnnnnnnnnnnnnnnnnnnnnnnnnnnnnnnnnnnnnnnnnnnnnnnnnnnnnnnnnnnnnnnnnnnnnnnnnnnnnnnnnnnnnnnnnnnnnnnnnnnnnnnnnnnnnnnnnnnnnnnnnnnnnnnnnnnnnnnnnnnnnnnnnnnnnnnnnnnnnnnnnnnnnnnnnnnnnnnnnnnnnnnnnnnnnnnnnnnnnnnnnnnnnnnnnnnnnnnnnnnnnnnnnnnnnnnnnnnnnnnnnnnnnnnnnnnnnnnnnnnnnnnnnnnnnnnnnnnnnnnnnnnnnnnnnnnnnnnnnnnnnnnnnnnnnnnnnnnnnnnnnnnnnnnnnnnnnnnnnnnnnnnnnnnnnnnnnnnnnnnnnnnnnnnnnnnnnnnnnnnnnnnnnnnnnnnnnnnnnnnnnnnnnnnnnnnnnnnnnnnnnnnnnnnnnnnnnnnnnnnnnnnnnnnnnnnnnnnnnnnnnnnnnnnnnnnnnnnnnnnnnnnnnnnnnnnnnnnnnnnnnnnnnnnnnnnnnnnnnnnnnnnnnnnnnnnnnnnnnnnnnnnnnnnnnnnnnnnnnnnnnnnnnnnnnnnnnnnnnnn

SEQ ID NO: 862 - DNA, 4000 bp, Escherichia coli
  misc_feature (1)..(2): n is a, c, g, or t
  misc_feature (5)..(9): n is a, c, g, or t
  misc_feature (11)..(13): n is a, c, g, or t
  misc_feature (15)..(19): n is a, c, g, or t
  misc_feature (21)..(23): n is a, c, g, or t
  misc_feature (25)..(29): n is a, c, g, or t
  misc_feature (31)..(33): n is a, c, g, or t
  misc_feature (36)..(39): n is a, c, g, or t
  misc_feature (41)..(41): n is a, c, g, or t
  misc_feature (43)..(43): n is a, c, g, or t
  misc_feature (45)..(49): n is a, c, g, or t
  misc_feature (51)..(56): n is a, c, g, or t
  misc_feature (58)..(75): n is a, c, g, or t
  misc_feature (78)..(80): n is a, c, g, or t
  misc_feature (82)..(83): n is a, c, g, or t
  misc_feature (87)..(87): n is a, c, g, or t
  misc_feature (89)..(90): n is a, c, g, or t
  misc_feature (92)..(92): n is a, c, g, or t
  misc_feature (95)..(98): n is a, c, g, or t
  misc_feature (100)..(103): n is a, c, g, or t
  misc_feature (106)..(109): n is a, c, g, or t
  misc_feature (112)..(117): n is a, c, g, or t
  misc_feature (120)..(122): n is a, c, g, or t
  misc_feature (124)..(126): n is a, c, g, or t
  misc_feature (128)..(132): n is a, c, g, or t
  misc_feature (135)..(135): n is a, c, g, or t
  misc_feature (137)..(137): n is a, c, g, or t
  misc_feature (141)..(141): n is a, c, g, or t
  misc_feature (143)..(149): n is a, c, g, or t
  misc_feature (151)..(151): n is a, c, g, or t
  misc_feature (153)..(153): n is a, c, g, or t
  misc_feature (157)..(160): n is a, c, g, or t
  misc_feature (162)..(162): n is a, c, g, or t
  misc_feature (166)..(167): n is a, c, g, or t
  misc_feature (169)..(169): n is a, c, g, or t
  misc_feature (171)..(173): n is a, c, g, or t
  misc_feature (176)..(183): n is a, c, g, or t
  misc_feature (186)..(187): n is a, c, g, or t
  misc_feature (190)..(190): n is a, c, g, or t
  misc_feature (192)..(193): n is a, c, g, or t
  misc_feature (198)..(198): n is a, c, g, or t
  misc_feature (203)..(207): n is a, c, g, or t
  misc_feature (209)..(210): n is a, c, g, or t
  misc_feature (212)..(214): n is a, c, g, or t
  misc_feature (217)..(219): n is a, c, g, or t
  misc_feature (221)..(223): n is a, c, g, or t
  misc_feature (226)..(226): n is a, c, g, or t
  misc_feature (228)..(230): n is a, c, g, or t
  misc_feature (232)..(232): n is a, c, g, or t
  misc_feature (235)..(237): n is a, c, g, or t
  misc_feature (239)..(243): n is a, c, g, or t
  misc_feature (246)..(247): n is a, c, g, or t
  misc_feature (250)..(252): n is a, c, g, or t
  misc_feature (254)..(255): n is a, c, g, or t
  misc_feature (257)..(259): n is a, c, g, or t
  misc_feature (262)..(262): n is a, c, g, or t
  misc_feature (264)..(264): n is a, c, g, or t
  misc_feature (266)..(268): n is a, c, g, or t
  misc_feature (271)..(271): n is a, c, g, or t
  misc_feature (273)..(274): n is a, c, g, or t
  misc_feature (276)..(276): n is a, c, g, or t
  misc_feature (283)..(288): n is a, c, g, or t
  misc_feature (291)..(291): n is a, c, g, or t
  misc_feature (293)..(294): n is a, c, g, or t
  misc_feature (296)..(296): n is a, c, g, or t
  misc_feature (298)..(299): n is a, c, g, or t
  misc_feature (301)..(303): n is a, c, g, or t
  misc_feature (306)..(309): n is a, c, g, or t
  misc_feature (312)..(315): n is a, c, g, or t
  misc_feature (318)..(318): n is a, c, g, or t
  misc_feature (320)..(320): n is a, c, g, or t
  misc_feature (323)..(325): n is a, c, g, or t
  misc_feature (327)..(327): n is a, c, g, or t
  misc_feature (330)..(331): n is a, c, g, or t
  misc_feature (333)..(335): n is a, c, g, or t
  misc_feature (338)..(340): n is a, c, g, or t
  misc_feature (342)..(345): n is a, c, g, or t
  misc_feature (348)..(348): n is a, c, g, or t
  misc_feature (350)..(354): n is a, c, g, or t
  misc_feature (356)..(357): n is a, c, g, or t
  misc_feature (359)..(361): n is a, c, g, or t
  misc_feature (363)..(363): n is a, c, g, or t
  misc_feature (365)..(366): n is a, c, g, or t
  misc_feature (368)..(368): n is a, c, g, or t
  misc_feature (371)..(372): n is a, c, g, or t
  misc_feature (377)..(380): n is a, c, g, or t
  misc_feature (382)..(395): n is a, c, g, or t
  misc_feature (397)..(399): n is a, c, g, or t
  misc_feature (401)..(407): n is a, c, g, or t
  misc_feature (410)..(411): n is a, c, g, or t
  misc_feature (416)..(423): n is a, c, g, or t
  misc_feature (425)..(426): n is a, c, g, or t
  misc_feature (428)..(432): n is a, c, g, or t
  misc_feature (434)..(434): n is a, c, g, or t
  misc_feature (436)..(439): n is a, c, g, or t
  misc_feature (441)..(441): n is a, c, g, or t
  misc_feature (443)..(444): n is a, c, g, or t
  misc_feature (446)..(447): n is a, c, g, or t
  misc_feature (451)..(451): n is a, c, g, or t
  misc_feature (453)..(453): n is a, c, g, or t
  misc_feature (455)..(455): n is a, c, g, or t
  misc_feature (457)..(457): n is a, c, g, or t
  misc_feature (460)..(460): n is a, c, g, or t
  misc_feature (466)..(471): n is a, c, g, or t
  misc_feature (474)..(475): n is a, c, g, or t
  misc_feature (477)..(479): n is a, c, g, or t
  misc_feature (482)..(482): n is a, c, g, or t
  misc_feature (484)..(485): n is a, c, g, or t
  misc_feature (487)..(487): n is a, c, g, or t
  misc_feature (489)..(494): n is a, c, g, or t
  misc_feature (497)..(500): n is a, c, g, or t
  misc_feature (504)..(504): n is a, c, g, or t
  misc_feature (508)..(509): n is a, c, g, or t
  misc_feature (511)..(514): n is a, c, g, or t
  misc_feature (516)..(519): n is a, c, g, or t
  misc_feature (522)..(522): n is a, c, g, or t
  misc_feature (524)..(524): n is a, c, g, or t
  misc_feature (526)..(527): n is a, c, g, or t
  misc_feature (529)..(531): n is a, c, g, or t
  misc_feature (533)..(534): n is a, c, g, or t
  misc_feature (536)..(537): n is a, c, g, or t
  misc_feature (540)..(541): n is a, c, g, or t
  misc_feature (543)..(545): n is a, c, g, or t
  misc_feature (547)..(549): n is a, c, g, or t
  misc_feature (551)..(552): n is a, c, g, or t
  misc_feature (554)..(556): n is a, c, g, or t
  misc_feature (558)..(561): n is a, c, g, or t
  misc_feature (563)..(564): n is a, c, g, or t
  misc_feature (566)..(568): n is a, c, g, or t
  misc_feature (573)..(573): n is a, c, g, or t
  misc_feature (577)..(579): n is a, c, g, or t
  misc_feature (581)..(582): n is a, c, g, or t
  misc_feature (584)..(585): n is a, c, g, or t
  misc_feature (587)..(588): n is a, c, g, or t
  misc_feature (590)..(597): n is a, c, g, or t
  misc_feature (599)..(600): n is a, c, g, or t
  misc_feature (602)..(607): n is a, c, g, or t
  misc_feature (610)..(610): n is a, c, g, or t
  misc_feature (612)..(614): n is a, c, g, or t
  misc_feature (616)..(616): n is a, c, g, or t
  misc_feature (618)..(618): n is a, c, g, or t
  misc_feature (622)..(631): n is a, c, g, or t
  misc_feature (633)..(635): n is a, c, g, or t
  misc_feature (637)..(637): n is a, c, g, or t
  misc_feature (639)..(640): n is a, c, g, or t
  misc_feature (642)..(642): n is a, c, g, or t
  misc_feature (645)..(647): n is a, c, g, or t
  misc_feature (649)..(651): n is a, c, g, or t
  misc_feature (653)..(653): n is a, c, g, or t
  misc_feature (655)..(655): n is a, c, g, or t
  misc_feature (657)..(659): n is a, c, g, or t
  misc_feature (661)..(667): n is a, c, g, or t
  misc_feature (669)..(672): n is a, c, g, or t
  misc_feature (676)..(676): n is a, c, g, or t
  misc_feature (678)..(682): n is a, c, g, or t
  misc_feature (684)..(688): n is a, c, g, or t
  misc_feature (691)..(691): n is a, c, g, or t
  misc_feature (693)..(696): n is a, c, g, or t
  misc_feature (698)..(700): n is a, c, g, or t
  misc_feature (702)..(702): n is a, c, g, or t
  misc_feature (706)..(706): n is a, c, g, or t
  misc_feature (708)..(720): n is a, c, g, or t
  misc_feature (722)..(731): n is a, c, g, or t
  misc_feature (733)..(733): n is a, c, g, or t
  misc_feature (737)..(738): n is a, c, g, or t
  misc_feature (740)..(740): n is a, c, g, or t
  misc_feature (742)..(744): n is a, c, g, or t
  misc_feature (746)..(747): n is a, c, g, or t
  misc_feature (751)..(751): n is a, c, g, or t
  misc_feature (753)..(753): n is a, c, g, or t
  misc_feature (756)..(756): n is a, c, g, or t
  misc_feature (758)..(758): n is a, c, g, or t
  misc_feature (760)..(764): n is a, c, g, or t
  misc_feature (766)..(774): n is a, c, g, or t
  misc_feature (776)..(778): n is a, c, g, or t
  misc_feature (780)..(780): n is a, c, g, or t
  misc_feature (784)..(785): n is a, c, g, or t
  misc_feature (787)..(787): n is a, c, g, or t
  misc_feature (790)..(794): n is a, c, g, or t
  misc_feature (798)..(806): n is a, c, g, or t
  misc_feature (809)..(814): n is a, c, g, or t
  misc_feature (816)..(822): n is a, c, g, or t
  misc_feature (826)..(837): n is a, c, g, or t
  misc_feature (842)..(850): n is a, c, g, or t
  misc_feature (852)..(853): n is a, c, g, or t
  misc_feature (855)..(858): n is a, c, g, or t
  misc_feature (860)..(865): n is a, c, g, or t
  misc_feature (869)..(870): n is a, c, g, or t
  misc_feature (872)..(874): n is a, c, g, or t
  misc_feature (876)..(877): n is a, c, g, or t
  misc_feature (879)..(879): n is a, c, g, or t
  misc_feature (881)..(883): n is a, c, g, or t
  misc_feature (885)..(891): n is a, c, g, or t
  misc_feature (893)..(896): n is a, c, g, or t
  misc_feature (898)..(898): n is a, c, g, or t
  misc_feature (900)..(904): n is a, c, g, or t
  misc_feature (906)..(910): n is a, c, g, or t
  misc_feature (913)..(913): n is a, c, g, or t
  misc_feature (916)..(917): n is a, c, g, or t
  misc_feature (919)..(928): n is a, c, g, or t
  misc_feature (931)..(938): n is a, c, g, or t
  misc_feature (940)..(941): n is a, c, g, or t
  misc_feature (943)..(943): n is a, c, g, or t
  misc_feature (945)..(947): n is a, c, g, or t
  misc_feature (949)..(953): n is a, c, g, or t
  misc_feature (956)..(960): n is a, c, g, or t
  misc_feature (963)..(963): n is a, c, g, or t
  misc_feature (965)..(972): n is a, c, g, or t
  misc_feature (974)..(976): n is a, c, g, or t
  misc_feature (982)..(983): n is a, c, g, or t
  misc_feature (985)..(985): n is a, c, g, or t
  misc_feature (987)..(989): n is a, c, g, or t
  misc_feature (991)..(992): n is a, c, g, or t
  misc_feature (994)..(998): n is a, c, g, or t
  misc_feature (1002)..(1010): n is a, c, g, or t
  misc_feature (1012)..(1013): n is a, c, g, or t
  misc_feature (1015)..(1016): n is a, c, g, or t
  misc_feature (1018)..(1018): n is a, c, g, or t
  misc_feature (1020)..(1020): n is a, c, g, or t
  misc_feature (1024)..(1028): n is a, c, g, or t
  misc_feature (1030)..(1034): n is a, c, g, or t
  misc_feature (1040)..(1044): n is a, c, g, or t
  misc_feature (1046)..(1047): n is a, c, g, or t
  misc_feature (1049)..(1053): n is a, c, g, or t
  misc_feature (1055)..(1057): n is a, c, g, or t
  misc_feature (1059)..(1059): n is a, c, g, or t
  misc_feature (1061)..(1061): n is a, c, g, or t
  misc_feature (1063)..(1063): n is a, c, g, or t
  misc_feature (1065)..(1065): n is a, c, g, or t
  misc_feature (1068)..(1070): n is a, c, g, or t
  misc_feature (1072)..(1075): n is a, c, g, or t
  misc_feature (1077)..(1085): n is a, c, g, or t
  misc_feature (1087)..(1087): n is a, c, g, or t
  misc_feature (1092)..(1095): n is a, c, g, or t
  misc_feature (1097)..(1097): n is a, c, g, or t
  misc_feature (1099)..(1099): n is a, c, g, or t
  misc_feature (1101)..(1105): n is a, c, g, or t
  misc_feature (1107)..(1109): n is a, c, g, or t
  misc_feature (1111)..(1111): n is a, c, g, or t
  misc_feature (1113)..(1113): n is a, c, g, or t
  misc_feature (1117)..(1117): n is a, c, g, or t
  misc_feature (1119)..(1119): n is a, c, g, or t
  misc_feature (1123)..(1123): n is a, c, g, or t
  misc_feature (1125)..(1125): n is a, c, g, or t
  misc_feature (1127)..(1132): n is a, c, g, or t
  misc_feature (1134)..(1134): n is a, c, g, or t
  misc_feature (1137)..(1143): n is a, c, g, or t
  misc_feature (1145)..(1147): n is a, c, g, or t
  misc_feature (1149)..(1151): n is a, c, g, or t
  misc_feature (1153)..(1153): n is a, c, g, or t
  misc_feature (1155)..(1164): n is a, c, g, or t
  misc_feature (1166)..(1167): n is a, c, g, or t
  misc_feature (1172)..(1172): n is a, c, g, or t
  misc_feature (1174)..(1177): n is a, c, g, or t
  misc_feature (1183)..(1188): n is a, c, g, or t
  misc_feature (1190)..(1195): n is a, c, g, or t
  misc_feature (1197)..(1202): n is a, c, g, or t
  misc_feature (1204)..(1204): n is a, c, g, or t
  misc_feature (1206)..(1211): n is a, c, g, or t
  misc_feature (1213)..(1216): n is a, c, g, or t
  misc_feature (1218)..(1221): n is a, c, g, or t
  misc_feature (1224)..(1225): n is a, c, g, or t
  misc_feature (1227)..(1230): n is a, c, g, or t
  misc_feature (1232)..(1235): n is a, c, g, or t
  misc_feature (1237)..(1237): n is a, c, g, or t
  misc_feature (1239)..(1242): n is a, c, g, or t
  misc_feature (1248)..(1249): n is a, c, g, or t
  misc_feature (1252)..(1254): n is a, c, g, or t
  misc_feature (1256)..(1256): n is a, c, g, or t
  misc_feature (1259)..(1262): n is a, c, g, or t
  misc_feature (1264)..(1264): n is a, c, g, or t
  misc_feature (1268)..(1271): n is a, c, g, or t
  misc_feature (1273)..(1273): n is a, c, g, or t
  misc_feature (1275)..(1276): n is a, c, g, or t
  misc_feature (1278)..(1278): n is a, c, g, or t
  misc_feature (1280)..(1281): n is a, c, g, or t
  misc_feature (1283)..(1283): n is a, c, g, or t
  misc_feature (1285)..(1285): n is a, c, g, or t
  misc_feature (1287)..(1287): n is a, c, g, or t
  misc_feature (1289)..(1291): n is a, c, g, or t
  misc_feature (1293)..(1302): n is a, c, g, or t
  misc_feature (1304)..(1304): n is a, c, g, or t
  misc_feature (1307)..(1309): n is a, c, g, or t
  misc_feature (1311)..(1311): n is a, c, g, or t
  misc_feature (1313)..(1314): n is a, c, g, or t
  misc_feature (1316)..(1323): n is a, c, g, or t
  misc_feature (1325)..(1330): n is a, c, g, or t
  misc_feature (1332)..(1340): n is a, c, g, or t
  misc_feature (1342)..(1352): n is a, c, g, or t
  misc_feature (1355)..(1356): n is a, c, g, or t
  misc_feature (1359)..(1363): n is a, c, g, or t
  misc_feature (1365)..(1368): n is a, c, g, or t
  misc_feature (1371)..(1372): n is a, c, g, or t
  misc_feature (1374)..(1382): n is a, c, g, or t
  misc_feature (1385)..(1385): n is a, c, g, or t
  misc_feature (1388)..(1389): n is a, c, g, or t
  misc_feature (1393)..(1395): n is a, c, g, or t
  misc_feature (1397)..(1397): n is a, c, g, or t
  misc_feature (1400)..(1405): n is a, c, g, or t
  misc_feature (1407)..(1407): n is a, c, g, or t
  misc_feature (1410)..(1411): n is a, c, g, or t
  misc_feature (1414)..(1416): n is a, c, g, or t
  misc_feature (1418)..(1422): n is a, c, g, or t
  misc_feature (1424)..(1429): n is a, c, g, or t
  misc_feature (1431)..(1431): n is a, c, g, or t
  misc_feature (1433)..(1433): n is a, c, g, or t
  misc_feature (1435)..(1435): n is a, c, g, or t
  misc_feature (1438)..(1439): n is a, c, g, or t
  misc_feature (1441)..(1447): n is a, c, g, or t
  misc_feature (1450)..(1450): n is a, c, g, or t
  misc_feature (1452)..(1454): n is a, c, g, or t
  misc_feature (1456)..(1456): n is a, c, g, or t
  misc_feature (1458)..(1458): n is a, c, g, or t
  misc_feature (1461)..(1463): n is a, c, g, or t
  misc_feature (1466)..(1469): n is a, c, g, or t
  misc_feature (1960)..(1960): n is a, c, g, or t
  misc_feature (2142)..(2142): n is a, c, g, or t
  misc_feature (2213)..(2213): n is a, c, g, or t
  misc_feature (2388)..(2388): n is a, c, g, or t
  misc_feature (2390)..(2390): n is a, c, g, or t
  misc_feature (2400)..(2400): n is a, c, g, or t
  misc_feature (2403)..(2403): n is a, c, g, or t
  misc_feature (2407)..(2407): n is a, c, g, or t
  misc_feature (2532)..(2532): n is a, c, g, or t
  misc_feature (2617)..(2617): n is a, c, g, or t
  misc_feature (2664)..(2664): n is a, c, g, or t
  misc_feature (2677)..(2677): n is a, c, g, or t
  misc_feature (2814)..(2814): n is a, c, g, or t
  misc_feature (2820)..(2820): n is a, c, g, or t
  misc_feature (2853)..(2853): n is a, c, g, or t
  misc_feature (2901)..(2901): n is a, c, g, or t
  misc_feature (2911)..(2911): n is a, c, g, or t
  misc_feature (2913)..(2913): n is a, c, g, or t
  misc_feature (3054)..(3054): n is a, c, g, or t
  misc_feature (3060)..(3060): n is a, c, g, or t
  misc_feature (3087)..(3087): n is a, c, g, or t
  misc_feature (3144)..(3144): n is a, c, g, or t
  misc_feature (3177)..(3177): n is a, c, g, or t
  misc_feature (3249)..(3249): n is a, c, g, or t
  misc_feature (3252)..(3252): n is a, c, g, or t
  misc_feature (3258)..(3258): n is a, c, g, or t
  misc_feature (3315)..(3315): n is a, c, g, or t
  misc_feature (3324)..(3324): n is a, c, g, or t
  misc_feature (3360)..(3360): n is a, c, g, or t
  misc_feature (3472)..(3472): n is a, c, g, or t
  misc_feature (3512)..(3512): n is a, c, g, or t
  misc_feature (3519)..(3519): n is a, c, g, or t
  misc_feature (3554)..(3555): n is a, c, g, or t
  misc_feature (3562)..(3562): n is a, c, g, or t
  misc_feature (3568)..(3568): n is a, c, g, or t
  misc_feature (3572)..(3572): n is a, c, g, or t
  misc_feature (3574)..(3575): n is a, c, g, or t
  misc_feature (3579)..(3579): n is a, c, g, or t
  misc_feature (3581)..(3581): n is a, c, g, or t
  misc_feature (3586)..(3587): n is a, c, g, or t
  misc_feature (3590)..(3593): n is a, c, g, or t
  misc_feature (3598)..(3599): n is a, c, g, or t
  misc_feature (3602)..(3605): n is a, c, g, or t
  misc_feature (3607)..(3613): n is a, c, g, or t
  misc_feature (3616)..(3617): n is a, c, g, or t
  misc_feature (3619)..(3621): n is a, c, g, or t
  misc_feature (3625)..(3625): n is a, c, g, or t
  misc_feature (3627)..(3629): n is a, c, g, or t
  misc_feature (3631)..(3634): n is a, c, g, or t
  misc_feature (3638)..(3638): n is a, c, g, or t
  misc_feature (3640)..(3640): n is a, c, g, or t
  misc_feature (3643)..(3643): n is a, c, g, or t
  misc_feature (3645)..(3646): n is a, c, g, or t
  misc_feature (3648)..(3648): n is a, c, g, or t
  misc_feature (3651)..(3652): n is a, c, g, or t
  misc_feature (3659)..(3660): n is a, c, g, or t
  misc_feature (3662)..(3662): n is a, c, g, or t
  misc_feature (3666)..(3667): n is a, c, g, or t
  misc_feature (3669)..(3671): n is a, c, g, or t
  misc_feature (3675)..(3675): n is a, c, g, or t
  misc_feature (3680)..(3681): n is a, c, g, or t
  misc_feature (3683)..(3683): n is a, c, g, or t
  misc_feature (3686)..(3687): n is a, c, g, or t
  misc_feature (3689)..(3690): n is a, c, g, or t
  misc_feature (3692)..(3694): n is a, c, g, or t
  misc_feature (3696)..(3697): n is a, c, g, or t
  misc_feature (3699)..(3703): n is a, c, g, or t
  misc_feature (3705)..(3705): n is a, c, g, or t
  misc_feature (3709)..(3712): n is a, c, g, or t
  misc_feature (3715)..(3718): n is a, c, g, or t
  misc_feature (3720)..(3721): n is a, c, g, or t
  misc_feature (3728)..(3732): n is a, c, g, or t
  misc_feature (3738)..(3739): n is a, c, g, or t
  misc_feature (3741)..(3742): n is a, c, g, or t
  misc_feature (3745)..(3747): n is a, c, g, or t
  misc_feature (3755)..(3757): n is a, c, g, or t
  misc_feature (3759)..(3760): n is a, c, g, or t
  misc_feature (3762)..(3762): n is a, c, g, or t
  misc_feature (3764)..(3764): n is a, c, g, or t
  misc_feature (3766)..(3767): n is a, c, g, or t
  misc_feature (3769)..(3769): n is a, c, g, or t
  misc_feature (3772)..(3776): n is a, c, g, or t
  misc_feature (3778)..(3779): n is a, c, g, or t
  misc_feature (3782)..(3783): n is a, c, g, or t
  misc_feature (3785)..(3785): n is a, c, g, or t
  misc_feature (3787)..(3788): n is a, c, g, or t
  misc_feature (3791)..(3793): n is a, c, g, or t
  misc_feature (3797)..(3797): n is a, c, g, or t
  misc_feature (3800)..(3801): n is a, c, g, or t
  misc_feature (3804)..(3805): n is a, c, g, or t
  misc_feature (3809)..(3811): n is a, c, g, or t
  misc_feature (3813)..(3813): n is a, c, g, or t
  misc_feature (3815)..(3820): n is a, c, g, or t
  misc_feature (3822)..(3824): n is a, c, g, or t
  misc_feature (3826)..(3832): n is a, c, g, or t
  misc_feature (3837)..(3837): n is a, c, g, or t
  misc_feature (3839)..(3840): n is a, c, g, or t
  misc_feature (3842)..(3842): n is a, c, g, or t
  misc_feature (3844)..(3846): n is a, c, g, or t
  misc_feature (3848)..(3851): n is a, c, g, or t
  misc_feature (3853)..(3853): n is a, c, g, or t
  misc_feature (3855)..(3856): n is a, c, g, or t
  misc_feature (3858)..(3861): n is a, c, g, or t
  misc_feature (3863)..(3865): n is a, c, g, or t
  misc_feature (3867)..(3868): n is a, c, g, or t
  misc_feature (3870)..(3870): n is a, c, g, or t
  misc_feature (3872)..(3872): n is a, c, g, or t
  misc_feature (3874)..(3876): n is a, c, g, or t
  misc_feature (3878)..(3878): n is a, c, g, or t
  misc_feature (3880)..(3881): n is a, c, g, or t
  misc_feature (3883)..(3883): n is a, c, g, or t
  misc_feature (3885)..(3888): n is a, c, g, or t
  misc_feature (3890)..(3890): n is a, c, g, or t
  misc_feature (3892)..(3904): n is a, c, g, or t
  misc_feature (3907)..(3908): n is a, c, g, or t
  misc_feature (3916)..(3920): n is a, c, g, or t
  misc_feature (3923)..(3925): n is a, c, g, or t
  misc_feature (3928)..(3933): n is a, c, g, or t
  misc_feature (3935)..(3949): n is a, c, g, or t
  misc_feature (3951)..(3954): n is a, c, g, or t
  misc_feature (3956)..(3956): n is a, c, g, or t
  misc_feature (3958)..(3966): n is a, c, g, or t
  misc_feature (3968)..(3969): n is a, c, g, or t
  misc_feature (3971)..(3977): n is a, c, g, or t
  misc_feature (3979)..(3982): n is a, c, g, or t
  misc_feature (3984)..(3988): n is a, c, g, or t
  misc_feature (3990)..(3990): n is a, c, g, or t
  misc_feature (3992)..(4000): n is a, c, g, or t
nnaannnnngnnngnnnnngnnnannnnngnnnaannnntnangnnnnntnnnnnnannnnnnnnnnnnnnnnnnccnnnannaaancnntnccnnnncnnnnttnnnnggnnnnnnttnnntnnncnnnnnttncntttncnnnnnnncngnaaannnngntttnnangnnnttnnnnnnnnggnnaangnnggggnaaaannnnntnntnnnggnnncnnnggntnnngnaannncnnnnnttnnaannntnntnnnggnantnnnggnanncnagggggnnnnnnttncnntngnnannnggnnnnttnnnnccntnccnnngnaanncnnnttnnntnnnnttncnnnnntnnannngnanntnttnnttttnnnngnnnnnnnnnnnnnnannntnnnnnnnttnnaaaannnnnnnnannannnnntnannnngncnntnnaaangncngnttnaaaaannnnnnttnngnnnaangnntngnnnnnnccnnnngggnaaanngnnnngnnnnttncngnngnnnanngnnaannannnannntnncnnnannnntnntnnnaaaancccnnntnntnntnncnnnnnnnntnncnnnnnnttngnnnangnaaannnnnnnnnngnnntngnntnccnnntnnncntngnnnannnnnnngnnnntttngnnnnncnnnnnttngnnnncnnnantttnannnnnnnnnnnnngnnnnnnnnnntnaaannangnnnanntttngnagnangnnnnntnnnnnnnnntnnngnaaannanggnnnnntttnnnnnnnnnttnnnnnngnnnnnnnaaannnnnnnnnnnnaaaannnnnnnnntnntnnnngnnnnnnaaannannnannangnnnannnnnnnannnnanannnnngnnnnnggnaannannnnnnnnnnttnnnnnnnntnntnannntnnnnnaannnnnaangnnnnnnnntnnnaaaaanntnannnannannnnntttnnnnnnnnnannanntngnaaannnnntnnnnnaaaaannnnngnngnnnnntnnngntncngnttnnntnnnnannnnnnnnnanttttnnnnancnannnnncnnnantnaaangntttnancnnnnnngnttnnnnnnnannnannnantnnnnnnnnnntnnaaggncnnnnaaaaannnnnnannnnnntnnnnnnantnnnnnngnnnnannnnttnnannnnannnncngnnnnaaaaannaannngnaannnnantttnnnntnanntngnnantnangnnnannnnnnnnnncnggnnntngnnannnnnnnngnnnnnngnnnnnnnnnannnnnnnnnnnttnnaannnnnannnnttnncnnnnnnnnnaanggnnaaannngnaannnnnnanttnnttnnngnnnnntnnnnnntngnanttnntnnnnnnnccnannntngnaannnaannnnatttcagaaatcaattcttgacaatttgaagaactttatcttagaaattggaaaagatttttcctttataagtaatgagtatagagtacaggttggaaaccatgattactatattgatttgttattttatcatagaggtctgtcctgcttagtggcttttgaacttaagattggagaattcaagccggaatatattgggaaaatgaatctatatttggaagcattggatagagaagtgaagaaacaaagcgaaaatccaagtgttggagtcatactttgtgcatcaaaagatgatgaggtggtagagtttgcattaagcagaagtctttcaccaacaatggtatcagagtatacattgaaacttattgatagggggttgttacaaagaaagcttagagagtatacagaaattgctgaagaagcaaatgaataaaatcatattatggttatgataagctacagattttttcatgaaatgtgagaaaaaggcnaaaagtggctcataaaatgtgagaaaaaggcgaaaagtggctcatgaaatgtgatgaaaggcgttgaagtggctatttttttgtgataccatccctctatggaggggtgaaaaatgtattttaaaagaaagatagatgattttttgcaggaatggaaggcggatgccaagcataagcctttnattattaagggcgccagacaaataggaaagacggaatccattttacattttgcaaaacagaactataaaantatcgtttatatcaattttgctctggaaaaaaagttcatgcagattttagcagatgggtatgatgtggaaagtgtgaccagaaatatcaccttggcagacccgtctattcagtttattccgaaggaaagcattattctttttgatgaaatacaggaaaatcctgatgtggctacnancttgaaatcnttncatngagatggaaattacgatgtgatttgtagcggttccatgctgggcataaattataaaagaattcacagtaatagcgttggctctaaaacggactatgaaatgttttccatggattttgaagaattnctttgggcaaagggctatagggaggagcagattgccagtatccttagccacatgctggagaacaagccatttaacgagaatgagntctccattttcaaagagctctttctcacctactcagtcctggggggnatgccggatgtgntaaagcagtatttggagacaggaacattttccggtacactggatttgcagaatcagattcgcttggactatgaagaggatgtcagaaagtacgcagagggcttggatcagacgaagattatcagtgtctatcgaagnattccngctcagctggctaaggaaaataagaaatttcantttaataaggtggcgaagaatgccagatcccgggaatatagcggctgnatcgattggntnaaggatgcaggcatcatcatggaatgtaactgcctccaattccccgagcttcctttaaagggaaatgtcgaagaaagcaaatacaaactatattatatggataccggtctgttgatttcttccttggatgaggaggcgcangaggancttagagtcaataagaatctgggggtntacaagggggctttgtatgaaaactttgttgcagaggcttttgtgaagcaaggcttnggactctattactataagaaggaaaatgccagnctggaggaagatttttttgtgcgtacccaaaatgctttggttccggtagaggtgaaggctaatagcaatcantcnaaggcnctttccgccttgattagcaataagcgatatcaggatatttcctttgggataaaactnggagatgtnaatgtgggatatgccaatcagatttataccttcccntatttttgtgcctttaaattgaaggagtatttgaagaaaaaggattttcatatggacatgtgagttatagaaattcgaagaaaagtatcgatgttagctcattagaatttgnttagttccttagagtaatgtatgagcattgtgtattgtcngatgctntaaaattgttctaagaccttatatagaaagtaagnnaatatgngtaaanaagnannaatnantggannagnnnnttctnnctnnnntnnnnnnntanntnnnttgnannntnnnnattnantananntntannaaaaaannanaatnncnnntggngagtnngnagnntnnannngnnannnnnancatnnnnatnnnngnnttcattnnnnngttggnngnnatnnngatgaacnnntnnanananngnggnnnnntnnagnngntnnttnnnatanttnnganntttnnngngnnnnnnannntnnnnnnntggananngncnnngnnnnantnnannnntnnngnnantnannnanannangnnnngngnnnnnnnnnnnnnctnnagaagatnnnnnagnnntannnnnntnnnnnnnnnnnnnnnannnntnannnnnnnnnanncnnnnnnntnnnntnnnnntngnnnnnnnnn

SEQ ID NO: 863 - DNA, 4000 bp, Escherichia coli
  misc_feature (366)..(366): n is a, c, g, or t
  misc_feature (1228)..(1228): n is a, c, g, or t
  misc_feature (1968)..(1968): n is a, c, g, or t
  misc_feature (1984)..(1988): n is a, c, g, or t
  misc_feature (2789)..(2789): n is a, c, g, or t
  misc_feature (2851)..(2853): n is a, c, g, or t
  misc_feature (2855)..(2856): n is a, c, g, or t
  misc_feature (2858)..(2864): n is a, c, g, or t
  misc_feature (2868)..(2871): n is a, c, g, or t
  misc_feature (2874)..(2874): n is a, c, g, or t
  misc_feature (2876)..(2877): n is a, c, g, or t
  misc_feature (2880)..(2885): n is a, c, g, or t
  misc_feature (2887)..(2888): n is a, c, g, or t
  misc_feature (2890)..(2894): n is a, c, g, or t
  misc_feature (2897)..(2898): n is a, c, g, or t
  misc_feature (2901)..(2902): n is a, c, g, or t
  misc_feature (2904)..(2906): n is a, c, g, or t
  misc_feature (2908)..(2909): n is a, c, g, or t
  misc_feature (2911)..(2912): n is a, c, g, or t
  misc_feature (2914)..(2918): n is a, c, g, or t
  misc_feature (2921)..(2922): n is a, c, g, or t
  misc_feature (2924)..(2924): n is a, c, g, or t
  misc_feature (2926)..(2931): n is a, c, g, or t
  misc_feature (2933)..(2934): n is a, c, g, or t
  misc_feature (2936)..(2936): n is a, c, g, or t
  misc_feature (2938)..(2942): n is a, c, g, or t
  misc_feature (2944)..(2944): n is a, c, g, or t
  misc_feature (2948)..(2951): n is a, c, g, or t
  misc_feature (2953)..(2958): n is a, c, g, or t
  misc_feature (2960)..(2967): n is a, c, g, or t
  misc_feature (2970)..(2971): n is a, c, g, or t
  misc_feature (2973)..(2981): n is a, c, g, or t
  misc_feature (2983)..(2985): n is a, c, g, or t
  misc_feature (2987)..(2987): n is a, c, g, or t
  misc_feature (2989)..(2992): n is a, c, g, or t
  misc_feature (2994)..(2994): n is a, c, g, or t
  misc_feature (3138)..(3142): n is a, c, g, or t
  misc_feature (3147)..(3153): n is a, c, g, or t
  misc_feature (3155)..(3158): n is a, c, g, or t
  misc_feature (3161)..(3161): n is a, c, g, or t
  misc_feature (3173)..(3176): n is a, c, g, or t
  misc_feature (3180)..(3180): n is a, c, g, or t
  misc_feature (3182)..(3182): n is a, c, g, or t
  misc_feature (3185)..(3186): n is a, c, g, or t
  misc_feature (3189)..(3190): n is a, c, g, or t
  misc_feature (3193)..(3193): n is a, c, g, or t
  misc_feature (3195)..(3195): n is a, c, g, or t
  misc_feature (3197)..(3198): n is a, c, g, or t
  misc_feature (3203)..(3203): n is a, c, g, or t
  misc_feature (3206)..(3209): n is a, c, g, or t
  misc_feature (3211)..(3211): n is a, c, g, or t
  misc_feature (3213)..(3214): n is a, c, g, or t
  misc_feature (3217)..(3219): n is a, c, g, or t
  misc_feature (3222)..(3222): n is a, c, g, or t
  misc_feature (3225)..(3225): n is a, c, g, or t
  misc_feature (3227)..(3227): n is a, c, g, or t
  misc_feature (3232)..(3232): n is a, c, g, or t
  misc_feature (3234)..(3235): n is a, c, g, or t
  misc_feature (3237)..(3238): n is a, c, g, or t
  misc_feature (3240)..(3240): n is a, c, g, or t
  misc_feature (3242)..(3242): n is a, c, g, or t
  misc_feature (3245)..(3247): n is a, c, g, or t
  misc_feature (3251)..(3253): n is a, c, g, or t
  misc_feature (3255)..(3255): n is a, c, g, or t
  misc_feature (3257)..(3257): n is a, c, g, or t
  misc_feature (3259)..(3259): n is a, c, g, or t
  misc_feature (3262)..(3262): n is a, c, g, or t
  misc_feature (3267)..(3267): n is a, c, g, or t
  misc_feature (3273)..(3274): n is a, c, g, or t
  misc_feature (3276)..(3277): n is a, c, g, or t
  misc_feature (3279)..(3279): n is a, c, g, or t
  misc_feature (3281)..(3283): n is a, c, g, or t
  misc_feature (3287)..(3289): n is a, c, g, or t
  misc_feature (3291)..(3300): n is a, c, g, or t
  misc_feature (3302)..(3302): n is a, c, g, or t
  misc_feature (3304)..(3306): n is a, c, g, or t
  misc_feature (3308)..(3308): n is a, c, g, or t
  misc_feature (3310)..(3311): n is a, c, g, or t
  misc_feature (3314)..(3318): n is a, c, g, or t
  misc_feature (3320)..(3322): n is a, c, g, or t
  misc_feature (3324)..(3328): n is a, c, g, or t
  misc_feature (3331)..(3331): n is a, c, g, or t
  misc_feature (3333)..(3333): n is a, c, g, or t
  misc_feature (3335)..(3337): n is a, c, g, or t
  misc_feature (3340)..(3340): n is a, c, g, or t
  misc_feature (3343)..(3344): n is a, c, g, or t
  misc_feature (3346)..(3346): n is a, c, g, or t
  misc_feature (3348)..(3348): n is a, c, g, or t
  misc_feature (3350)..(3350): n is a, c, g, or t
  misc_feature (3352)..(3352): n is a, c, g, or t
  misc_feature (3354)..(3357): n is a, c, g, or t
  misc_feature (3361)..(3361): n is a, c, g, or t
  misc_feature (3363)..(3366): n is a, c, g, or t
  misc_feature (3369)..(3370): n is a, c, g, or t
  misc_feature (3372)..(3374): n is a, c, g, or t
  misc_feature (3379)..(3379): n is a, c, g, or t
  misc_feature (3382)..(3382): n is a, c, g, or t
  misc_feature (3385)..(3385): n is a, c, g, or t
  misc_feature (3387)..(3387): n is a, c, g, or t
  misc_feature (3389)..(3389): n is a, c, g, or t
  misc_feature (3391)..(3394): n is a, c, g, or t
  misc_feature (3397)..(3398): n is a, c, g, or t
  misc_feature (3401)..(3401): n is a, c, g, or t
  misc_feature (3410)..(3411): n is a, c, g, or t
  misc_feature (3413)..(3415): n is a, c, g, or t
  misc_feature (3417)..(3417): n is a, c, g, or t
  misc_feature (3420)..(3423): n is a, c, g, or t
  misc_feature (3425)..(3425): n is a, c, g, or t
  misc_feature (3430)..(3430): n is a, c, g, or t
  misc_feature (3432)..(3432): n is a, c, g, or t
  misc_feature (3434)..(3434): n is a, c, g, or t
  misc_feature (3437)..(3437): n is a, c, g, or t
  misc_feature (3440)..(3441): n is a, c, g, or t
  misc_feature (3445)..(3445): n is a, c, g, or t
  misc_feature (3447)..(3448): n is a, c, g, or t
  misc_feature (3453)..(3454): n is a, c, g, or t
  misc_feature (3459)..(3460): n is a, c, g, or t
  misc_feature (3462)..(3462): n is a, c, g, or t
  misc_feature (3464)..(3464): n is a, c, g, or t
  misc_feature (3466)..(3467): n is a, c, g, or t
  misc_feature (3471)..(3471): n is a, c, g, or t
  misc_feature (3476)..(3477): n is a, c, g, or t
  misc_feature (3480)..(3480): n is a, c, g, or t
  misc_feature (3482)..(3486): n is a, c, g, or t
  misc_feature (3488)..(3490): n is a, c, g, or t
  misc_feature (3493)..(3493): n is a, c, g, or t
  misc_feature (3500)..(3501): n is a, c, g, or t
  misc_feature (3506)..(3510): n is a, c, g, or t
  misc_feature (3512)..(3513): n is a, c, g, or t
  misc_feature (3515)..(3515): n is a, c, g, or t
  misc_feature (3517)..(3521): n is a, c, g, or t
  misc_feature (3525)..(3528): n is a, c, g, or t
  misc_feature (3531)..(3534): n is a, c, g, or t
  misc_feature (3536)..(3537): n is a, c, g, or t
  misc_feature (3541)..(3541): n is a, c, g, or t
  misc_feature (3543)..(3544): n is a, c, g, or t
  misc_feature (3547)..(3547): n is a, c, g, or t
  misc_feature (3551)..(3552): n is a, c, g, or t
  misc_feature (3554)..(3554): n is a, c, g, or t
  misc_feature (3556)..(3558): n is a, c, g, or t
  misc_feature (3560)..(3566): n is a, c, g, or t
  misc_feature (3570)..(3571): n is a, c, g, or t
  misc_feature (3573)..(3573): n is a, c, g, or t
  misc_feature (3576)..(3577): n is a, c, g, or t
  misc_feature (3580)..(3580): n is a, c, g, or t
  misc_feature (3582)..(3582): n is a, c, g, or t
  misc_feature (3586)..(3587): n is a, c, g, or t
  misc_feature (3590)..(3593): n is a, c, g, or t
  misc_feature (3597)..(3597): n is a, c, g, or t
  misc_feature (3604)..(3604): n is a, c, g, or t
  misc_feature (3610)..(3611): n is a, c, g, or t
  misc_feature (3615)..(3617): n is a, c, g, or t
  misc_feature (3620)..(3622): n is a, c, g, or t
  misc_feature (3625)..(3625): n is a, c, g, or t
  misc_feature (3627)..(3630): n is a, c, g, or t
  misc_feature (3633)..(3639): n is a, c, g, or t
  misc_feature (3642)..(3643): n is a, c, g, or t
  misc_feature (3645)..(3645): n is a, c, g, or t
  misc_feature (3648)..(3649): n is a, c, g, or t
  misc_feature (3651)..(3651): n is a, c, g, or t
  misc_feature (3656)..(3656): n is a, c, g, or t
  misc_feature (3658)..(3658): n is a, c, g, or t
  misc_feature (3663)..(3670): n is a, c, g, or t
  misc_feature (3675)..(3675): n is a, c, g, or t
  misc_feature (3677)..(3677): n is a, c, g, or t
  misc_feature (3681)..(3681): n is a, c, g, or t
  misc_feature (3683)..(3685): n is a, c, g, or t
  misc_feature (3689)..(3692): n is a, c, g, or t
  misc_feature (3694)..(3695): n is a, c, g, or t
  misc_feature (3697)..(3697): n is a, c, g, or t
  misc_feature (3700)..(3702): n is a, c, g, or t
  misc_feature (3707)..(3709): n is a, c, g, or t
  misc_feature (3712)..(3713): n is a, c, g, or t
  misc_feature (3718)..(3718): n is a, c, g, or t
  misc_feature (3720)..(3721): n is a, c, g, or t
  misc_feature (3726)..(3726): n is a, c, g, or t
  misc_feature (3728)..(3730): n is a, c, g, or t
  misc_feature (3733)..(3733): n is a, c, g, or t
  misc_feature (3735)..(3736): n is a, c, g, or t
  misc_feature (3742)..(3742): n is a, c, g, or t
  misc_feature (3744)..(3744): n is a, c, g, or t
  misc_feature (3746)..(3746): n is a, c, g, or t
  misc_feature (3748)..(3751): n is a, c, g, or t
  misc_feature (3753)..(3753): n is a, c, g, or t
  misc_feature (3755)..(3755): n is a, c, g, or t
  misc_feature (3758)..(3758): n is a, c, g, or t
  misc_feature (3761)..(3761): n is a, c, g, or t
  misc_feature (3768)..(3769): n is a, c, g, or t
  misc_feature (3772)..(3773): n is a, c, g, or t
  misc_feature (3775)..(3775): n is a, c, g, or t
  misc_feature (3777)..(3777): n is a, c, g, or t
  misc_feature (3781)..(3781): n is a, c, g, or t
  misc_feature (3783)..(3783): n is a, c, g, or t
  misc_feature (3787)..(3789): n is a, c, g, or t
  misc_feature (3791)..(3791): n is a, c, g, or t
  misc_feature (3793)..(3795): n is a, c, g, or t
  misc_feature (3797)..(3798): n is a, c, g, or t
  misc_feature (3803)..(3806): n is a, c, g, or t
  misc_feature (3809)..(3809): n is a, c, g, or t
  misc_feature (3811)..(3811): n is a, c, g, or t
  misc_feature (3814)..(3814): n is a, c, g, or t
  misc_feature (3816)..(3816): n is a, c, g, or t
  misc_feature (3819)..(3819): n is a, c, g, or t
  misc_feature (3821)..(3821): n is a, c, g, or t
  misc_feature (3826)..(3826): n is a, c, g, or t
  misc_feature (3828)..(3828): n is a, c, g, or t
  misc_feature (3830)..(3832): n is a, c, g, or t
  misc_feature (3836)..(3840): n is a, c, g, or t
  misc_feature (3842)..(3842): n is a, c, g, or t
  misc_feature (3847)..(3848): n is a, c, g, or t
  misc_feature (3850)..(3852): n is a, c, g, or t
  misc_feature (3854)..(3854): n is a, c, g, or t
  misc_feature (3856)..(3859): n is a, c, g, or t
  misc_feature (3861)..(3864): n is a, c, g, or t
  misc_feature (3867)..(3867): n is a, c, g, or t
  misc_feature (3869)..(3870): n is a, c, g, or t
  misc_feature (3872)..(3872): n is a, c, g, or t
  misc_feature (3874)..(3874): n is a, c, g, or t
  misc_feature (3877)..(3877): n is a, c, g, or t
  misc_feature (3879)..(3880): n is a, c, g, or t
  misc_feature (3882)..(3882): n is a, c, g, or t
  misc_feature (3885)..(3886): n is a, c, g, or t
  misc_feature (3889)..(3889): n is a, c, g, or t
  misc_feature (3892)..(3894): n is a, c, g, or t
  misc_feature (3901)..(3902): n is a, c, g, or t
  misc_feature (3905)..(3906): n is a, c, g, or t
  misc_feature (3908)..(3909): n is a, c, g, or t
  misc_feature (3911)..(3912): n is a, c, g, or t
  misc_feature (3914)..(3917): n is a, c, g, or t
  misc_feature (3919)..(3922): n is a, c, g, or t
  misc_feature (3931)..(3932): n is a, c, g, or t
  misc_feature (3935)..(3935): n is a, c, g, or t
  misc_feature (3938)..(3938): n is a, c, g, or t
  misc_feature (3943)..(3946): n is a, c, g, or t
  misc_feature (3948)..(3951): n is a, c, g, or t
  misc_feature (3954)..(3956): n is a, c, g, or t
  misc_feature (3958)..(3958): n is a, c, g, or t
  misc_feature (3960)..(3960): n is a, c, g, or t
  misc_feature (3962)..(3963): n is a, c, g, or t
  misc_feature (3966)..(3966): n is a, c, g, or t
  misc_feature (3968)..(3968): n is a, c, g, or t
  misc_feature (3971)..(3973): n is a, c, g, or t
  misc_feature (3975)..(3976): n is a, c, g, or t
  misc_feature (3978)..(3978): n is a, c, g, or t
  misc_feature (3981)..(3981): n is a, c, g, or t
  misc_feature (3983)..(3983): n is a, c, g, or t
  misc_feature (3985)..(3990): n is a, c, g, or t
  misc_feature (3992)..(3993): n is a, c, g, or t
  misc_feature (3995)..(3995): n is a, c, g, or t
  misc_feature (3997)..(3997): n is a, c, g, or t
  misc_feature (3999)..(4000): n is a, c, g, or t
aatgttattctattatcagattcttttagaataatatcttttggaggtgcaggaatatctatacctacaaaagtttcctttacggcagctagtccttttcctacattattataagcaattattgaatattgattaattccttgagtaggagaattatctgtataatggagttgtacatttggactaggattttcgaatgtagttataagctttgcattcctgtatatttctactttggtaagcgattctatacgtgaaccatcataagctttcgtaggagttgtaaaagaaatatctgtagttaaagttccttgttgtcctggctttatatcaattatagaagttgctgcaggagctgcaagaagngctttctctgaaatagaaatatcatcaataaataaatagtattgatctgctttactcatagcatgtacacctattctataatctccatcttcctttacagtaaattctgtttcattattttgaaatgaatctactgcggtttctatacgtggaactattattttatagttttctgtatcaatttctgttcctatcccaacttcaaaagtttcagtataactccaaaatcctgcgcgatatttaaaattgagcatataagcgtgcttattatcgagcttgatattaggcgataaaagccaatcgtcagctgcaagtgttttactattgttatatcgcgctgctttcacacgactatcataagtccaagtacactcatcattatttttattaaccaccataaatgtttcgaatgctgccttatcgtcgaagttctgtacatatcgtgaattattttctgtatctgttttggtcagaactttacgatttgttttaacagacattactgttggcaattttgttttaactgcattctgcatagtaatacgctgttgcgcagatagcaaagaagtctgcaaaatacagagatatactgttgtaaatacaaataacttatattgtttcataacacatctccctataattgtttatttaataaaggtttttcgtataacaccatttggcatcacttctataacaataccagaatagttagctggtgcaatttgtccatcaagcttatatatagctattggttttgttttctctgtcgttacatttatgttcgttggtataccacagaaagatgtaaactctttaaaaacattatctgttttatacttctcaatagatgtttctggaacanaaagtgtacatttcgatttatcaacaccatagaaaggataaatgccacatattggtggattatcagaataacagtataagtttctcattgccttacaagaataaaaggcatagtcgcctatattagttacagtagagggtaatgagactctaactaataatttattgtttgcacaaaaactagcaggtataatggttgttccttctggaattgaaatggctgttagtttaggacaatcagaaaaacttccttctccaaaagttgtaagtgtagttggtaattctatgttttctaaagatttacaacctgcgaaacaccaattgccaagtgatataattccattagacatcactatttttgagagatttgcacaagaaccaaatgcactatttccaattgtttctactttagatggtaaatacaactctgtaagttttgaacaattaaagaaaccacatttctttatatcctttaaagtagatggcaaaacaacttcagtaagtcctgtacttagatgaaaagcatattcgccaacaacaataactgtctgaggtatttcataagctccttttttatacagtgggtaacgtaaaatttctgtcatcgatttgttgaaaagtactccatctaccgatttataatatggattatcatctgccacatttatattttccaaccgtgtacaataattaaaagcacttgcagatattgaagttaccgatgctggaatttctattaangaaatctttttacaannnnngtatttacaaccgattattactcaatattttatagataataagtcagaaatatggttgttatttttaattgcacattctaaaaggtgaagatttaacgcttttattgattattaactcaaaaaggacatcaacttgggtcgtttcttctcttttccttgctattcgtttccgatattccacttttgttttggtctatctcatatgtactgcaaaggtattgatttttgtttgatattgctccttgcttgctccttgtcgtagattaattttcacacaggaatttttgttctctttctataggggcttgaaacaatccatttattggaaacaattaaagacggagctggtttgccccagtgctttttaagaaacagggcaattattttatctccacaaaggctcttgttcccaattatgaggaaagcctaataaacgagttcttactgatgggtatttcgataaaagctgcttgaaatctgcaacaaaagtgttgcccatagaaatggagttaagccaatacaccacatagcagagttgcggataaagtgtttgttcacggaacgagaaatccgtaatccatgtgtttggcatacgcataggcatcattggcttgacaggaaagacccgatttgacagtcttgaatgatgggcgcagcaattacgaagtacgggtctgggtacggattaaaaggctaagtgattatttccagtcatttagcctttttaattatctaatttttccccacattttccccacagctgtctatttatatattttagaaacatatttttccgtaaanttatgtacctttgtcggcaaataaagatattctcgtcaaacaaatataaataatataaacannnannannnnnnnaaannnnaantnntannnnnnannannnnnttnnttnncnnntnnanntnnnnnttnncntnnnnnnannantnnnnnanaaannnnannnnnnannnnnnnntannannnnnnnnnannnanannnntncatttttaaggggggatattgtaaattgttgaaacttctcatccttgtatccaccccacttatccctattaatacaaaatcgacaagtattgattatcaggttattgacattttgatgcggttgccctgatttatatattttannnnnatatnnnnnnntnnnnttntgtaccttagtnnnnaaananagnnatnntcntnanncaaanatnnnnantnntannntgnaanantattnanngnnantnatnnnattnnnantnanagntttgntgcgtnntnntntnnntcannntnnnnnnnnnncnannnancnnatnnnnnannntnnnnntantntnnntcnaanngntngntntnnnnccanannnnttnntnnntcaanttntcngntngnnnntanngangaggaaatnncnnntnacnnnnanaaggntnantcnaannatananntcctnntggtnntncnannttgntgaanngtntnnnnncnnnagntcttatnnatgannnnnannanannnnnattnnnnatnnnntnnaagnanncanaacnngngnnnannnnnnngcanntncanntcntnatanngannnngttnttatagngcatannacannntcnnnttntnnnnatnnnnnnngtnntnttnnanctcanantgatnnnnnnnntatangnctgncnnntaannnnanntntannntagcnnnatnngttangnntttcnannnaantnnatcacnancntnnnnanangtngcncatatannagnngnantatntncttnnntnannnanncttcnnnnaantnttnanctncncttgntntnnnaatnnnnnanaaacnntnnnanannnntnnnntcntnntngnagngnntntannttnctnnncaaattnnttnnannannannnnannnntctactttnnctntcntcctnnnncnnnnctnnngntncnnatntnagnnngnncnatngntnnnnnnannantngnn

SEQ ID NO: 864 - DNA, 4000 bp, Escherichia coli
  misc_feature (773)..(773): n is a, c, g, or t
  misc_feature (1997)..(1997): n is a, c, g, or t
  misc_feature (1999)..(1999): n is a, c, g, or t
  misc_feature (2908)..(2908): n is a, c, g, or t
ctgtattgggcgatttcaacccattttgcataaaatacaatgcagcttcttgaagctgtttgctggctgttttcaagggctcaaggaaatctgctttaaactctgggctttcgctggcgctttcggcgcagaaggttttgatcaactcaaaaaaggccagcgcatgtttgccaccgtcttggccgagttttcgaccaaccagatccaacgcttgaacgccatttgccccctcgtaaatcatcgcaattctggcatcgcgagcaaattgtgacataccccattcttcgatatacccatgcccgccaaaaatctgctgggcttgtacgcaaaattcaaagccgcgatcggttaggaagccttttataactggggttaacaagctgaccaaaccatgcgcgggttcatcccctgcaagattgctttgatcaattaacattgccccccaataggcaaaggcgcgggcgccttccacaaagcttttttgttgcattaagttgcgccgaatatccgggtgtacgatcaggggatctgccgcgtcatctggattttccggtccggtcgccgcgcgcccttgcaggcggtctttggcataagcgagggcattttgataggcggcttctgcttgggcgtagccttgcaccccaacccctaaacgcgcttcattcatcatcgtgaacatcgcgcgcatgcccttatgggcttgccccagcaaaaaccccgtggccccatcaaagttcatcacgcaggttgcattggcatgaatgcccattttntcttcgattttgcctacagagaccttgtttctgggccctaacgcaccctctttttgaaccaaaaattttggcacaataaacaaagagatccccttcaccccagcaggtccccctggaattttggccaaaaccaaatgaatgatattttcggccagatcatgatcgccggccgaaataaagattttttgccccgtgatggcgtagctgccatcttgattgggttctgctttggtgcgcatcagccccagatcggtgccacaatgcggttcggtcaggttcatcgtgcccgtccacttgcagctgaccatttggggcagataagttgctttttgctctgcgctgccatgggtatggatcgctgaataggcaccatgggtgaggccgggatacattccaaaggccatatttgctgaggcgaaaatctccgcgattgctgtcgccacgatataaggcagaccttgcccgccaaattctggattgcaatccagccccgtccagccgccttctttcactttatcgaaggcgtctttaaagccttttggcgtacgaacaacgccgttttctaaatggcagccttcgcggtcaccagaggcattgagaggcgcaagtacctctgatgccagtttgccaccctcttctagaatggcttgcaacagctcgggttcgagcgcgtcataacccggaatattttgctgctgcaatttcagaacgtcgtttaataaaaagcttatgtcttgaatgggcgcgttataaactggcatgaaaacaccttttactgatcaaaatggcggatggctggctttaaaggggcgcgcgtggacaaaagattcttcccccaagcgagctggctgcgaagatcatcaatgatttcttctaattcttgttttttcgcttcaagcgccttgagttggcgctctgcgcgctcatgggcttgtttgatttggatctgcggatcttgatccgatttatacagatcaagcaattggcggatttcttccaatgagaagccaaagcgcttgccttttaaaatcagttttagccttgcgcggtctcttttggtgaacaggcgtttttggccttggcgaattggaaaaagcagctttttcgtttcatagaagcgaagcgttcttgcgctaaccccaaatgtttcacacattctgccaattgtcatgtgggtttcgtccataaatgcggcctgtccgtaacgcgaagtttatacgatananacagcgtagcagaaacttgacgttaacgtaatgtagacgtcacgtcatttatttggaaaacttgttcatctcttgcagggtttgctggcgcaatcctttcaagtcttcaatggtttgcttaagctgctgctcttggtcttgcagctcaagcaatttgctatctgccatatcgacaaacacttttaactgggtttgtgtgccggcttgttcataaatttcaagccattggcgggcttcctcaagttggaagccaaacttacgggcccgcatgataagcgtcatccgcgccaattctcgcgctccataaaaacgagatcgcccctcgcgttctggctgcagaagctcgatatactcgtaatagcgcagggttcttggcgtcacctcaaacttggcgcacatctctttaaaggataacctttgttcggccatcttccccctcctgttatccatcagatagagcgtccctttgcgcagaacaaccattgcccttgcgattttttcacgttctaagtcatatttaaagcaagaagataaaaaacctatgcggagtaagctttggtgatgaataaaatggcacaggcccaacgtttcatggaggcaattccgcatgcaaaagctttggggatgaggtttgaaagcatcggcgaaggtgaggccgagatgcgcatggattataatgaaaatttcattggtgatccacagacgcgggtgatccatggtggggccgtttttgccttgcttgacagttgttgcggggcggcggtgttaagccatcctgatcaacgcggtcttacagcgaccatcgatttgcgggtagattacatgcgcccagcaatgccacatcaaacaatcagagcgattgccacctgttacaacgtgacccgcagcgtggcgtttgtgcgcgctgtngcgcttgatgaaaatgcggaaaagccggttgccatggcctctggggccttcgtgaacggagcatgaaagtgatgagcccgaaaccagagcctgttcaagtgatcaaaaagcgccgtgatgaggctttggcctcattggtcgcctcggtgccctatattcagttcatgggggttcattttgatcgccgcggggatgagcttacggctgtgatgccgtttcaggagatgatgatcggcaatcccgccttgcccgcgcttcacggtggtgcaacagcggcgtttttggaaattgcagcaattattgaattaagctgggcggcggtgtggcaggatatagaaacggcccccgatcgcgatgtcgcaaatctagaaacagccgccatcgccctgcctaaaacaattgatttttcggttgattacttgcgctctggcctgccgcgcgatgcctatgcgcgcgcgcgggtcaatcggtcggggcggcgctatgcctcggtttttgtcgaggcttggcaagataaccgatcgcgcatttttgcgcaggcaacagggcattttctgatgccggactcgcctttgcaggatccttcaggcgccccaaaataatgattatttcgcatgcccgtgttctgaaaattgcctttccgattttactggcaaatataacggttcccttgcttggcgtggttgacacggcggttgttgggcaaattgcatcgccgataccgcttgctgccgtaggtatgggcagtttgatcattaccacgattttttgggtttttggatttttgcgcatgggcacaacggggcttgcagcgcaggcgctgggcgctgaacagcttgacgaggtgggcgcgattttaagccgcgttgtaatgatcggattcgtggccggtttggcgcttatcttattgcaggggccgttattttatggcgcgcttttggtatcgccggcctcgcatgctgtggaaagtgatgcctctgcctatatgcagatccgaattctcagcgcgcccgcggcgattgcaatttttggtattacgggatggttgatcgcgcaggagcgaacccggcatgtgttagcgttgcaaatctg

SEQ ID NO: 865 - DNA, 4000 bp, Escherichia coli
  misc_feature (1977)..(1978): n is a, c, g, or t
  misc_feature (1983)..(1983): n is a, c, g, or t
  misc_feature (1986)..(1988): n is a, c, g, or t
  misc_feature (1992)..(1992): n is a, c, g, or t
  misc_feature (1997)..(1997): n is a, c, g, or t
  misc_feature (2627)..(2627): n is a, c, g, or t
acagcgcgatagtcaatagtccatctgttaattcgacatcatctacttttaagtccgtgtttaacataaacttacgctcaaaagatttaagactgagaccttgatgagagaatctttcactctcacttagtttctgttcttttttccccttgatgagcaactcattatcttcatgaattaactcaagttcttgtttagaccaacctggcaccgcaacctctattcgaaagttgcctgtgtccacattctctacaatgttatatcttggatatgatgtatcagtgttgtgcaacaaccactcattattcataccaagccaaaatttactaatatcaatcgtcatattatttctcctaatttccttttcagtaaaactatgcccaccctttcggtatggacgccattgtgcaagaaacccttcttacacttatgtatattatactaaaattaagaccaaaagtcaacaattattttttgattagtcatcgaagtctatcttgccctgcgctttcatgtagtctaaggtctttccgattccttcttgatgtccgtgcctgtatgcaaggtaaatgcatgataccagtattaataggtatgctatatctatgtccataatttttctccaatgaatatattatactaaaattctcaccataagtcaagtaaaaaattaggggtatctaaaaatagttgttgacacatggatgaagatttgttataataacagtatgatttataaaagaggtaaatggacaactaaggaaagacagacactcaaagacctctacaataaaataccaataaacgagttatccagtagattattaagaagaactactagcataacatcacaagtaaactatcttcgaaaaagaggatgggcgtttcacaggagaaaggatggataatataattgaattccctagaatgaaaaagtcagaagaaataacagataagttagcaactgcacttatcgctgcatgccacgaacaaggactgaatactacagatcctgacttcgtctttgatatggcatgggtacataagtttcttcaagcgacagttgacaatcaacataacattgcgaatgacctgtgtcgcctcacacgagcacaaggattaaatgagaattgaatgtagaacaataccagtagaaaaagccattcgcatactgagaagaaaactagatagagatggcagaaaagaaagaataaaagaactcgaattctacgagaaaccgacagcaagaaagaaaagaatgaaagctgccgcagtcaaaagacaacaaaagataactagcgagtatcgtaaatatactgcaagacgaccaagacatggaagaacttaaaaagaaatctctattgttttacgactttgcaagtgaaactttgtttgctttatgtgtatacttcttactggtagcacactcctttatagagtttttcgaacaaactcgttttggaagagatacaatttctctttataaaaaagttctctcgaaccctcccaaaatcctctcagcattcaagaaataaaatattttactcacaaaaatgactacaattttaaacaattatattcacctacgaaaaaaatatcttgtatttttgataaagttatggtaaaatattattatctaattcaagatagatactacggcaatcattaatttatctctcttgctcatagcgacctcaattaaaggatttcaaactgaattctggagggaagcgaagcgagactggaagaattcatctttgatgtttcttttaactgggagatagagcttacgatattccatgccaatcgtatcacaccaaagaaaagtcaactaattcataacgacttttcaccaatccccaactttcaacacttaactacactttcatactttttttgtgaaattatccccaatcgcaatttatttaaggtcattttactacttattcttttgggttggtatatggaaaattatannggtangcnnncaantttanggaaattatccctagtatgttatacacccgctatagcttttgctggttcgttatacacccgttgcaggtttgaaccaaagtggagcgagatatcagaatcgaactgatatctactggttggaagccagtcataatagcctttatactaatctcgcatatgtggcggtctgacggagaatcgaactccgattactagcgtgacaagctagggtactaaccattatactaccaaaccatgtggtactccgtagcagagtcgaactgctgttgcatggatgaaaaccatgtgtcctaaccactagacgaacggagctttatttagtctctttgaatcattcgtaagtttactacttgtgtcgtgaaggtaatattctcatcacgcaaagttaacgctagttgattctgtaattgtggctcaggttgtggactagatacaacctcaaaatactcgccatgttctgctataatcttacgaagtttgtcatttctaggaaaaatcttagcatatcttttatctcttatccccattactcacctcgccaaaccaattggtagccttcatgaccttcttcaccattactttcgtactctcttagagttaatactagatttttgagatctgcttttggngacttttccaatccgactatagaatctgcacttatgtcaagtataccagctagttcttctactaactctttcttggtaacggggtcttcgccagtctttgttttgtatactgttttcttgtatacgccctctctacttaactttcctattatagattttacactcttgttgagttcatctgccaaagcatctactgttgatctgtcaggcttcgcctgataagcttcaaccatatgttttacttgttcttctgtatagtttacactcatactatttccccttttcctattgttgttaaaaattcttcttgttcttttactatatcttcaacttcgttaggtgatagtaaccatgtttttgatagatttctgataattgcaggatgttccaagccttcttctagttgcatttcataatctatatgtagacatattttagctcctgtactcaacatcttgttcctccctgctcatctgatcaatacaatcttgtactgtcattttactacctactgtagttgatgtccacctaccattttgaagtttctcaaataattgagagtcatcattatatgtggttgtccaaagtttcttatctgcgtgaatatctccacttataagtttaacttttttacgccagttctcggctgctagcatttttctttgtctatctactaagtcgctaaactgccccatcatcatctccgttgtttgcaatgatgtacattagtacagcaaagcctgtgatagcgataacaaatgcccatacaaactcatcgtacgtcatagtctatccccctcttttacgaagatgccgtctatcattttgcctttacgatctttaatatcttcgtaagcaactgctaaacattcttctaagttagtgccttctctttcagcaatgttaattaatataacaagacagtctccgatatcgtctttgacatcttgttttttacatacgctgtcagataattcacctacttcttgtattagttttaatacttgatctttactagttgcaccttcgattaagtttctatcatgatgccactgtgagatcttttcaattagtttttccattttatctccctaaagtttttaaatccatttcggttatatactgataaccacctttgttgtatgtaatacctacttgcttttttcgctgctgtgctatagtttttgcactgctttcgccacaggataagcataacctgtagccaagctcccaccttgctggtggtactctgtttccacatttacacaacatcctgtagatcctgtactaagtctgtagacttcatagttttaccactagctaaagtaacattcatccagcgagggttctttttgataggcatgccatgccat

SEQ ID NO: 866 - DNA, 4000 bp, Escherichia coli
gtcgcaccccaagcagtttgttaaactactgggcgaggagagcctcttccagtcgtcagcgcgccgcctgtcgggcgcgggctttgccgcccctttcgttgtgaccggctccaacttcaggtttatggttgttgagcaactcgcaaccgttgagattgcaccacatcagattttgattgaaccctcagcccgcaacacggcggccgcaatttgtgcagcggcagtggcattagatgccaagaatggtgacagccttatgctggtagccccatctgaccacgtcattcccgacgcagagggcttcaggggcaccgttgaggcggctgcgcccacagcactcgcggggcagatcgtaacctttggcattcgtcctgatcgtgccgagacgggttacggctggctcgagctaacggcacgagccgccgagggctccccccctaccccgctgccgttgaaatcgtttatcgaaaagcccgacgcggaaactgccgaagccctactgagtagcggcatgcacttgtggaatgcgggtattttcctcttctcaacgtcaactattttgcaggcatttgcggaatatgcgccggaaacacttgcgggtgtgcgcggtgcccacagtgcagcggaaaccgacctcgggttcacccgccttgccgcggagccctggtccaagctcgaggacatctcaatcgactacgctgtcatggagcgggcgccaaacttgtctgtgatgccctatagtggggcgtggtcagacctcggcgactggcaagcaatttggcgcgagcgtgaggcgaaccaacacggcgttgtgacaagtggcccctcaactgcgctcgactgcaagaacacgctccttcaggcgaccaacgaggatcaacagctcgtcgcaatcggcctcgaagacgtcattgcggtcgccatgccggacgctgtgctcgtggctcacaaagaccgcacccaagacgtcaagactgccgtcgctgaattgaagttaaagggcgcggcccaggcggaaaccctcccccgcgactaccgtccatggggttggtatgagagcatcgccctaggtccgcgcttccaagtgaaacgcattgttgtaaaccctggcgcagccctgtcgctgcagtcccataaccaccgctccgagcactgggtggtagttgagggcaccgcaaaagtaacgatcgatgatgaagtccaaacgattactgaaaaccagtcagtctacataccactcggtgctgttcatcggatggagaacccagggaaattgaccctgacactcatagaagtacaaactggcagttattttggtgaggatgacatcatcagatacgacgatgtctacgctcgcggacagggtgccaaggggtgatggaactaactgcttccaactccaatacttaggtatccaagtacgggatgcgtcatggcatctgcgcactaagacaaagacttatggggtccgactttgtggtattatcggtgcgctgctgacagtctcatagcgcattcaagtaagttagccttttagggagatacaaaaccttgttgcaaagctggacttggctcagctcgggacccgtgtaaattcatcgcctactgaagcgcgccgccaattgatcgcgcgtcgcgcgacatgccctcaagaactgctcccgctccatttacaagtgaaccagtcccgcttactatccttctgacagtgccacacccgccaacaagggttataagccccacaataagaataaattgtctcatttactgctcgttcctatcattttataaaaaattaacgttttaaatcatacttgtcaagctcaccgcattgcggttgttaactatcctcgcgttaataaagccttaattacagccgggtattattctgtcagaaatgttctattattgctcttcatccgagatgtccgcttgctcaacaaaaataagtcgtctaaggtagatgagggattttggttagaaaaatccttcgggggactttgatgaaatggttattgacgagtgccatcgggacaactctagtactggcatcgtgtggagttacagtagatgacgcggtgcgagattacgacaccgaagctgaggcactggcgattgcgccggcgatagtttcagctggagatcccggcccaattcgcacgggctccacattgtcgagtaatctcaccaacgtaatcttgctaaacccagacgtgcgttcggcgctaagggcgagtgatgcggcgtcggctggcattaattccgctaagagcctattgcagccccaagtaactggctcgctacttgctgggggttaccaagacgacatatctgattcctctacgaaatctggagcgtcaatcgctgcgcaggtcacgcaactactgtttgatggcggcgcggcgcgaggctctatttcaatttcggagttggaggcaaaggaggccgaagtcagggcaagcctggtggccaatggcgtcgcatttcaagctgcagcggtctggcttgccaattggaacgcgcagtcaagccttgcatcgttgaaggcattggaaagcgaactgatgccgcatgcgaaacagatccagcgcatggccaacaccggtatgatagatcggtccgtctctgacatgatagagggtcggatgctggaatttgcgctctctgtctcggaggcgcagtataggtcagatatcgccgcttacgaatttaaaaaatattttggaaaatcgccctggcgacttgattacccaaagccttcgttcaaagtcgcggacttggaggcgagggcgtccagtgcaattacgcccgcattgagacaagcggcgttgcgcgttatgactgcgcgggctcaagaagatgtggcggccgcaaaatattcgccgcgtgtgtcagtggaagctggcgccaattcacccatggatcgtgacgaaaaaacaagcgcccgcatcggtgtgagccttgcgtttaatttctatgatggtggtaagcgcgacgcagatttggacagggcccgagagaatgtagtggctgcggaatatacgctggagagcatacgtgagacatcacggaaaatgttgtctgacttgctcgacaggcgcaggaatgttttggaaacgatccgccttaagtctgataagttagccgtattagaccgacagctaacggttgcagagacccaaattcaaacgggtcaggcagacgttgccaaagtatttgaggtgaaagtgcagcgacaccaattggagagttccataaggcaggctcgtgcagatttacgcgtcacagagtatcaggtggcgtctgagctaggtcttttctcactaccctcagaaaatggaacagaccagtgaatggagaagaccagcaagaacctcatctatatcaatccgatgcaaatgacttaaactttgaaggtttgattacagaagaggcagaaagcgttgggccagatgccctgccgagggctttgcaggctctgcttgcgcgtgatggcaagtcactttcggtgggggcaattctagatttgggtaacccaactgagggatcctacacgccacctgatgcggtcgacgcgcttacggcacttggttacaaatcgaattttggccgcttgcgggtaagatcctatcgcccgacgcactgccctctcatagccttcacaaaatctggcggcgcagttctcgtggaaggcttcgagaacgatggccgcctacgttacacagactttgccgctgcgacgagttcccaacttgcgacccgcaaagaacttgccgagttcgtggacgaatacgtagtcctagcagagcgcgatccagccttcgcgggggatcctactggcgcttcttggttttggggttcactcgcgcagagtaagtggctctattttcaagttttgatcgcggcggcattgactaattttttgggattggcgacgtctctgttcatcatggttgtttacgaccgtgtcgtcccaaatgaggcaatcgagtccctgata

SEQ ID NO: 867 - DNA, 4000 bp, Escherichia coli
  misc_feature (1928)..(1928): n is a, c, g, or t
  misc_feature (1931)..(1931): n is a, c, g, or t
  misc_feature (1940)..(1940): n is a, c, g, or t
  misc_feature (1964)..(1964): n is a, c, g, or t
  misc_feature (3333)..(3333): n is a, c, g, or t
  misc_feature (3392)..(3392): n is a, c, g, or t
  misc_feature (3579)..(3579): n is a, c, g, or t
  misc_feature (3654)..(3654): n is a, c, g, or t
  misc_feature (3657)..(3657): n is a, c, g, or t
  misc_feature (3690)..(3690): n is a, c, g, or t
ttgcccttgtctcccatttcgaccgcagagcaggtcaggcccgcggcgcccatgtcttgaatggaaatcacagcgcctgtggccataagctctaatgtggcttccatgaggcgtttttcggtgaaagggtcgccaacctgcactgttgggcgcttatcttcgatggtgtcgtcaaattcagcgctggccattgtcgcgccgccaaccccatcgcgtccagttttggcgcccaagtaaaccaccggcatgccgacgcccgaagcggcggaataaaagatcttatcggtatctgcgagaccggcagcaaaggcgttcactaggcaattgccgttataggccggatcaaagcgcacttcgccgccaattgtggggacgccaaagcaatttccatagccgccaacgcccgccaccacgccggaaaccaatgacttggttttgggatgatcgggactgccaaaggacaaagagttcatcgccgcaataggccgcgcgcccatcgtaaacacatcacgcaaaatgccgccaacgcccgtggccgcgccctgatagggttcgatatagctggggtgattgtggctttccattttgaaaatcacagcctgcccgtcgccaatatcaacaacaccggcattctcaccggggccgcaaatcacctgtggcccttcggtgggcagggtgcggagccattttttcgaggatttataggagcaatgctcattccacatggcagagaagatgcccatttccgtaaagctcgggtcccggcctatgatttcgagaatgcgatcgtactcgtctgggctcagcccatgggcggcaataaggtcgggcgttatcactggatcttgcaagttgtcatcccttacggtgcaaatttgcaccctgatacgaaagttaacgggcagagggaaggttggaatagctattaaatgccgcatttgcccgaaagactggtggaattggcaaatatcaagctcaaccgcatgggcgcgcgggcaaaaaaaatgccgggcacagggcccggcgtaagtccaacagggaggttatgaggggctaccactggctgccgtcctcatgaggcgtatttaggagcgccaatgcatccctgcaagccctctgggcgcaaagccgctatgcgctcagagcatagctacttttggacctcaaggcttcgctctgcgcgacggcgggcgataatttcatcttgcacaaaatcgcgaaaggccgcgatacggcgcgagtggcgcagctcttctggataggcaagaaacaccgggacttccgtgttctcaagctcgggcaggacacgcacgagatcaggaaaatcatgggtgacgtaatcgggtaaaattccgatcccaaggttgttgatgacgccttgcaacacgccgaaatagttgttgacggttaaagtggattttggactatatcccatcagattttgcaccaaggctgcactgacggccacttgaggtgcgttgggattttggcaaatcaaacgatgatttgcgatatcttctaaagtttgcggcgtgccgcgggatttcagatagtctgcgctggcatagaggcgcatttcgacgctcataaggcgctttcgaatcaaatctgcttggctcggctctttcatgcggatggcaacatcggcctcacgcatcggcagatccaagacccgctcctcaagcatcagctctacattcaagtcggggtatttttcataaagctgtggcaagcggggcgccagccagagcgtgccaaaaccggtggttgtggtaacgcgcagctcaccgaagacttcatcttcactgtctcgaatgcgtgctgacgcggcatcaaggcgtttggtcattgcgcgggtggcttcaaataacagctcgccttgctccgtgagtatcaacccacgcgcgtgtctatgaaacaatgtcgcntcnagggagtcntccaatgcgcggacctgccgcganacggccgattgcgacagatgcagtgtctcccccgcatgggtcagtgatccggcatcggcaaccgcatggaagattcgtaatttatcccagtccaccggcttacctcattgtccgttcctgagactcataacacgcaacttgagactgggtcacggagtttttcattgttaggtcatagtttttgacctaacaattattcgtgcataccgggaggccgcagaccatgcagcaagatgtttcactcgctgatagatatgatttgtcgaaaaaacaggttttgttaaacggcacgcaggccttagtgcggatgatgttgatgcaatcggcgcgcgaccgagcggcgggccataggacagctggctatgtcacgggctatcgcggatctccactgggcgcggtggattttcagatgacccgcgcggcggcagagcttgaaaatgcgcaggtgcggtttcaagaagggctgaatgaggatttggccgcaacggcgctttggggcagccagcaggccgagctgcgcggtgagggaaaatttgagggcgtgtttgggctttggtatggcaaagggccgggcgtggatcgctccggcgatgtctttcgtcatgcgaatatggccggcacctcgcccctgggcggtgttgtggcggcgcttggggatgatcacaccggcgagagctcgaccacattgcaccaatcggaatggacgatgatcgacagcttcatgccggtgctgtctcctgccggcgtccaagaggttatggattacgggctcttcggctttgccctgtcgcgctttgctggggtttgggccgggctgaaatgcatcaaagacacgatagaagtgacctctgtggtgaacggcgatcctctgcggttggactttgtcaccccagagttcgacatgcccgaagggggcttgaatatccgcctcatcgacacgccgcaggcccaagaggcgcgggtcattgatcacaagcgcagagccgtgcaggcctttgcacgcgccaatcggatggataagcgcgttttgggacaggctggcgcaaaaattggctttgtcgcggcgggcaaaaattggctggatttggcccatgccatgcaggtgctcggcatggatcagggggcggcggtgcgccatggggtgacaacctacaaagtcgccatgacgtggccacttgatatgcagtcttttgccgaatgggccgaaggtttggactgcatcgttgttgtcgaagagaaacgcaaactgattgagggacaaatcaaagaagctcttttcaatcaaaaaggcagctggcgggtttttgggtccaaagatgcccaaggcgcattgctctttgccgatagctatgcgctcgatccaatggtnattgcgcaaaaactcggtcaaattttgatggctgagggctgcggatcggcgcggcttanaggcgcgttggagaggattgatgcggcgcaaaccgcaaacaacgcgcccacattggccagccgcgtgccgtatttctgctctggctgcccccacagcagctccacgaaaattcccgagggcagccgcgcctattctggcattggctgtcattacatggtgcaatggatggatcgggagaccttgggnttcacgcaaatgggcggtgagggggccaattggattggcgagtcgttgttctccacccgcgcgcatgtgttccanaanataggcgatggcacctataatcactctggcatncaagccattcgcgcggcgctcgccgctggcacgaccatgacctataaaattctgtttaatgatgccgtggcgatgacaggcgggcaaaacaatgatggggggctggatgctgcgcggatcgtgcaagagatgcgcgggatcggggtgaaacatcttgccgtggtttatgatgaaaaggaagacatctctgcggctgattttccggctggcactccgatgcacccgcgcgcccagctcaatacggtgcaagaggcatttcggcaattgccgggcgtctctgtcattgtctatgtgcagacctgcgcggcgg

SEQ ID NO: 868 - DNA, 4000 bp, Escherichia coli
  misc_feature (1626)..(1626): n is a, c, g, or t
  misc_feature (1993)..(1993): n is a, c, g, or t
  misc_feature (3805)..(3805): n is a, c, g, or t
agtgctctcgaaagacgggactttcttgttcaactttttcaaagggttggcagtcctcctggcttggatggggctccttgctgccatgggactctgggctgccacttttgcttcactcccggtggctacctttctcatcctcactgtgctgatggtgaccagctcagattccctcttccaatccatagtcagtgaaggcacgatttcctcggtcgatgagcatactggaagagcgagctgggattacttggattggttcatggttcccatctttacgttactccatcattttactgaaaccctccgatccatcgcccccatcgatcggctggtcacagggcgaagcattccatttgcagccctgatcacccacatattactggtgatcggtttcctaggaggctccttgatgggactggggatgttgttcctcacacgaaaggaattggatcagagatgagttcacccttggcatcaggaagcatgagaaaattggggttggtttgcctcatcgtgctggcaattgcctcgaaccattgggtgcagggtcgtctgaacctcaaacgcctggagcttgggctgactcgcatggaacccttgcgcaatgcaccccccattctggctttttccagcgtcgccctgggtggattccgcgggctgatagccaatgctctctgggcaagaacctccagactgcaggaagaaggaaggtttttcgaaaccctctctctggcagactggatcaccaagttacagcccacattcccatcggtctggaccttccagtcgtggaacatggtctacaacatctccaagcaattcgaacaacctgaggaacgttggcgctgggttcaaggtgggatcaacctcctgaggcaagaggcgcttggatataacccagaatcagctgagatctatcgagaattagcgtggattttccaagataaaatgggaggcaaccttgatgacacccatctttattacaaggaacgttgggccagagaaatgcggcagattttaggaaatgccccagatctagacgtcatcctcgcctccaaagaccagcaggtgcagcagttacgtcaaagactgctcgatcagtttggcatggatgtcgagaccatgaagcgcattgaagataacctggggaagtttgactggcgcctgcctgaaacccaagcgatttactgggcatgggttgggctggaaaacgcaaagcaaggggagaaaaattttctgcgccgcatcatatggcagagtatggctctggcctttgaaagaggccgactgattgaaaactctatcgaccaaacactcgagtacgcgcccaatctagatcttgctccctacactcatgcgatgtttctcaaggtcagaaaagaggaagagaacagcaattatctcacgacaatcgatagggcacacactgaatttttgcaaaatgcctgctactatttttatctccaccatcagcttcagactgctggtctttggtttgagcaattgcttgagcgctttccggattccatccccgatggcatgagtctggaggcttttgcactcaatcgatttgagcgcaacctggtcaaagccgacatgaaccaagccagggtgatcattgagggnatgcaacgccagttcctttactacctagccttaggggaagaacaacaagcgctgggctattcgaatcttgcgcaggtagcctggcaacgttaccaggaccgagttgaggccgctagtcagcgactttccctacccccttacgacgaactactccaagggctcttagggcgtattttggctggtgaagagggtttcagcgaacccatgatcgccgtattgaaaacccgtgttgcccaaaaccaagacgaggcgacctcccggtaactgacaaaagggcccccaagtaagccctgcctcccggttaactcaacacccataagactcaaaacccattgcaatcagtgaggtttagcgtcacaataccgangtcatgctccttctgtcgccctagcaagccagggctcctcgaggaaaccgtcgaagaaaacatccaggcagccaccaaaccagaggaccctcatgtcaaaccccaccatctccaaggttttggaaccgattctgcggtgctaccggcaacagcaactcaggcgccaaatgtccttattcctgaccgttacgggtctgattggcttggggcttgtcgccttagcaaatgagcttgccctggctaaaagctttctttggaaaagctacgccctcactgtgggattaggattactgtttctttggctgcgctcgctccgaaaaaagcactcagtccaggagcttgcccagcgtatcgaacaagaacatccctccctgcgggctgcgctgatcaccgcactggaccaaacccccgacccagccagcgggcaatatcattacctgcaggaaagggtgattcgtgaggcgcttgagcatcatctcaagcaaccctgggaccactcctttcaccttagattattttattctggcatcataagattttgcagttttctcattgttctagtggcgacttacctgctcgccaacttggccgtggatcatcaagaatctggggcttctgcagccttcagtggcatgttgaaggtggagccgggcaatctagagttggagaagggagatgcggtcgtggtgaccgctcgatttgggaagcatgtgcctcaaaaggtttcgttgatcatcatgccgtcagatgggaacaccaggcgcatggaaatggcgcgaagcatggaggatcctctttttggtgccagccttctttcagttgaaacagatacggcctattacattacctttgacgacgagcagtctgaaacttttaagctgtcggtattcgagttccctaaactcatccaggccgatgcccatatcaattaccccagctacacggggctcgatgagaggtccatcaaagatactttgaggatctctgctgtggagggttcccagctccgctacgaattccaaatcaacaaggcacttcaatcagccatgctcatggatcaagagggagccttattacctctggtccctgacaccctccggagtaacatttttctattggaaacgcccctgcagaccacaggacgctacgaactccatctgactgacctagaaggacgcagtaacaaacaaccaccctctatccatatccgggtcacacccaatgaaccccctaatctcaagtgggtgttcccaaggggtgaccagcgattttctgctcttgaggaggttgagtttgaaggcgaggcttgggatgactacggcctaagaggctatggtatcggctaccaggtttcaggccaagacgctattgaggtaacccttggcatggaggcgggtgccaaggaaaaagcgaacctgaatcacctgctcgaactcgaactgctaaagatgcaacccggcggcctgatttcctactatctttgggctgaggacttaggcccggatggtgcgctccgcaaaaattactcggacatctttttcggagaaatccgcccttttgaggagatttttcgtcagggtcagcctggacagtcctcatcacaacagtcagagcaacaagatggagcctcttctcaacaagacccagccatgcaattggcagagatgcaaaaggagatcatcagtgccacatggaatatcagaaggcgaccgagcggcagtgccctttcagatcaggacagcgaggatctcaatgtcgttttggaatcccaggaagaggccatgaaccaggcccaaaccatgcttgaagaantgaccgatgctgaagccacagaggccatgaatcaggctcgtgaggccatgagtcaagcggccgactccctttacgatggagtccatgaccgctcgctcacagccctttctcaggcgctggtgcatgaacagcaagcctaccagtggcttctcaagtcacgtcccaacgaatccaatgtcacgcagggacagggtg

SEQ ID NO: 869 - DNA, 4000 bp, Escherichia coli
  misc_feature (1922)..(1922): n is a, c, g, or t
agcaaaggtctcctacacgctgaaaaccgaacatcgagtagtagatatagaatggaatcattgggtaattacttacgctgtaggaggtcgctgcggcaagccacgctgaaaatgcgcccgcctcgctgatcccttcctcgagcatctgaccctgcttgtcttcccgataaaacatcacctggttggaatcggcggggtcgtaaagctgacccacagaagagtaaatccccatctgcctaaacattccctccataccgaaggtgcgcgcctcatcaggaacgataggtacaactcgctgacctatctctttatccttagccaaagtagacagcatgcgcacaaatgccattgtcgtcgacacctcacgctcaccgctgctctttaattgcgcatcgaaggcgcttaacgtaggcaccggcagcggtgtcgtaacactacgacgctgcggcacaggcttgccaagagactcgcgcactttacgcatgtattttagctcgaggctgtcctcggcggggcggtaataaggcacctcttcgagcttatcgtcaggaataggaataccaaaacggtcacggaatttcttcagcgattcgatgtcgagtttcttcacagagtgagcgttgttttgcgcctctgcggtatccccgaaagcatagcctttaacagttttggcgagaatcaccgtcggcttgccactcgcgcgtgttgcctcagcgtacgccgcatagaccttataaggatcatgcccgcctcggttgagcgccataatatcgtcgtctgacaagtgttcgaccatcttgagcagttcggggcttttaccgaagaagttttcgcgcgtgtaggcgccgccacgggcaacgtaattttgatactcgccatcgaccacttcgttcattcgcgcctgcaaaattccatctttatctgcttgcaacaacggatcccaatgacgcccccagacaactttgatgacatcccagcctgcgccgcggaaaacaccctcaagctcttggatgattttgccattgccgcgcacggggccatcgagtcgctgaagattacagttgattacaaagatcaggttgtctaacttttcgcggcccgccttgctgatcgcgccaagcgattcaggctcatcggtttcgccatcgccaagaaacgcccaaattttgcgacgactgttatccagaagtccgcggctagtctgatatttcaacagatgagcctgatagatcgcctgaatggggccaagccccatcgagactgtgggaaactgccaataatcaggcattagccacggatggggataggaagaaagcccgttgccatctacctcttggcggaaattatcgagttgtttttcatcgatgcggccttccaaatacgagcgcgcgtaaataccgggggatgaatgcccttggaagtagattagatcgccttcatcgtgttcattaggaccgcggaaaaaatagttaaagccgacatcgtagagggttgccgcggatgagaatgttgagatgtgtccacctatacttggattgcgcatgttcgcgcgcatcaccatcgccattgcgttccaacgcacgatgcctcgaatctcgcgctccatgaacatatcgcctggcatgcggtcttcggtcgtggggcttattgtgttgcgatagtctgtataaaccgccgtggaatcttcgcgtggatcgacgatggaggcgcgagcggacagcgtgttgagcaaataatgcgcgcgatccgaaccttcttcgtcgattaccgaattaagcgcgtccagccattctttggtttcttcggggtttatatcttgatgttcgctcatcgatttcatccttaccctaacatgattagtaaagctattgccttacataatgggtgtaacttaattacaagatgacagaattttagtcttnttcacccatggattccagtttcgttgaaaaaatatgtagttaaactacaaataattacggcgagttgcgtaattactcggtatcggcctctcatcctaaaaaccttagcttaccaaatggctaagcgcctatgagcgtgaccaccgcgacgacgacaagccaaacgatttggctacgctcgagaagcccacttaaagcctctatctccagacgcatcgcagcctcgtcaaagtcaccccccttcacctcacaggcggccgactcggaaagtgcgcaccgagcccaatcggctaacaattgggcgttatcgctcgccacctcaaactcccacagatggcgccgaagacgagagacacagctattaaaatcaccaacgagagagaaggtgattgccagcagcctaagcggcacccactcaataactgcgataatcctctcgagatgcgccgcgagggtacgatccgactcttcgcaaagttcggctctaagttgatagctgacatagccaaagattacgcctacggggcctgcaacaagatacagcgcgtacatcataaacattcgttcgaagcttctataagcgagcaggcgcttaaattgagcgacgattactgcaccgtcttcggtgcgaggaacaccttcgagccggagctctgtttctagatagttgatgcatccctgcctatcacctgcgttccaggatctcaggaaatcgcgaaccaacctcccaggctgagttctatccattgcgaaaagaagaacaaagagatgcaaaagcatcgtcgcgaggccatagaatgttccctcggccaacgagccgagaataagcatgacagcaatcagtacgccgtagatagcgcccaaggcagcggcaattgaatacttgccgccgccgtgggttttatcaaccagcttacggatagctcgttgatagcgcccaaaccatgaatcatcaaagcgctcagcatctcgcagccaagtcgctgtcagcaccaaggcaagtaagataaccaaaaatttcacttagtatcctcgctcgaaaaaatattctgaagcaccaaaggcaaccggcgctcgatttacgaaaattctcgaagtcgcgcgatttcgcagccgagcttttgccaatcaaacccttcacccggatcagtcttgcgtcccggcgctatatcactgtgaccaacgatgcgttcagtcgtcacgccttcgtaataggactccaacgcaatgaccagagctgcgagagcggtatactgcgccgcctcaaaaacatcgtagtcagtaccctcaagctcgattccgatcgaaaaatcattgcactcctcacgcccctcaaagcaggagcgaccggcatgccacgcccggcgatctaggttaacgaactgagttactttcccagagcgctctatcagcacgtgagcagagaccttgagaccagcgatctcctcaaagtaggggtgctcactaacctgaggctgattacaaaaaaagcgctgaactgccccggtaccgtattcacccggcggcaaactaatactgtgaacaacaacaagatctatcggaacgcctttgggccgatcgccgaagttgggcgagaccacctgctccgcgggtgtaatcgtgccgtttgatatataaaatctcatgaaaaggttaataacctgtgtccaatgtcccataagcatacgccagcacagcgcagcacgcataccctctattcctattctatcggccttgcgccatacttctatcacgtcacgtaagatcgacacctaatccgcagtcacgcaggatccgcaatgcaaacaaaccgccctaacagcgaccttccgtcacgagaagacctcatcaatattgttagaacgaccttggaggaagatgtcggcagcggggacattaccgccgcgctcattccggccggccgcgccgccacagcaaaaatcattggtcgtgagcccggaattctttgtggcacacactatgctgaggaagttttctcacaaatcggtctcacgtcgggcagtgtcgctattgattggctggttggcgatggcgatgaggtaaaggacggcactgtc

SEQ ID NO: 870 - DNA, 4000 bp, Escherichia coli
  misc_feature (316)..(316): n is a, c, g, or t
  misc_feature (967)..(967): n is a, c, g, or t
  misc_feature (1513)..(1513): n is a, c, g, or t
  misc_feature (1974)..(1974): n is a, c, g, or t
  misc_feature (1987)..(1987): n is a, c, g, or t
  misc_feature (2011)..(2011): n is a, c, g, or t
  misc_feature (2019)..(2019): n is a, c, g, or t
  misc_feature (2296)..(2296): n is a, c, g, or t
  misc_feature (2305)..(2305): n is a, c, g, or t
  misc_feature (2307)..(2307): n is a, c, g, or t
  misc_feature (2344)..(2344): n is a, c, g, or t
  misc_feature (2425)..(2425): n is a, c, g, or t
  misc_feature (2446)..(2446): n is a, c, g, or t
  misc_feature (2455)..(2455): n is a, c, g, or t
  misc_feature (2458)..(2458): n is a, c, g, or t
  misc_feature (2476)..(2476): n is a, c, g, or t
  misc_feature (2479)..(2479): n is a, c, g, or t
  misc_feature (2647)..(2647): n is a, c, g, or t
  misc_feature (2650)..(2650): n is a, c, g, or t
  misc_feature (2668)..(2668): n is a, c, g, or t
  misc_feature (2695)..(2695): n is a, c, g, or t
  misc_feature (2722)..(2722): n is a, c, g, or t
  misc_feature (2738)..(2738): n is a, c, g, or t
  misc_feature (2749)..(2749): n is a, c, g, or t
  misc_feature (2767)..(2767): n is a, c, g, or t
  misc_feature (2881)..(2881): n is a, c, g, or t
  misc_feature (2992)..(2992): n is a, c, g, or t
  misc_feature (3001)..(3001): n is a, c, g, or t
  misc_feature (3531)..(3531): n is a, c, g, or t
  misc_feature (3661)..(3661): n is a, c, g, or t
tgtgtcgttacacgatactgcaaacagctgcgctttcacgtcatcgtattggtttgcaaaagcagaaacgttaaaccgaacggtgttatcgaataaaaagctcttcaggccaatttcgtaagaaataacttcttcattgtcgtatagcggatcggcaccacgcgctaccaccctcgcgtcgttagcaccaccagtacgataacctgttgctgcactggcatagaccatcatgtcttttgcaacatctagctcgtaagctaatttccacaataccgctgagtcgtcccaatcgggaattgaatcgcctgtaaatgtnttttcgtctttgttgtagcgaaggccaaccaacaagcggttgctgtcgttaagttgataacgagcttggccaaatacggctacagagtcgacttcatgtgggtcgtgatttggatttccccacgaaggaaccgtaatagaatctggctcaccgttaccggttgtatcctcacgccacagccattcccaatccgcttcttgcgagaacaaataaacgcctgctatccaagaaaacgggctatcgctttcaacagatgacaactgtagttcggtagaaaacgctttttgatcgtcctgacgtccaaagcccccaacaaagtctaagccaccatcgctgtagtcgttatcgtagaattgctcgcctgacagttcagaataattggtggtccactttgcgtttgcccagtccatcgcccagtcgagggtcaaggttgccgaccacgcttcttggttatcaaaagacaccgcatttctgtatacatcgtaagggccttcatcatctcgctctgcatcagctggctgataaatgtggccaggtgttaccgtagcaatagggttgtaaacgcccgaccccggtgaggtttcagaaatttgataacccgcaatttgttggtaaccccaaatcgcttctgagtttgcgtctttcttactntaatcaaggcgaagcaatgcagtaacatcgtctgagaattcgtatttagtcgtgttacgtaagtagaattggttcttttcgcgtaaatcgtctgacgagcccggcaagaaatggttttcgatcatgccgtcatgacggtcgtggctcatgacaaagcgcgtagcggccttatcactaagcggcaggtttaaaatagcttcataggccgaacggtcatagctaccatgagtaagtttcacagaaccactggtatagccaagttcaggctgctttgaaataacgttgatactacctgcaaatgtatttcttccatacaatgttccctgcggcccgcgcagtacttcaatgcgctcaatatcaacgtaagcccctaagccaccggtggtcgttggcacataaataccatcctggaaaataccaacaacttgttcagcaatacctgtaccggccacgccgacttcgttggtacgagcaccacgcatagcgggacgaacttcaccacccgagctgcctattcttaatccgggaacaacgttttcaagaccnctaatattttcaatgccgttacgcaaaatatcatctgcacctaacgcgctcacagaagacgatacttcctgcaaatcttgagattgtcggtttgctgttacttcaatacgttcaacacccgctgctttagcttcgctgtcaggggtttcttgttgggcgctagcgcaaaaactaacgctgattagaagtgcactttgaatagcgcgggagaggtatgttgtatggtactttcgttggtcttgcttcatcgtgatagttcccggattaataaaaccttatctgcagtaacctgttagtgccctgcgtttatcaagcctttgatgaccctgcctgtgacaacatcatactaggttgtttaattcttggtctaaacaaacatacaactcaatttacttcgaagtcaataaaaatgttcaaagattgttaattcatgaattttaattttttgtttaaatacattnagaacaaataaangcatgtaataaaaggctttatttntaaacaangagctttaacaatgacagtaaaaataagatttcgaagtataaatatagacttcaagtcaaaaatgactggtaggatctgcatagaaaaatggcactcgaatggatagaaaccgaatgctgatgcatgagttaagcattagtgaaaaaaggtaagaaagtgcacttgagatagcttgggttatcagaaagcccacctagcaaaaacggacgttttgctaggtagctttgagggaaaatgacgtcagtcagtacacctatttcaggtataaagcctttngtattgttngnttaactgtaggtggtagtgcgcgataagatatctaanccttgctgttttaaccaataaggcacatccatcaacacccagttttccagtaatttatcccctttgcgatagtacacatcnaccactcgcatgtcggcacgnatacccgangcnggcatgccgaacaagccnccnccagccgtattcgataggttcggccagccaaagaaacaggcaaaattgccttcactaaagcgcgccacatgaccattaaacactttatctttcaaacctttacgaaaaggaaattgatgttgctgctggtaacgctcgatggtgtatgtagcccctattcccgctggnccntaccacaccatatcttcnctccagcatttggcgagaagctctggnggacagttgtcgttacccgatttattnaaagaatctaggtctnttaccatttcntcaaccagctcaatggtntttttagactcctgaggatcttgctcttcaaacagtaaaccgttgtgatcacatggccctggataaacaaacgtatggcctgtttctacgggcaaaggattaagcccaacttgntgcattagtgcaattaagtcgaagaaaatagcgtggctaactatcttattttcacgtacttcaaaaaactcggcataccgtaaaaaagccagtttccccgtacttctaatnccaagaaanggcttgtcgaacagtccagcaaagtgacccatcgacataacccacttgccttcgccggcgctgttatctcccgccatgaatacgtcctcacggcgcttcatacgcgtaaaactctgttttaacggctcccacaactctttcactaattctgctggagtcgaacatttatcaaacggatagcaggcataaatctttgcattttcatcaacatacgatttcactacgcctttaacatcacttgcctcacctttgtcaaaagcggcttgataggatctgacaacggctttttcgctattaaaactcatgacttacgcctctttgtttaaaaaattgttaatactggcctgaaataattaatgacttcgaagtcattatgtattaggttgaatattattgtaaatagaaagcgcgcttattaagcaggcagagtaaagaatatgactgaaaattttggcgttttaaactggtctatcttaggcgggtacatcattgcgaacctgttgctaggtttggtgattggtaaaaatatnaaaaattccgacgatttttatctcggtcaaaaacaaactccgtggtgggcaataggcatttcggttattgccacttacgttagcgccatgacatttcttggggcaccagcctgggcttattcagaggggntatccgttatagcacttcatttgaactaccctctcgtcatcatggctgtaatcatattctttttcccattcttctataacgcgggtgtcgcgtccatttacgattaccaagaacggcgtttcggcaagcgtgcccgcgccatggtatccagcatttttatgctaagccaaatcatgagctcagcagctattctttatgctacctctcttgtgttgtcgttcattactggcgtacctgtagtgtggtctatcgttatagttactgccatagcgcttatctacaccatgatgggcggcattactgccgtaatttggactgacgttattcagtcagtgatct

SEQ ID NO: 871 - DNA, 4000 bp, Escherichia coli
  misc_feature (121)..(121): n is a, c, g, or t
  misc_feature (158)..(158): n is a, c, g, or t
  misc_feature (230)..(230): n is a, c, g, or t
  misc_feature (381)..(381): n is a, c, g, or t
  misc_feature (435)..(435): n is a, c, g, or t
  misc_feature (438)..(438): n is a, c, g, or t
  misc_feature (513)..(513): n is a, c, g, or t
  misc_feature (540)..(540): n is a, c, g, or t
  misc_feature (621)..(621): n is a, c, g, or t
  misc_feature (690)..(690): n is a, c, g, or t
  misc_feature (692)..(692): n is a, c, g, or t
  misc_feature (702)..(702): n is a, c, g, or t
  misc_feature (765)..(765): n is a, c, g, or t
  misc_feature (801)..(801): n is a, c, g, or t
  misc_feature (840)..(840): n is a, c, g, or t
  misc_feature (875)..(875): n is a, c, g, or t
  misc_feature (1029)..(1029): n is a, c, g, or t
  misc_feature (1044)..(1044): n is a, c, g, or t
  misc_feature (1057)..(1057): n is a, c, g, or t
  misc_feature (1080)..(1080): n is a, c, g, or t
  misc_feature (1428)..(1428): n is a, c, g, or t
  misc_feature (1431)..(1431): n is a, c, g, or t
  misc_feature (1989)..(1989): n is a, c, g, or t
  misc_feature (1997)..(1998): n is a, c, g, or t
  misc_feature (3196)..(3196): n is a, c, g, or t
  misc_feature (3261)..(3261): n is a, c, g, or t
  misc_feature (3838)..(3838): n is a, c, g, or t
cgcgggcaatagctacggtgcttctgtaaaaacccgccacagaaagaccaactgatccggagaaaatgatatcgggatgtccaataaacaccagcgtattggccacaaatgatataagcanaatgaacgctgcaggctttgctacgcgcaaaaactcnggcaagcttacacgagcactccacaaaaggctcacgcaaatcaaggcgaacaccgcaaaggcaagtggctgntgtactgagaagagagcaacaatacccacaaaagtggcaacgatttttgtctgcgctgtcaatgaagcaagcgagaagtgcttaagcagagcacaggggcacttagacatagcaggcctccaaaagctcatgcaatacgcttacaaacagngggcaatcaagctgcgcagcctcgtatatctctggggttgtctgtgcttcttgnacnttgacgtctgcaacaacacagcccttctcgagaaacactactctgtcagcaaaaggaagccattcgcttacatcntgggtgattgcaagaaccgctttgccntcgtttgccagctcacgagcaagatgcagcacctgcgagcgcgcctcgccatcaagtccagacgttgcctcatcaaacacnaccgcgtacgttgcgcaggccagcgttcctgcaagcgctgcgcgacgagcctggccaccagaaagcgtnancggagacgcntccatgacctgctggtcaagccccacacgtgctgccgcatacgcgacaagcgcctcaacatcntctggcgagaaacccttgttagttggaccaaacgcnatatcttcagcaacactttgggcaaagagttgatcctgngggcgctgaaaacacatgccgacatctccagggcncaccagtcgcgcatcgattgttgcgtgcccggtatcagcctctatgaggccagcagctatgcgggcgcaggttgtttttccagagccagaagcgcctaccataacaacaagctctcccgtagaggaaatagttacgtcatgcagaacgggcttntcaaacgcatgaganacgccacaaactnccagctcgtgttcctcgccaagngcttgaattccgtcatagttgtttgctcgcaccacctcaagggcacgctgatacacaagggtatccaaagcatcaaacgcaaggttgttctgaacaagaaacgcaacaaactctgatgcgttaaaaggcacatcaaacttatagccagcctgtgcagctatatgcgctgttgctgtgagtgcatcatcaaaaccagcgtttgcgattgcgtttgcatccaagagaaactctgtgggagttcccgaccaaactagctggcctttctccaaaacaagtacctggtcagccccgggaagagactcaaacgaatgagaaatctcaagcatacccattccgtttgtaacaagngtntttaccaggttagaaaggtgatttctgaatcgagtatcaagctgagcaaatgcctcatcaagcaccagataacgtggatgcactgaaagcgctgctgcaatagaaacaagctgctgttggcctccagaaagcgtatgggtaggcgcatcaatcaaatcggcaatgccacaaagctccagtgtttgagtaacgcgagaaactatctcttcttttggcaaaccaagattagcagggccaaaggcaacttcatcaaagacagttgcacaaacaagctgcgctgttggatcttgacgaaccattcccacaacggaagaaatctgagtagacggcactacggtcactgaattgccgtctactaaaacctctccggatagaggaaaaagtgatgcattacaaagatttgcaagcgttgacttgcctgaaccattgtggccaagcacaaccgttctagagcccggctttagggtaaatgaaacgttatcaagggttagtgccattgggtgcggagattggctctcagtggctcctatggcatcttcagaagcagagtcagtcatngattgtgnngcagctaacgtaccgtatgcgaaagatacgtttttgaactcaatcatgacaaccctccttcatttgaaaaagaggtcccagcaaaaagccaggacctcttcagattcactttgacagaagttactctgcagcctcttcggtctgctcggtctcctctgctggagcctcggtctcctcttcctttacaggagcaggagcaaccttggtagccttagccttcttgttagaagcctttggctgaactggctcggtaacgagctcaaggataacaacctcagaagcatcgcccttacgaggaccaagcttcatgatacgggtgtagccgccgttgcggtcagcccacataccctgagcagccttgtcaaatacctcacggacaagctctgcgttaccaaccttggccatagcaagacgacgagcgtgaaggtcgccgcgctttgcccaagtgatgaccttgtcgacctcgccgcgaactgccttagcgcggacgtcaagagtcttaatacgatcgttagtgaaaagggcttggatcaggctcttcttgatggccttggtgtggctagcatcagtaccaagcttcatgcccctcttcttattgtgcctcataatttacattctcctatgcgtgacaaggcgcgactaagccttaagggacaggcccatgctctcgagcttttccttgacttcttcaatagacttaacaccaaagtttctgatgttgagaagatcgttctcagagaaatcaacgagctgacggacagagtgaattcctgcacgcttgaggcagttgtaagaacggacggaaaggtccaaatcctcaacctgcttctcaagctcggaatcgtcctcgacgtctgccttagcaaaaatcgaagcctcttcctgagtctcgtcaaaatcagtaagtcccatgaatgcgctcatgtgctggttaatgatgtttgcagcctcaacgacagcctcgcgagggctgattgcaccattggtctcaacctcaagcaccagacgatcatagtcggtgtgacggccaacacggcaaggctcaacagccttagcgcagcggcgaactggcgagaagatcgagtcaacgtgaatgaatccaattggatcgctctcacgctcgttatcctcaccggaaacataaccgcgaccattaccaaggcgaagtctcatggaaagatgagctccctcagcaagngtgcaaatgtgctgagctgggttaaccagctcgtagcccataggaacatcaagatcagcaccagngactttgcaaggaccatcaacagagatggaagcctcagcctcatcagagttgttggtgttgcggaaaactaggcccttaacgttcagaacgatgtcagtaacgtcctcatagacgccttcaaccgtagtgaactcatgctgaacgccatcaatctggatggcctcaaccgcagctccctcaagagaggaaagcagtacgcggcggagggagttgccaagcgtgtcaccatagccacgctcaagcggctctacgctcacacgagcgacgtttgcgccgatttcatctaccgacacgtttggtcggataaattcggacattgctacctccaaaacgggtcgggcttacttggagtagagctcgacgatcagctgtgcgtcaatctcaaggtcgatctgatcgcgggttggaagctgaagaacagtgccctgcagcttctcaatgtcaacctcaagccatgcaggaactgccatgtgctcggaggaaatgagagcttccttgattggaagaagatcctttgccttggaagcaacagcgataacatcgccgctctttacgcgataagaaggaatgtcaacncgctgaccgttaacggtgatgtgaccgtgacggacagtctgacgagcctctttacgtgtacgagcaaagccaaggcggaagatgacgttgtcaagacgagtctcaaggatgctcatcaggttgtcaccagtaatgcctgggttcttcttagccatctcatag

SEQ ID NO: 872 - DNA, 4000 bp, Escherichia coli
  misc_feature (1986)..(1986): n is a, c, g, or t
ggaccggagacggggagcgggcgcgggagcggggacgcgagcggggactcgaacgcgaacgcgaacgcgggggggcaggagagcgggtcgatctgggggaacgtgttcggcggtggacgaaaagccgaagaagagtccagcgggtcgcccgcgatgccggatttcggagcggcgacgacggagctaaagtgatcgaggactcgaacgcgcgcggcgggacgcatagaaagacatttaatccagacagaaacgtccgtagtgaaactaaactaaagtctaatcgatcacgagctcgcgaacttcgacgccttcgaagtttgagtcggaggatgtggctaaggtgagcgcgcgcccgttttcgagcgcgaacggtgtccggtcgcccgtgaggtggaaatcgtcgagcgtcgcgtagtctccatctaaaacttgttcgagaacgcgatactttttcaattgctgacgcgcgcggaacgggaggtcgagctcgaacgaggtcaacgcccgcccccacgccgaatgcggtcgacgagacgtcaagaagacgtcgacgtcgcgacacatcggacaccctttcgccgctgagagcgcgacgtacgacgcgagacagtcttcgcagaaagacgccccgcagcacggcgcgcgagcggcttcgcccgataacacatcaaggcaaatcgtgcacgactcatcgcgcgtcacgagttcgtcgtctaaatcaatcaacggggtcgtctccgtcgtcgtctcggacggcttggcgctgcgaaaaccggtgggaatcgcgaagactttgcaatgtatatcctcctcgcgcggcgtcggtgcgtatttctgcggcatcggcgcatcgcgtgtgaccacaatgacgtacgcatcgccgtcgtacgtggtgacgtctaaaaccgttctcgacgtcttcgcgtcgggattcgcgaggcacgcctccacgttgacgcgcaacgcctcgagcaagccccgtcgcgagtctgtcgacccctcagccctggagtcgatcacgtgcaccgggcgctcgccgtcgagccaaacgacgacgatgaattgactcgaaatcgcgcacgacggcacggtaggcatcgctcgagccgccagctcgagcgctcgacctcgcaccgcgccgaatcgcggcatccatcccaaatccaccctcaacgacgtcgcctcgatcgcgcgcacgcgcgtccgcccacgctcatccaacgtgaacgcgcacgcctttcgctccagcaccgcgtactcttcgtcgaaattaatcgcaatcgtcacgtactccaatccttcgccgccgtcgagcgcgcgcacgcgagcgaacggcgcgagcgtcttctcctcctccatccctccccgcgcgcttcgcctgtccgcgttcgccgtgaacaccgcacacgccgtcgcttcatccccacgcagccgccatatcgccaagcacgacccgtttcccgcgaactcgtcgcccgagtggttccacttcgtcgccgcgcgcgcccacgcgtactcccccgccgtcccgcacccgccgaccgcgcaccgtcccgtcgccggccacgccgtcggcatcgtcagcgtcttcacgacgtctccggtcgccccgtccaggacgtcgaccgcgcacgtcggatcgccgcggcaccgcgcgacgcgtcccgccgccgccgccgtcccgacgcagcacgcgtccaccgccccgcctccgccgtcgcgcgcgtcgtccgcccgcgcgcgcgcgtcgcgcgggatcgacgtccacgtcgcgcgcgcgcgatcgccgtcgcgcgcgccgtcgcgccgcgacgccgcgtcgaagcgcgccaacgacccgtcgtcgaacccgacgacgacgacgtcgccgcgcgccgcgaacgccgtcgcgcgcggcgcgcgcgacgccccgcgcgacgtcgccgcgtcgtccgcgtcgcgcgcgagcgccgcggcgcgcgcggcgacgcgcatcggcgacgcgangtggcgccagcctgtcggtcgcgtcgcagactcgcgcgcgatgtcgctcgcgcgcgcgcgcgtcgcgacggcgcgcgcgacggcgcgcgcgacggcgtcgaccgcgcgcgggggggcgcgacgcgcgacgacgcgcgtcgcgcgcgcgagaagggcgcaagatgcgatgggcgatggttcgaaaccgttgcgacgcgcggcggcgacgacgcgcgcgctgcgcgaggacgacgtcgacgggctcaaggttgacgaactgaaggacgtgctgcggacgatggcgctgccggtgagcgggcggaaggcggatctcgcggcgcgggtgaaggaggcgctggcggcgcgcggcgaaggcgaaggcgaagacgaagacgaagacgcgacggcgacgatcgaggcggtcgtggaggcgacggtcgagggacgcgcggtggaagaagcggaggcgacgttcgcggaggcgcgcgaggagggtggtgtcgcggagacggtgatggagacgcgcgcggacgccgcgccggcggaaacggcggcgccggtcgaacggcgcgcgagcgtcgtcgagggatgggacgaggcgcgcgcgccgacgccgggcacggcgttttggaacgcgatgccgcgggcgacgagagcggacgctcgagaagcggaagtgacgaagacgacgtcgccgttgcgcgtggtgcacatcaccgccgagttggcgcccatcgccaaggttggcggtttgggcgacgtcgtcgaaggactggcgcgcgcgcacgggaagatgggacacgcggtgactgtgattcttccgttttactcgtgtttaccgacggacaagatcgacggcttgacgcacgtgatggattacgacgtcaccaagggtcgttatcaagacggcgagacgcgatatttcaactttcgcacgacggcgatgcgagggcgagtgaacggcatcgacgtgatacttctcaagccacacgacgacgagcgctcgaatatatttcaaggttcgaagatttacggcggatcgtacgatgaacgtgaggcgtacttgtacttttgtcgcgcggcgcgcgaatttttaatcgcctctggtgagaatccaaacatcattcactgtcacgagtggcaagcgtgcggatttcctatgatcttttggggacttcgcgatgcgtacgggcaagactgcgacggtatgtccaacgcgaaaatcatgctgacgattcataacttggactccaacggcgaagcgagacaggaagagttctgcgccacgggcgtggacgcctccatgttcgccaccgtcgacaaggctttggacgaacgcaccatcgggcacaacccagaaaggctttgcttgctcaaggggggcatcgtgtattcgaatcacgtcaccacggtgtctccgacgtacgcgacggaaattctcgccggcggtggcggattcacggggaagaatctcgttggaaacaagcacaagtttagcgggattctcaacggaatcgatccggagagttggaccccgagcgacgatccgttcataccgtacggctatgactctaccaacgtcaagtcgcaaaaggcgttgtgcaaaaagtatctgcagcgcggattaggtatgaaggaagaccccgacgcgccgctggtcgtgtgcgtgtcgcgcctcgtgccgcaaaagggagtaaatctcatcgagcaagcgattcgcacgacgcgctcgaacggcggtcaattcgtgcttctcggcaccggccattcagacggcgttttccgcaaaatggctgaaacggaagagttcggagaaaattccgactcgacgcggcttatgctcatgtacagcgacgcattgagccatttactctacgccgcagcggacattgtcatcgtgccctcgatgttcgagccgtgcggacttacgcaaatgatcgcgttgcgctacgccgcacttccgctcgtccgtcgcacgggcggtctcgcggataccgtattcgacatcgatgacgcttcgatcgacgaaaacgaa

SEQ ID NO: 873 - DNA, 4000 bp, Escherichia coli
  misc_feature (21)..(21): n is a, c, g, or t
  misc_feature (341)..(341): n is a, c, g, or t
  misc_feature (861)..(861): n is a, c, g, or t
  misc_feature (2941)..(2941): n is a, c, g, or t
  misc_feature (3831)..(3831): n is a, c, g, or t
  misc_feature (3978)..(3978): n is a, c, g, or t
gctgttcactttcttgatccntttctggagtaaaatgttgttgtatctcaactaaatatcccaactcctcttgaatatcaggcaggacaaagtcagtcaatttttcaagttctgcaattgcagatactgcattgccgtccgcaatttctatttttgcgtttgctgcagcaagattataactcgcgtttttaaaattaggatcatgcttcagacaaagtttgtacatgttttttgcatgattccaatcatgttttttacgatatgtgttacccagcagattagccaattctacgtttttaggatccattttcaggacattaacacctaaacttattataccntcaggattacctccgccctgcatttcctgaaatagtttagtaacagtttcagcagcaagtttagggtcaagctccaaggctttgttaaactcaactgctgcccagtcgtaaaagtttttttccagtaaacttttaccgcgttcaagaattgaatttaactctttgtttggatcgtccgtgctgaaaaatttttcaagtattttcatggatctgctgctaaccgactattcatgtgacttggactgctgactttggatgtgctgacaagttcaaacatcatcataactgatggtgatcttattgtaaattcgagtttttagaaaaagttcatcttaaacaatgatttgatcattttgaaaaaagtagtaaattaggtagtcatgaatgatttttagtgttttggttctgaatattaaattgctgattaattcattgtttatcagaaaagacttgctaaaatcaggcctgatgtggcatctattgtgcagaatattgtgcagaaatatgttaatctggtaanttctgaagtatttttccttttgggtacggtactttaaagctaaaatgaaactgtttcaagtgaattgaaacatcaaaactgaggaataatggcagaagtatctgatgattttgaaatcaaactgtcagcagaagacagtccggatgacattttaaatgatcaaggagatatagaattgtttgaagaagatcacagcagtgatgagcctttagctgggctggatgatacagatttggatgatgtcctcgccgatcctgatgatctggatgaaggtgagatagacctgggcatggatgagattggtgatcttgtggaagacttaaagctggacgttgctgaggatgatgctgatgctgatgcttcaattgaagtagaagcggatatggtttttgatgaggaagaaacagaagatgagactaatgattcagtagaaagtttgctcgatgaacttggagatgacgatagcggagaactgagtcttactgatgattctgcagatttagaagaaattgatgaacttgatttagcagaaagtttagagtcagacgcagaaccagtttctgctgaactggaatctgcagaagaagctgaggaaagttccggagatgactcagtagactccgattcttcagatgttttggatatgctgcatgatcctgaaatttcggatgaaagtaccgatgaagatgctgaagatatggaacttggcatggatactcttgacgacaccaaggatgacgatttaactgatcttgggcttgatgatgtagagactgcggaatccggcgatgaagaaattgctgttgaagatgctgctgatgaaacagaggaagtggatgttcaggaagcaacaacagaagatgaaataactgatcttggtcttgatgatgttgagacggcggaatccagcgatgaagaaattgctgttgaagatgctgttgatgaaacagaggaagtggatgttacggaagcaacaactgaagatgaaataactgatcttgggcttgatgatgttgagactgctgaggcagaacctgaggcggacgagttagtaacagaaacagctgaggtagaacttgaagcggatgagtctgcagttgaaacagctgagctagagcccgaagcagaggtaattcctgcattggaaacaacaaccgatactcaagatgagcttgaggaaacaagtgatgagatagaagaaattgaaatcgatgaaccagaaattgaagttcaagaaacacctgcaattgatatagtggagagtgaaatgccaattgaatcagaggcagcagagaaaatagcggcccctttaggctcagacatgctgttaaatttcaaccatgaagtggtggtcgaaatagcgaggacaagtcttaccggcgaagaaatcacacagatcacttacggcagcattattgaacttgataaagttgcaggagaaccggtgaatttggtccttgatggtaaaacaattgctcttggggaagtagttcaaattaataatgaaaaactgggcatacgtatagtaggcgttattcaggactaattgaaattatgctgcaccaaacagacatccccgtaaaaccttatgagctggctgaagctcaatttaatacaggacgattccacataatggacattgtctttcgcagatgggcaactctcttacaagagacgctttatgcgaaaatgggcatgatgttagaagtctccactgaaaatgtggtaaagctgcgttttgaaaaatttttagattctgttgagaaacaaccaatctatatttttgaaactctcaaccatagtcgtggacttttacttgtagataagtctttttttgatttagcacttaacagtaaagcagagccgactgcagaaaaattgtcactggttcagatgatgaaagaaaaccagcagacgctgcttaaattggtaagtactctgattgatgattttgaaaaaagctggctcaatattgcagaaattgaactaaatctgaatcgtgttaccatctatccccgccgggcaaatgtgatgttgccttacgaatattgtttggcaggaagtgttcagcttagtcttnacggtgttcaaacaagtatccagttatgcctgccttatgctgctcttgtatctgtgcttagaccgcttgaaaagaagaaaattattgaacctgaatctatggcttattactttcctcaagtgaaagaacatttcaagtctttgctggaaaagactgagtattcggttgttgctgaacttggtaaagctgatttgagagaagtaaaaggaaagttggaaaaaggtcaggtgctgcctttattgaataaagacggcctcgttacaatccggattaacggtactccagcattacaaggttctacaggggaatcctcagggaattattctgttcaggttatacgaggtactgaagacaaaaaaccctcagcaattcaaccaaaaagagaattcaaacaagtaacgtggccaactcagtaagtatcgttttttaatactgtagtaagccatttgtccggattctctccgcactcgcggaaaagctccaaagtctcatctgcaggagtaagcccccccttcgtgtactgctcaaaataaggcaacagccaattctcatctgctgatccaagtgcctctaaggctttttctacaatgagtctaccagtctttgcaaagtttgttcgattgacttcagagtgtagagcatcctttgctacagcttttttataaatcttgaactcttctttcggcaaatccatcaagattgattgtacagcagcaaaagcagtttcattataaagtaatgcaccaatcaatgccggaactgcgagtgaatattgcggagccacgctgtcaataactctcacttccagaatgttttttattctgatgtccggaaaaagcatgcccagatgttcttcccagtcatccatgtccattattaagtccggatgnttagcatctaacaattgttgaaagctaaaatccgtcgtcaggatcccctctccatcacgttttaaatgataaggcgccgcctttaaggcccattctatgtagtcctccagacgaaaaccagtatttaaaaaagcttccggtagtccngaacgtgaattatcggtatgct

SEQ ID NO: 874 - DNA, 4000 bp, Escherichia coli
  misc_feature (3119)..(3119): n is a, c, g, or t
  misc_feature (3132)..(3133): n is a, c, g, or t
  misc_feature (3135)..(3137): n is a, c, g, or t
  misc_feature (3139)..(3140): n is a, c, g, or t
  misc_feature (3142)..(3142): n is a, c, g, or t
  misc_feature (3145)..(3150): n is a, c, g, or t
  misc_feature (3157)..(3162): n is a, c, g, or t
  misc_feature (3164)..(3164): n is a, c, g, or t
  misc_feature (3166)..(3167): n is a, c, g, or t
  misc_feature (3169)..(3170): n is a, c, g, or t
  misc_feature (3172)..(3177): n is a, c, g, or t
  misc_feature (3180)..(3183): n is a, c, g, or t
  misc_feature (3185)..(3188): n is a, c, g, or t
  misc_feature (3191)..(3195): n is a, c, g, or t
  misc_feature (3197)..(3203): n is a, c, g, or t
  misc_feature (3205)..(3205): n is a, c, g, or t
  misc_feature (3207)..(3217): n is a, c, g, or t
  misc_feature (3219)..(3220): n is a, c, g, or t
  misc_feature (3223)..(3223): n is a, c, g, or t
  misc_feature (3226)..(3226): n is a, c, g, or t
  misc_feature (3228)..(3234): n is a, c, g, or t
  misc_feature (3236)..(3239): n is a, c, g, or t
tcaccgtactttactggcaacggtagcaaataccctcgattgtctagaaaagacaatactgcagcatcattcatgcgaaaattcccttgggttttcgccattttttctaaattgggatagagattagtaagaaaaaatactacaaaagttaggcacaaggacgtaaacagcattattgctatccgtcggattatgaacaatgccatttaagtacctgtttcgttgtttttaatatttatgtttatagataaaaaaaggccgcgcaggttagcagcgcggccaaaattttagtaagtattaagctttaaaaccccacttgtatacgtgcggatgataagcaatatgctgttcgcactgtaggtttggtctatgacttctatacaggtttctccaatatggctgtatagtcacgccttcatctctgatcagagcctgacattttcctgcaaccttacggcgttcatcagcatctgctatcgagtttgcttctgctaaaagtgcatcaaactcagcattgctccaagcaaattcgttccatgcttctcccgatctgtaagccaacccccacacttgcgttgcaaacggacggtggttccagttggttgagctgaaaggatactttgtccaatcattccagaatgttgatccaggtaaaatggttctttttactttgaaaccagcatcacgaagttgcgcagcgactgagtcagtcgtattcttgcgccagtcatcatcgattgaatgtagttcgtgttcatagtcttccataccagcttctttcataagctccattgccttcactggatcgaagggaagtctcactacactcgggtcatgttctggatgcatggaaccagcatgatgattgtccgccggagaaccttttccagcataacccaattcaagacaaactgacccatcaactgccatggcaagtgcttggcgtacgcgtttgtctttgtaagcgtctgcatcttggtttggacgaacaacaatagttgatccagtagaaattgttgaattttcccatccaattgatggcataaggtcaacgtactcgccaacggtttcataaaaaacgtctacttcgtcaccttccgcagcggcaacataagcagatggatccgtaccataatcaataaattcaattcgatccaatggtacagtgcgtcctacagaataaccccaccagtcatgcccctcatttcttactactgtacctgccacaccaacttcataactttcaggaatgaatgggccggttcctatagacgcacttgtccccatattatccgggttaaagcttgagtgaacgactgctgctgggtaatctgccataccagcaattaccgtaatatcggatgcaacacatgttaactcaacagtgtggctgtctgtgaccttaatagcccccgccgctgcttttccagtatccgcatcaatcaatgaagccatgcgacccgccatggagttaccttctactgatttgtcgcaccacccctcaatgtttctggcaacgtcctctgctgtgaaatcttccccattgttccatttcacacctttgcgaacgttcaaagtatactttgtagcgtccgcgttggcattccaaccctctaataaatttggcgtaattgagccgtcattgttgtattctacgagatattccaatgtaccggctgtgaaatgggcaagctgtgtccaatcaaaagttcttggatcttttaatgcaatgcattccattgccatacgcattgttccgccttgttgaagatgtcctcctgcaagtgctggctgggcaactccaatcagcccataagctccagcagcagtgacaccgagagctgttgaccgagagataaactctcgtctgtccatatctccgtttttatgttctcgggcatacatttctgctaccggatgtacacttttatttttcatcttttgcgtcatcattttctccctatttgagacacttttaaaccagaagatttgtagtaacttattactaagtgaaattcaacctatagttgagtgttaaaagctggagaacctcagcatttggtgccgtcactctatcattaatgtgtgttaagttcatattttgttttacaccctcgattctctcagttttcgaactttctgataataattccctaactatcagattttaattttttctgataataaccggttatgtcttcccagtctgccattttggattttatccaagttttttgcctttttgcatactgacgcgttgcaattgttgccttttcgatggcggtttcaagtgggatttctccgttcaaatgcattatcaattccttagcgcctattgctttgtttgcggccatatttttctcccatgttggaagattttgcttggcttcttggattgctccttgttctatcatgcgtttaaagcgatcttttatctgttggttaagaatttgcttgtcgggattgatcaccagcgccttgcagctttccttctccaaaatcggcggggctatattttcatgccattctaataatgactttcccgtggcttgtgccacctcccaagctctcgcaacccgcattgggtttttaatgtcgattttactcaatgtagcatcatccaaatctgctaaaagagcatggataccctctgatgaaagtctctgccttgcttcctcttttaaatcatctgaaatttctgggatgtcagataaaccactggttaatgcagaaaaatataaaccggttcccccgacaataattggtgtgggattattttctagaatatctttaatttcccgaagccagtgtccgactgagtaaaccgtttttgcctgcttgtgcccatagagataatgtttgaccatctgctcatcctccaacgatgggcgagcagtcaaaattctccaattttcgtaaatttggatagcatctgcattgatgataacacgtcccagtttctttgctaaaaatagagctaatttggatttcccagaggcagtcggaccaaccataagaattggtttattttcaacttgatgcaaaaaagcgttggttaaaagctggtccatgctgttgtgctttataaattattctgaaataaaccaagtgatattttncagcaaaaaaaannannntnngnttnnnnnnttttttnnnnnnantnntnnannnnnnaannnngnnnnaannnnngnnnnnnncnannnnnnnnnnncnnaanttnannnnnnnannnntaaaaatttctggtgaagcattgatgggtgacaaagggtttggtttaaatcctccgacggtggagagaatagcccgtgagataaagtccgttcatgctatcggtgttgaaatctgtatggtgattgggggaggtaatatcttcaggggtttacagggtagtgctcaaggtatggagcgcacaacggctgactatatggggatgcttgccacagtaatgaacgcactcgcaatgcaaagtgcgctggagagtgttggagttaatacgcgggttttaagtgctattccaatggatcaggtgagtgagccgtatattcgtagaagagcagtcagacatcttgaaaaaaagcgcgtttgtatttttgcagcaggaactggaaatccatactttaccactgatacagcagccacactgagggccagtgaaatggcctgtgatgcaatattcaaaggcaccaaagtagacggtgtatatgacaaggatccgtcaaagtttcatgatgctgaaaaattcgagtcaatttcgtacgacgatgttctttcaaaacacctaaaggtcatggacgcttccgctattgcactggcgcgggacaacaaattaccaataattgttttttctcttgatgaaccacttggtttcagagccgttctggcaggtgaaggtgcttacaccaaagtagttgaaaatccctaggatagtttcctggaatatgtaataagttacttaaattttgataagagcagaataatatgtcagatgatt

SEQ ID NO: 875 - DNA, 4000 bp, Escherichia coli
  misc_feature (1)..(1): n is a, c, g, or t
  misc_feature (3)..(4): n is a, c, g, or t
  misc_feature (6)..(6): n is a, c, g, or t
  misc_feature (12)..(12): n is a, c, g, or t
  misc_feature (14)..(17): n is a, c, g, or t
  misc_feature (21)..(22): n is a, c, g, or t
  misc_feature (24)..(25): n is a, c, g, or t
  misc_feature (32)..(33): n is a, c, g, or t
  misc_feature (35)..(35): n is a, c, g, or t
  misc_feature (45)..(45): n is a, c, g, or t
  misc_feature (53)..(54): n is a, c, g, or t
  misc_feature (57)..(57): n is a, c, g, or t
  misc_feature (62)..(63): n is a, c, g, or t
  misc_feature (68)..(68): n is a, c, g, or t
  misc_feature (71)..(71): n is a, c, g, or t
  misc_feature (73)..(74): n is a, c, g, or t
  misc_feature (76)..(78): n is a, c, g, or t
  misc_feature (85)..(85): n is a, c, g, or t
  misc_feature (87)..(87): n is a, c, g, or t
  misc_feature (91)..(91): n is a, c, g, or t
  misc_feature (93)..(93): n is a, c, g, or t
  misc_feature (95)..(95): n is a, c, g, or t
  misc_feature (98)..(98): n is a, c, g, or t
  misc_feature (100)..(102): n is a, c, g, or t
  misc_feature (104)..(106): n is a, c, g, or t
  misc_feature (114)..(114): n is a, c, g, or t
  misc_feature (117)..(119): n is a, c, g, or t
  misc_feature (122)..(123): n is a, c, g, or t
  misc_feature (139)..(140): n is a, c, g, or t
  misc_feature (147)..(148): n is a, c, g, or t
  misc_feature (150)..(150): n is a, c, g, or t
  misc_feature (152)..(152): n is a, c, g, or t
  misc_feature (162)..(164): n is a, c, g, or t
  misc_feature (170)..(171): n is a, c, g, or t
  misc_feature (176)..(176): n is a, c, g, or t
  misc_feature (184)..(184): n is a, c, g, or t
  misc_feature (186)..(186): n is a, c, g, or t
  misc_feature (203)..(204): n is a, c, g, or t
  misc_feature (212)..(213): n is a, c, g, or t
  misc_feature (220)..(220): n is a, c, g, or t
  misc_feature (223)..(224): n is a, c, g, or t
  misc_feature (226)..(228): n is a, c, g, or t
  misc_feature (230)..(230): n is a, c, g, or t
  misc_feature (234)..(234): n is a, c, g, or t
  misc_feature (240)..(242): n is a, c, g, or t
  misc_feature (244)..(245): n is a, c, g, or t
  misc_feature (248)..(248): n is a, c, g, or t
  misc_feature (250)..(251): n is a, c, g, or t
  misc_feature (254)..(256): n is a, c, g, or t
  misc_feature (261)..(261): n is a, c, g, or t
  misc_feature (264)..(264): n is a, c, g, or t
  misc_feature (269)..(270): n is a, c, g, or t
  misc_feature (277)..(278): n is a, c, g, or t
  misc_feature (281)..(282): n is a, c, g, or t
  misc_feature (286)..(286): n is a, c, g, or t
  misc_feature (291)..(293): n is a, c, g, or t
  misc_feature (296)..(297): n is a, c, g, or t
  misc_feature (301)..(301): n is a, c, g, or t
  misc_feature (307)..(308): n is a, c, g, or t
  misc_feature (310)..(310): n is a, c, g, or t
  misc_feature (313)..(313): n is a, c, g, or t
  misc_feature (320)..(321): n is a, c, g, or t
  misc_feature (323)..(323): n is a, c, g, or t
  misc_feature (325)..(325): n is a, c, g, or t
  misc_feature (329)..(330): n is a, c, g, or t
  misc_feature (336)..(336): n is a, c, g, or t
  misc_feature (340)..(341): n is a, c, g, or t
  misc_feature (343)..(343): n is a, c, g, or t
  misc_feature (346)..(346): n is a, c, g, or t
  misc_feature (348)..(348): n is a, c, g, or t
  misc_feature (350)..(351): n is a, c, g, or t
  misc_feature (353)..(354): n is a, c, g, or t
  misc_feature (357)..(359): n is a, c, g, or t
  misc_feature (363)..(364): n is a, c, g, or t
  misc_feature (366)..(366): n is a, c, g, or t
  misc_feature (369)..(369): n is a, c, g, or t
  misc_feature (371)..(372): n is a, c, g, or t
  misc_feature (375)..(375): n is a, c, g, or t
  misc_feature (381)..(381): n is a, c, g, or t
  misc_feature (383)..(383): n is a, c, g, or t
  misc_feature (390)..(392): n is a, c, g, or t
  misc_feature (397)..(397): n is a, c, g, or t
  misc_feature (400)..(400): n is a, c, g, or t
  misc_feature (402)..(404): n is a, c, g, or t
  misc_feature (412)..(414): n is a, c, g, or t
  misc_feature (416)..(417): n is a, c, g, or t
  misc_feature (423)..(427): n is a, c, g, or t
  misc_feature (429)..(430): n is a, c, g, or t
  misc_feature (432)..(432): n is a, c, g, or t
  misc_feature (443)..(443): n is a, c, g, or t
  misc_feature (446)..(446): n is a, c, g, or t
  misc_feature (450)..(450): n is a, c, g, or t
  misc_feature (455)..(455): n is a, c, g, or t
  misc_feature (458)..(458): n is a, c, g, or t
  misc_feature (465)..(466): n is a, c, g, or t
  misc_feature (468)..(469): n is a, c, g, or t
  misc_feature (473)..(474): n is a, c, g, or t
  misc_feature (491)..(491): n is a, c, g, or t
  misc_feature (493)..(494): n is a, c, g, or t
  misc_feature (502)..(503): n is a, c, g, or t
  misc_feature (506)..(506): n is a, c, g, or t
  misc_feature (508)..(508): n is a, c, g, or t
  misc_feature (520)..(520): n is a, c, g, or t
  misc_feature (522)..(522): n is a, c, g, or t
  misc_feature (527)..(527): n is a, c, g, or t
  misc_feature (535)..(535): n is a, c, g, or t
  misc_feature (537)..(537): n is a, c, g, or t
  misc_feature (539)..(539): n is a, c, g, or t
  misc_feature (541)..(543): n is a, c, g, or t
  misc_feature (547)..(547): n is a, c, g, or t
  misc_feature (550)..(550): n is a, c, g, or t
  misc_feature (561)..(562): n is a, c, g, or t
  misc_feature (564)..(564): n is a, c, g, or t
  misc_feature (566)..(566): n is a, c, g, or t
  misc_feature (568)..(569): n is a, c, g, or t
  misc_feature (572)..(573): n is a, c, g, or t
  misc_feature (576)..(576): n is a, c, g, or t
  misc_feature (582)..(582): n is a, c, g, or t
  misc_feature (585)..(585): n is a, c, g, or t
  misc_feature (590)..(590): n is a, c, g, or t
  misc_feature (593)..(593): n is a, c, g, or t
  misc_feature (602)..(602): n is a, c, g, or t
  misc_feature (604)..(605): n is a, c, g, or t
  misc_feature (607)..(608): n is a, c, g, or t
  misc_feature (610)..(610): n is a, c, g, or t
  misc_feature (618)..(618): n is a, c, g, or t
  misc_feature (620)..(620): n is a, c, g, or t
  misc_feature (626)..(626): n is a, c, g, or t
  misc_feature (632)..(632): n is a, c, g, or t
  misc_feature (641)..(642): n is a, c, g, or t
  misc_feature (645)..(648): n is a, c, g, or t
  misc_feature (650)..(651): n is a, c, g, or t
  misc_feature (654)..(654): n is a, c, g, or t
  misc_feature (657)..(658): n is a, c, g, or t
  misc_feature (660)..(660): n is a, c, g, or t
  misc_feature (670)..(670): n is a, c, g, or t
  misc_feature (672)..(672): n is a, c, g, or t
  misc_feature (679)..(679): n is a, c, g, or t
  misc_feature (684)..(685): n is a, c, g, or t
  misc_feature (690)..(691): n is a, c, g, or t
  misc_feature (704)..(705): n is a, c, g, or t
  misc_feature (709)..(709): n is a, c, g, or t
  misc_feature (714)..(715): n is a, c, g, or t
  misc_feature (718)..(718): n is a, c, g, or t
  misc_feature (720)..(720): n is a, c, g, or t
  misc_feature (723)..(723): n is a, c, g, or t
  misc_feature (731)..(731): n is a, c, g, or t
  misc_feature (733)..(733): n is a, c, g, or t
  misc_feature (739)..(739): n is a, c, g, or t
  misc_feature (741)..(742): n is a, c, g, or t
  misc_feature (744)..(744): n is a, c, g, or t
  misc_feature (747)..(749): n is a, c, g, or t
  misc_feature (764)..(764): n is a, c, g, or t
  misc_feature (767)..(767): n is a, c, g, or t
  misc_feature (771)..(771): n is a, c, g, or t
  misc_feature (775)..(775): n is a, c, g, or t
  misc_feature (777)..(777): n is a, c, g, or t
  misc_feature (782)..(783): n is a, c, g, or t
  misc_feature (785)..(785): n is a, c, g, or t
  misc_feature (792)..(792): n is a, c, g, or t
  misc_feature (795)..(795): n is a, c, g, or t
  misc_feature (798)..(798): n is a, c, g, or t
  misc_feature (804)..(804): n is a, c, g, or t
  misc_feature (806)..(806): n is a, c, g, or t
  misc_feature (809)..(811): n is a, c, g, or t
  misc_feature (820)..(820): n is a, c, g, or t
  misc_feature (823)..(824): n is a, c, g, or t
  misc_feature (828)..(828): n is a, c, g, or t
  misc_feature (831)..(832): n is a, c, g, or t
  misc_feature (837)..(837): n is a, c, g, or t
  misc_feature (842)..(843): n is a, c, g, or t
  misc_feature (845)..(845): n is a, c, g, or t
  misc_feature (847)..(847): n is a, c, g, or t
  misc_feature (849)..(849): n is a, c, g, or t
  misc_feature (851)..(851): n is a, c, g, or t
  misc_feature (854)..(854): n is a, c, g, or t
  misc_feature (863)..(863): n is a, c, g, or t
  misc_feature (867)..(867): n is a, c, g, or t
  misc_feature (871)..(871): n is a, c, g, or t
  misc_feature (874)..(874): n is a, c, g, or t
  misc_feature (880)..(884): n is a, c, g, or t
  misc_feature (887)..(887): n is a, c, g, or t
  misc_feature (891)..(891): n is a, c, g, or t
  misc_feature (897)..(901): n is a, c, g, or t
  misc_feature (903)..(905): n is a, c, g, or t
  misc_feature (909)..(915): n is a, c, g, or t
  misc_feature (918)..(925): n is a, c, g, or t
  misc_feature (927)..(933): n is a, c, g, or t
  misc_feature (935)..(942): n is a, c, g, or t
  misc_feature (944)..(946): n is a, c, g, or t
  misc_feature (948)..(948): n is a, c, g, or t
  misc_feature (950)..(953): n is a, c, g, or t
  misc_feature (955)..(957): n is a, c, g, or t
  misc_feature (960)..(967): n is a, c, g, or t
  misc_feature (969)..(970): n is a, c, g, or t
  misc_feature (972)..(986): n is a, c, g, or t
  misc_feature (988)..(989): n is a, c, g, or t
  misc_feature (991)..(991): n is a, c, g, or t
  misc_feature (993)..(993): n is a, c, g, or t
  misc_feature (995)..(1006): n is a, c, g, or t
  misc_feature (1008)..(1009): n is a, c, g, or t
  misc_feature (1011)..(1012): n is a, c, g, or t
  misc_feature (1015)..(1017): n is a, c, g, or t
  misc_feature (1019)..(1028): n is a, c, g, or t
  misc_feature (1030)..(1041): n is a, c, g, or t
  misc_feature (1043)..(1043): n is a, c, g, or t
  misc_feature (1045)..(1046): n is a, c, g, or t
  misc_feature (1048)..(1048): n is a, c, g, or t
  misc_feature (1051)..(1060): n is a, c, g, or t
  misc_feature (1062)..(1063): n is a, c, g, or t
  misc_feature (1065)..(1065): n is a, c, g, or t
  misc_feature (1068)..(1077): n is a, c, g, or t
  misc_feature (1079)..(1082): n is a, c, g, or t
  misc_feature (1084)..(1085): n is a, c, g, or t
  misc_feature (1088)..(1102): n is a, c, g, or t
  misc_feature (1104)..(1121): n is a, c, g, or t
  misc_feature (1123)..(1123): n is a, c, g, or t
  misc_feature (1125)..(1133): n is a, c, g, or t
  misc_feature (1135)..(1142): n is a, c, g, or t
  misc_feature (1144)..(1145): n is a, c, g, or t
  misc_feature (1147)..(1147): n is a, c, g, or t
  misc_feature (1149)..(1150): n is a, c, g, or t
  misc_feature (1152)..(1164): n is a, c, g, or t
  misc_feature (1167)..(1171): n is a, c, g, or t
  misc_feature (1173)..(1184): n is a, c, g, or t
  misc_feature (1186)..(1186): n is a, c, g, or t
  misc_feature (1189)..(1200): n is a, c, g, or t
  misc_feature (1202)..(1203): n is a, c, g, or t
  misc_feature (1206)..(1206): n is a, c, g, or t
  misc_feature (1208)..(1220): n is a, c, g, or t
  misc_feature (1222)..(1236): n is a, c, g, or t
  misc_feature (1238)..(1242): n is a, c, g, or t
  misc_feature (1244)..(1245): n is a, c, g, or t
  misc_feature (1247)..(1250): n is a, c, g, or t
  misc_feature (1252)..(1263): n is a, c, g, or t
  misc_feature (1265)..(1266): n is a, c, g, or t
  misc_feature (1268)..(1270): n is a, c, g, or t
  misc_feature (1273)..(1274): n is a, c, g, or t
  misc_feature (1277)..(1277): n is a, c, g, or t
  misc_feature (1280)..(1283): n is a, c, g, or t
  misc_feature (1314)..(1314): n is a, c, g, or t
  misc_feature (1396)..(1396): n is a, c, g, or t
  misc_feature (1985)..(1985): n is a, c, g, or t
  misc_feature (1992)..(1992): n is a, c, g, or t
  misc_feature (1997)..(1997): n is a, c, g, or t
  misc_feature (2403)..(2403): n is a, c, g, or t
  misc_feature (2456)..(2457): n is a, c, g, or t
  misc_feature (2459)..(2459): n is a, c, g, or t
  misc_feature (2468)..(2468): n is a, c, g, or t
  misc_feature (2470)..(2470): n is a, c, g, or t
  misc_feature (2480)..(2480): n is a, c, g, or t
  misc_feature (2484)..(2484): n is a, c, g, or t
  misc_feature (2490)..(2493): n is a, c, g, or t
  misc_feature (2596)..(2596): n is a, c, g, or t
  misc_feature (2611)..(2611): n is a, c, g, or t
  misc_feature (2630)..(2630): n is a, c, g, or t
  misc_feature (2662)..(2663): n is a, c, g, or t
  misc_feature (2672)..(2673): n is a, c, g, or t
  misc_feature (2694)..(2694): n is a, c, g, or t
  misc_feature (2697)..(2701): n is a, c, g, or t
  misc_feature (2717)..(2717): n is a, c, g, or t
  misc_feature (2719)..(2719): n is a, c, g, or t
  misc_feature (2741)..(2741): n is a, c, g, or t
  misc_feature (2750)..(2750): n is a, c, g, or t
  misc_feature (2754)..(2755): n is a, c, g, or t
  misc_feature (2759)..(2759): n is a, c, g, or t
  misc_feature (2792)..(2793): n is a, c, g, or t
  misc_feature (2821)..(2821): n is a, c, g, or t
  misc_feature (2862)..(2862): n is a, c, g, or t
  misc_feature (2979)..(2984): n is a, c, g, or t
  misc_feature (2987)..(2989): n is a, c, g, or t
  misc_feature (2993)..(2995): n is a, c, g, or t
  misc_feature (2997)..(2997): n is a, c, g, or t
  misc_feature (2999)..(2999): n is a, c, g, or t
  misc_feature (3001)..(3004): n is a, c, g, or t
  misc_feature (3006)..(3006): n is a, c, g, or t
  misc_feature (3008)..(3008): n is a, c, g, or t
  misc_feature (3010)..(3012): n is a, c, g, or t
  misc_feature (3014)..(3015): n is a, c, g, or t
  misc_feature (3019)..(3019): n is a, c, g, or t
  misc_feature (3022)..(3022): n is a, c, g, or t
  misc_feature (3027)..(3027): n is a, c, g, or t
  misc_feature (3029)..(3030): n is a, c, g, or t
  misc_feature (3032)..(3036): n is a, c, g, or t
  misc_feature (3038)..(3039): n is a, c, g, or t
  misc_feature (3041)..(3041): n is a, c, g, or t
  misc_feature (3043)..(3043): n is a, c, g, or t
  misc_feature (3046)..(3048): n is a, c, g, or t
  misc_feature (3050)..(3054): n is a, c, g, or t
  misc_feature (3057)..(3058): n is a, c, g, or t
  misc_feature (3060)..(3060): n is a, c, g, or t
  misc_feature (3062)..(3068): n is a, c, g, or t
  misc_feature (3070)..(3073): n is a, c, g, or t
  misc_feature (3077)..(3078): n is a, c, g, or t
  misc_feature (3080)..(3083): n is a, c, g, or t
  misc_feature (3085)..(3088): n is a, c, g, or t
  misc_feature (3090)..(3093): n is a, c, g, or t
  misc_feature (3095)..(3097): n is a, c, g, or t
  misc_feature (3099)..(3101): n is a, c, g, or t
  misc_feature (3103)..(3105): n is a, c, g, or t
  misc_feature (3107)..(3116): n is a, c, g, or t
  misc_feature (3118)..(3121): n is a, c, g, or t
  misc_feature (3124)..(3126): n is a, c, g, or t
  misc_feature (3132)..(3132): n is a, c, g, or t
  misc_feature (3134)..(3136): n is a, c, g, or t
  misc_feature (3139)..(3142): n is a, c, g, or t
  misc_feature (3145)..(3146): n is a, c, g, or t
  misc_feature (3148)..(3149): n is a, c, g, or t
  misc_feature (3151)..(3151): n is a, c, g, or t
  misc_feature (3153)..(3153): n is a, c, g, or t
  misc_feature (3156)..(3156): n is a, c, g, or t
  misc_feature (3159)..(3159): n is a, c, g, or t
  misc_feature (3161)..(3173): n is a, c, g, or t
  misc_feature (3175)..(3175): n is a, c, g, or t
  misc_feature (3177)..(3181): n is a, c, g, or t
  misc_feature (3189)..(3191): n is a, c, g, or t
  misc_feature (3193)..(3201): n is a, c, g, or t
  misc_feature (3204)..(3204): n is a, c, g, or t
  misc_feature (3208)..(3209): n is a, c, g, or t
  misc_feature (3211)..(3211): n is a, c, g, or t
  misc_feature (3213)..(3213): n is a, c, g, or t
  misc_feature (3215)..(3215): n is a, c, g, or t
  misc_feature (3217)..(3217): n is a, c, g, or t
  misc_feature (3219)..(3220): n is a, c, g, or t
  misc_feature (3222)..(3223): n is a, c, g, or t
  misc_feature (3225)..(3225): n is a, c, g, or t
  misc_feature (3228)..(3228): n is a, c, g, or t
  misc_feature (3230)..(3230): n is a, c, g, or t
  misc_feature (3233)..(3234): n is a, c, g, or t
  misc_feature (3237)..(3239): n is a, c, g, or t
  misc_feature (3242)..(3248): n is a, c, g, or t
  misc_feature (3251)..(3252): n is a, c, g, or t
  misc_feature (3255)..(3256): n is a, c, g, or t
  misc_feature (3258)..(3258): n is a, c, g, or t
  misc_feature (3261)..(3261): n is a, c, g, or t
  misc_feature (3265)..(3273): n is a, c, g, or t
  misc_feature (3275)..(3283): n is a, c, g, or t
  misc_feature (3287)..(3290): n is a, c, g, or t
  misc_feature (3292)..(3294): n is a, c, g, or t
  misc_feature (3296)..(3298): n is a, c, g, or t
  misc_feature (3300)..(3300): n is a, c, g, or t
  misc_feature (3304)..(3304): n is a, c, g, or t
  misc_feature (3306)..(3306): n is a, c, g, or t
  misc_feature (3308)..(3308): n is a, c, g, or t
  misc_feature (3313)..(3316): n is a, c, g, or t
  misc_feature (3322)..(3322): n is a, c, g, or t
  misc_feature (3324)..(3327): n is a, c, g, or t
  misc_feature (3329)..(3329): n is a, c, g, or t
  misc_feature (3333)..(3336): n is a, c, g, or t
  misc_feature (3339)..(3341): n is a, c, g, or t
  misc_feature (3343)..(3346): n is a, c, g, or t
  misc_feature (3348)..(3351): n is a, c, g, or t
  misc_feature (3354)..(3355): n is a, c, g, or t
  misc_feature (3357)..(3362): n is a, c, g, or t
  misc_feature (3364)..(3367): n is a, c, g, or t
  misc_feature (3370)..(3379): n is a, c, g, or t
  misc_feature (3383)..(3383): n is a, c, g, or t
  misc_feature (3386)..(3388): n is a, c, g, or t
  misc_feature (3390)..(3390): n is a, c, g, or t
  misc_feature (3393)..(3394): n is a, c, g, or t
  misc_feature (3396)..(3400): n is a, c, g, or t
  misc_feature (3402)..(3413): n is a, c, g, or t
  misc_feature (3415)..(3415): n is a, c, g, or t
  misc_feature (3417)..(3417): n is a, c, g, or t
  misc_feature (3422)..(3422): n is a, c, g, or t
  misc_feature (3426)..(3426): n is a, c, g, or t
  misc_feature (3431)..(3433): n is a, c, g, or t
  misc_feature (3437)..(3439): n is a, c, g, or t
  misc_feature (3442)..(3444): n is a, c, g, or t
  misc_feature (3446)..(3451): n is a, c, g, or t
  misc_feature (3453)..(3453): n is a, c, g, or t
  misc_feature (3455)..(3455): n is a, c, g, or t
  misc_feature (3457)..(3459): n is a, c, g, or t
  misc_feature (3463)..(3464): n is a, c, g, or t
  misc_feature (3466)..(3466): n is a, c, g, or t
  misc_feature (3468)..(3468): n is a, c, g, or t
  misc_feature (3470)..(3471): n is a, c, g, or t
  misc_feature (3474)..(3474): n is a, c, g, or t
  misc_feature (3476)..(3476): n is a, c, g, or t
  misc_feature (3478)..(3479): n is a, c, g, or t
  misc_feature (3481)..(3482): n is a, c, g, or t
  misc_feature (3484)..(3485): n is a, c, g, or t
  misc_feature (3487)..(3487): n is a, c, g, or t
  misc_feature (3491)..(3491): n is a, c, g, or t
  misc_feature (3493)..(3495): n is a, c, g, or t
  misc_feature (3497)..(3498): n is a, c, g, or t
  misc_feature (3501)..(3502): n is a, c, g, or t
  misc_feature (3504)..(3510): n is a, c, g, or t
  misc_feature (3512)..(3513): n is a, c, g, or t
  misc_feature (3515)..(3515): n is a, c, g, or t
  misc_feature (3517)..(3520): n is a, c, g, or t
  misc_feature (3522)..(3531): n is a, c, g, or t
  misc_feature (3533)..(3548): n is a, c, g, or t
  misc_feature (3550)..(3560): n is a, c, g, or t
  misc_feature (3563)..(3571): n is a, c, g, or t
  misc_feature (3573)..(3574): n is a, c, g, or t
  misc_feature (3576)..(3581): n is a, c, g, or t
  misc_feature (3583)..(3583): n is a, c, g, or t
  misc_feature (3585)..(3585): n is a, c, g, or t
  misc_feature (3588)..(3588): n is a, c, g, or t
  misc_feature (3591)..(3592): n is a, c, g, or t
  misc_feature (3595)..(3595): n is a, c, g, or t
  misc_feature (3597)..(3600): n is a, c, g, or t
  misc_feature (3603)..(3604): n is a, c, g, or t
  misc_feature (3606)..(3608): n is a, c, g, or t
  misc_feature (3612)..(3613): n is a, c, g, or t
  misc_feature (3617)..(3624): n is a, c, g, or t
  misc_feature (3626)..(3630): n is a, c, g, or t
  misc_feature (3633)..(3636): n is a, c, g, or t
  misc_feature (3638)..(3638): n is a, c, g, or t
  misc_feature (3640)..(3645): n is a, c, g, or t
  misc_feature (3648)..(3648): n is a, c, g, or t
  misc_feature (3650)..(3651): n is a, c, g, or t
  misc_feature (3653)..(3655): n is a, c, g, or t
  misc_feature (3657)..(3658): n is a, c, g, or t
  misc_feature (3660)..(3661): n is a, c, g, or t
  misc_feature (3663)..(3664): n is a, c, g, or t
  misc_feature (3666)..(3667): n is a, c, g, or t
  misc_feature (3669)..(3671): n is a, c, g, or t
  misc_feature (3673)..(3675): n is a, c, g, or t
  misc_feature (3677)..(3688): n is a, c, g, or t
  misc_feature (3690)..(3691): n is a, c, g, or t
  misc_feature (3693)..(3704): n is a, c, g, or t
  misc_feature (3706)..(3711): n is a, c, g, or t
  misc_feature (3713)..(3723): n is a, c, g, or t
  misc_feature (3726)..(3729): n is a, c, g, or t
  misc_feature (3732)..(3732): n is a, c, g, or t
  misc_feature (3734)..(3737): n is a, c, g, or t
  misc_feature (3739)..(3747): n is a, c, g, or t
  misc_feature (3749)..(3754): n is a, c, g, or t
  misc_feature (3760)..(3760): n is a, c, g, or t
  misc_feature (3762)..(3763): n is a, c, g, or t
  misc_feature (3765)..(3783): n is a, c, g, or t
  misc_feature (3785)..(3789): n is a, c, g, or t
  misc_feature (3791)..(3812): n is a, c, g, or t
  misc_feature (3814)..(3819): n is a, c, g, or t
  misc_feature (3821)..(3826): n is a, c, g, or t
  misc_feature (3828)..(3869): n is a, c, g, or t
  misc_feature (3871)..(3873): n is a, c, g, or t
  misc_feature (3876)..(3880): n is a, c, g, or t
  misc_feature (3882)..(3882): n is a, c, g, or t
  misc_feature (3884)..(3887): n is a, c, g, or t
  misc_feature (3891)..(3891): n is a, c, g, or t
  misc_feature (3893)..(3902): n is a, c, g, or t
  misc_feature (3904)..(3906): n is a, c, g, or t
  misc_feature (3908)..(3908): n is a, c, g, or t
  misc_feature (3910)..(3919): n is a, c, g, or t
  misc_feature (3921)..(3924): n is a, c, g, or t
  misc_feature (3926)..(3928): n is a, c, g, or t
  misc_feature (3930)..(3946): n is a, c, g, or t
  misc_feature (3948)..(3954): n is a, c, g, or t
  misc_feature (3956)..(3963): n is a, c, g, or t
  misc_feature (3965)..(3968): n is a, c, g, or t
  misc_feature (3970)..(3977): n is a, c, g, or t
  misc_feature (3979)..(3979): n is a, c, g, or t
  misc_feature (3981)..(3982): n is a, c, g, or t
  misc_feature (3984)..(3987): n is a, c, g, or t
  misc_feature (3989)..(3993): n is a, c, g, or t
  misc_feature (3995)..(4000): n is a, c, g, or t
ngnngngtcggncnnnnaggnngnngtcgaanngncgccggagcncacgcgcnncgncggtnncccgnggnanngnnncgaggtncngcancncnccntnnngnnnagggaggnctnnngcnncaaccgcgtgcgcggnntcgccanngncntggtgccggnnngcgatnngtacngtgcgatngncgtggcgtcgaagcacnncaagcagnngggcgcngcnngnnncntgtnacgcgnnntnnggngnncgnnngaggngcnggcgnntcgctgnncgnncggngcggnnngcnncccnccgacnntncgngcggcgnncncnggtnnaggcgnccanncngancngnncnncgnnncggnncngcncnnggnagggcngncggcggnnngggcngcncnnntcggagannngnnccgccnnnnngnngncgtcgggcagnacntggncgganggnaggcggnngnnccgnngccgccccgggcgcccngnncgaccgcnncgngngctccgccgctncngatcncgcatggngngncnnncgancgncggcagcgctnncngngnnagnncangccccncgnccagngcngggcggcgntnngnncngccgagcncntcccgnagccgncgcgacgcnncgnnnngnnggngtnncncggcggcggngnacggacngccgnngcgcnnatcggcgcgcggnntcangaggnngancncgncgggcggnangtcgtnanngnggnnnacggggagccggcgnagntganggcngnggggnncnacggcanggncgnggcggncncgnnncgcgacgangcnnctcngcnncgcgnccgcnngnangncncgncggggaggnaggnaagntanccgcgnnnnncanagcngcgggnnnnngnnncgcnnnnnnngcnnnnnnnngnnnnnnngnnnnnnnncnnngnannnncnnncgnnnnnnnngnngnnnnnnnnnnnnnnnanngncngnnnnnnnnnnnncnngnngcnnntnnnnnnnnnntnnnnnnnnnnnncnanntnctnnnnnnnnnngnngnccnnnnnnnnnnannnncnncgnnnnnnnnnnnnnnntnnnnnnnnnnnnnnnnnngngnnnnnnnnncnnnnnnnngnncncnngnnnnnnnnnnnnnggnnnnngnnnnnnnnnnnntngtnnnnnnnnnnnngnngtngnnnnnnnnnnnnnannnnnnnnnnnnnnngnnnnncnncnnnntnnnnnnnnnnnngnntnnnganngangcnnnngaacatgcagacaacatgaaatcaaggcaantatggtcaagtcaaacgaccgattagtactggtcagctgagagcatcgctgctcgtacacatccagcctatcaacgtggtgntctaccacgggtcttcagggagaactcatcttgaggttggcttctcgcttatatgctttcagcgattatcctttcccgacttagctaccgagcgatgccgctggcgcgacaactcgtacactagaggtcagtgcttcccggtcctctcgtactaaggaaacctcctctcaattctcctccgcccacaacagatagggaccgaactgtctcgcgacgttctgaacccagctcacgtaccgctttaaccggcgaacagccggacccttgggacctgctccagccccaggatgcgatgagccgacatcgaggtgccaaaccctgacgtcgatgtgaactcttggtcaggatcagcctgttatccccggcgtaccttttatcctttgagcgatggcccttccatacagaaccaccggatcactaaggcctgctttcgcatctgctcgacttgtaggtcttgcagttaagctcccttctgcctttgcactcgacggctgatttccaaacagcctgagggaaccttcgcgagcctccgttacactttgggaggcgaccgccccagtcaaactgcccgcctggcaatgtcccgganccggatnacggncctcggttagaacttcggtactgtaagggtggtatttcaccggcctctccaccgaacctagcggcccggcttcaaagagtcccacctatcctacacatacagcaccaaagttcactgccagggtgcagtaaaggtgcacagggtctttccgtctagttgcgggtagctggcatcttcaccagcgctacagattcgctgagcccctcgtggagacagtccccaaatcgttactccattcgtgcaggtcggaacttacccgacaaggaatttcgctaccttaggaccgttatagttacggccgccgtttaccggggcttcggttcgcagcttcgccttgcggctaaccgctccccttaaccttccggcaccgggcaggagtcagaccctatacgtcgttttcgacttngcagagccctgtgtttttgataaacagtcgcttggggcatttcactgcgactnncngtcgcttcntntcgcgaggangctnacgacnnnnagcacaccttcttccgaagttacggtgctaatttgccgagttccttcacgagggatcactcacgcgccttggaattctcttcccgtctacctgtgtcggtttncggtacggtcgtccngtgcctgaagcttagaggnttttcttggcagcctggaatcagtgacttcgnncaaaagagnnctcgtactcgcttctcggatntannnnnacggatttacctatcnanccatcctaccagcttcaacccncacttccgntcgnnggcncacctatcctcctgcgtcaccccatcgcagcanngtccggtacaggaatgttgacctgtttnccatcgactacgcctttcggcctcgccttagggaccgactnaccctgagcggacgaaccttcctcaggaaaccttagacttacggcgagtgtgattctcacacactttatcgctacttgtgccggcagagtctcttctgaacggtccaccagtccttnnnnnnttnnnttcnnncngntnnnnantncnnncnncccnccnaccgntnncnnnnnannananttnnncnnnnnctnngntnnnnnnntnnnncccnntnnnntnnnngnnnngnnncnnntnnncnnnnnnnnnntnnnnttnnntttaangnnnggnnnnttnnanncnanccnccngnnnnnnnnnnnnntncnnnnncctttccnnntnnnnnnnnnttngggnncntnancngnngnncnggntngtnnccnnnccnnnnnnnaanntanncnccncccnnnnnnnnncnnnnnnnnncttnnnngnnntnnnantttngntnggttnnnntacccngnnnngncccnnnnccnnncnnnncnnnnccnncnnnnnngnnnncgnnnnnnnnnncctnaannnanttnngnnnnnannnnnnnnnnnngnanttganttgnctttnnncccnnngcnnngnnnnnncnancnnntttnnancnannccngntnngnncnncncccngnnntnnccnngnnnnnnncnngncnnnncnnnnnnnnnncnnnnnnnnnnnnnnnncnnnnnnnnnnnttnnnnnnnnncnnannnnnntncnctncgnntcngnnnnttnntnnncctnncccnnnnnnnnannnnnccnnnncntnnnnnnaangnnannngnncnngnntnncnnntnnngnnnnnnnnnnnntnncnnnnnnnnnnnntnnnnnntnnnnnnnnnnnttnnnntcncnnnncnnnnnnnnntnnnnnnttcccntnncnnnnnnnnnnnnnnnnnnntnnnnnannnnnnnnnnnnnnnnnnnnnngnnnnnncnnnnnncnnnnnnnnnnnnnnnnnnnnnnnnnnnnnnnnnnnnnnnnnngnnnccnnnnncntnnnncttncnnnnnnnnnncnnncntnnnnnnnnnntnnnngnnncnnnnnnnnnnnnnnnnntnnnnnnntnnnnnnnnannnncnnnnnnnncncnncnnnncnnnnncnnnnnn

SEQ ID NO: 876 - DNA, 4000 bp, Escherichia coli
  misc_feature (1988)..(1989): n is a, c, g, or t
gttaaacaataccaagtatggaagatcttcataaagaattgcttccatttgatttgataatgcaatagcttcatctactgttttagcagcttcaaaagcatcagcaacagcatcaaattctggattgttataacctggtgtattaaaaccaccaccacaagaatcgtttcttgagtggaagaatgttactgctgagtctggatatattccaacactccaacctaacatataaaagttccaatttttacaattgtcagcaccgaatactgtgtcaacaataacactgaaaccagtaggtcttgcagttacatcaaatcctaattgtcttatataatccgcaataaatagtgagaatgtatttctcaacggatcatacccaggacctggtgcataaatcaacatatctgaatctggtacttcaccattaggacctttaattcctacaggtgggttagctcttgtatcattaccttcatgacttccccagtcatcagctgtccatccagcttcttgtaatatagaaatagctttttcccattttccaacagtatcaagactttcacactcagcaagtgttccggttaatggagccgcccaagctgttaatgcacctgagatagttccatccattctcttaactgttccctgaagaacactattgataataaagtctctgtcaactatacatgcaacagcatttctgaaagctttgtcgcttcctgggaaaagtcttgtattatgtgcaaaatatctcattcctaatggatcattttgtactaattcaatacctggtacttgagctaattgattaaatgtgtttctcttaactccaagagggttaagaacgaaatcaacttcaccattttgaaaagctaggtaagcagcatcttgatcactataaagtgtaaattctactgtacctacaaatggaccgtattcataagaaaaactatctccagttgtgtttccaaagtcaccgctaaatgcaggtgccttaccattgtcccaggcaaaacttgtaccaccagcatcataaatggtagcagatcctccgtaccacatggtatttggatcatacttccatgtatagaatgctccttgctcaagcttgtcatagacaaaagctccagctacaggtgcatctattgcatcatgagctaatagtgaatctcgatctgttgcaatgctttcccaataggctttacttaatgctggtccttgagcagcaccatattgccatgtagaaagacctggatcatagttgaatgtaacactaacagtgtaatcgtcagtagctacaatgcttacaatacagttcttagcattgccttcatcatcttcacacaaataaggataggagtttaaccagtttccaactagatttaatccagttactgtatcccatgtaaactgccagtcatgtgcagttataggatttccatcactccatgtataaccttctctcacaggaacattatatgtatatgttccatcaccattatcagtagaagtttcaacaagttcccctgccatagctacaactaattgatagtttggtattgatagtgtataaagactcgttgcctggtcagacattacgtactgtgtccaaacatcggtatcagtgtcgagataaccccagtaattgtttgtttgtggatctgaataaattgccaccttatatactccttcaggacctgaaggagcagcttcttcagctgcagctgctgtagtagctggtgcttctgttgtttcaggtgtttcctcaacaacttcttcatcagcagtatcgccaccacaggcgactactacaagagcaaaaactgaaaaaagtaatataagacgccaagatttggatcctttaaaattactcaatttctctcctttttttgtatacaaaaaatccacataaatgtggatgtattaatactagaaaatttgtatatatttacaacgtattattgaattaattttataatttatttgannagttttttaatttatgaaataaatgaaaacctgaaatattcttataattatataaaatccagccgcaaaaactactaatttgaatccaaaactatgcatttatttttactttaaaacatatatttttcatattgaaattgtgtcttatactgttttctataaacacctgatagttttttggaattctagagcttagattaaaagaaaattcgggtggataagatgaatattgagttacatatttaagctttgctcttttgcccctaaaaggatgtggcggatttttaatccacaattctctaaatttaatatttaattctgaagtgctaattcttgtatgtaattgatcttctacgtctttaatactcttactaatttgtgtaatattttttttgtttaaagcagaaatacgtaatacatttacccactggtattgctttaactcatttttaatatttttatttatttcttccttttcataagtatttaatgtatcccatttattaaaaactactaaaggagttactttttgctctattgcttcttttaatattcttttatcttcaaaggaaagaccaacttcactgtctataacaattaatgctaaagttgcactttcaagtgatcttatagctacagtcgatgagtacatatcaatttgattcttttgtttttttcttggaatcccagctgtatcagtaatttgataggaaacagtatttaaattaatatcttcatttattttatccctagttgtgcctggtacattcgaaacggtcgatctgttactatttaaaagagcattaaacaaagttgattttccagcattgggacgaccaacaatcactattgaagatttcttataatttacattagaacttttcttagaaagttttttaagaatgttttctaaaatgtctaacccttttttgtgatatgcagagataaataattcagtattgaatatatatttatacattctcttgtctaaattttcaatttcaaagttttctgccttattaaatactgtggtagttttattttgcagattgttattgtttattaatttaaaaatagaatctaagccagaataattttttgattgtacatctattaaaaacaatatatggtctgctttgtttatgtatcttaaaatattatcttgaaatttaaggttaatgtcatctggatcttctaaaaaaccaggtaagtctgaaattaatagctttttttcttcttcaaactctaaagttgtagttactttatctcttgttgtattcggtgtagaaccaataatagatgtttttcttttagataaagcgtttactaatgttgatttaccagcattaggtaatccgagtattaaaacctctgggattttatttttagtcatattataaatatagctattctatttatatggtaaacaaactatatttagttactcctagaggcttctgtgctggtgttgaaatggctataaaagctttacactggttattaaaaatctatgatgaaacaatctattgttatcacgaaatagtacacaataaatggatagttaaagagtttgaaaaaaataatgttgtttttgtagaagaccctaatgaaattcctaaaggtgcaattgttatgttatctgcacatggaactgcacctgaaattgaactccaatttaacaatatatcttcattaactattaattctgtatgtccattagttacaaaagttcatcatgaggcaaaaaaatttagtaaagaaaacacacaaattatttatgtgggtcataaaaatcatgatgaagcaaaaggtgcaattggcgtttcacctgaaaacatgcacttagttgaaagtattgaagacgttaaagcattagaaattggaaatgatgttgctctacttgcacagaccactttagctttatcagagtgggagccaattatgaaatattctcaagaaagatttaatggtttaaaaatgccgaggaaaagtgacttatgttatgcaacta

SEQ ID NO: 877 - DNA, 4000 bp, Escherichia coli
  misc_feature (849)..(849): n is a, c, g, or t
  misc_feature (1491)..(1491): n is a, c, g, or t
  misc_feature (1540)..(1540): n is a, c, g, or t
  misc_feature (1575)..(1575): n is a, c, g, or t
  misc_feature (1581)..(1581): n is a, c, g, or t
  misc_feature (1591)..(1591): n is a, c, g, or t
  misc_feature (1651)..(1651): n is a, c, g, or t
  misc_feature (1987)..(1987): n is a, c, g, or t
  misc_feature (2245)..(2245): n is a, c, g, or t
  misc_feature (2980)..(2980): n is a, c, g, or t
  misc_feature (3443)..(3443): n is a, c, g, or t
  misc_feature (3635)..(3635): n is a, c, g, or t
  misc_feature (3980)..(3980): n is a, c, g, or t
gggttgtggaagttgggcaccacgtatatgaacttgggcttagcgcccttccgccggtcgagctcctgctcgagaacgtccacgggcatcccctcctggtccaggtgcaccgtcaggatgtctggaccgttggggacaaacgcggtgagagccccgagatacgaagggccttcgagcgcgatggtatcaccgcggtcgatgaagatgcgcccgaggaggtcgagggcctgctggctccctgtcgtgaccaggatgtgctcggggttggctcgcaccccttcctctgccatgacttccaccagcgctgacttcagttcttcgcggccctcggtctccccgtactgaaatgcctcgttcagccctttctcgagcacggaggacatgacaccgcggatgtcctctggcggcaggccgccgatgaacgggagcccgcccccgaacgatattacgtcggcgcgcccgatgacgctcatcaggtcccggaccgccgaggacctcatgagaccgctcgcctcagagtaaaggcttgtataggggtcgaagattatctcgggtgacatggttgctctccttcagcccgctcgcgcaggcgggccgggatttcaaatgaaggtaacgcagggctgttgtgatgtcaattgacacggggcgcgcccgtgaggcgcgacgcccggaccacgataggatagtggccgggttttgaaatataatttagcgtcggatgttcaacgagcgggggagcgtttgttcagcgaagatcaggcctttgcacttttgaagcggaggattttcctcgacaggggtctcgactgcgagcagtacaaggaaaactacctcaagcggcggatngccgtgcggttgcgcgtcaccgaggcgcgggactacctcgactacctgcgcatcctgcgcagcgaccccgacgagtacacaaggctgatgaacgagctgacgataaacgtcacgcagttcttccgcgacccggacgtctacgccaggctgcgcgagtcggtcctgccggagctggtggagacgaagacgcgtatgggatcgcgcacgctccggatatggagcgcgggctgcgcgagcggggaggagccgtactcgatggccctgctcatcgatgaggtgctggccggcaactccaaggcgtggaacgtgcgggtcctcggctcggacttcgacgagaagagcctggccgtggcccggctggggacataccaggacctcgagatgctgccgggggtgcaggccgaccgctatttcgagatagtgaagaagccggaggggacggagtatcgcgtcaaggacgagatcaagcgcaaggtgaggttcgagaagatcaatctccttgccgagagcgaggcgcggcacttcgacatggtgctttgccgcaacgtcctcatctacttcggcaggaaggtccagacgcggataatcgagaccctgtcgagaagcatcctcagggacgggtacctggtcctcggcaagtcngagaccctggggcaggaagcgtcgcaggctttcaagccggtgttccccngggagaggatctaccagatgctcgtcgatgaccgntcggcnggcgggagantgaggcgagttgggagctccagtgactgaactctttaaaagggcatggcgcgctctcacngtcccgacgttcaagatgaggatagcgcagacgttcgtggtcgtggtgtgcatcgtcctgtccctcatcatcgtcggagggatcgtgctgctgcggagctcgaacgcgcggagcctgactcagcaggggcaggcgctcaaggccggctccgagcagctcgatcaggcgtcggagagcttcggcgaggcggttctggccgagctgggcggaaacaccgggcgcgcccgggccctcactgacgacggcctccggaggctggcaaaggccgaaatcgagttcaagagatttgaaagcccggtgtcatcggatctcgcgcgtaagaccgcggctctcgcngccagtatcgatggggtcgcaagctctgcgaaatacgtcgaggcgcgcgccctcgctgccgcctccgacagctccgcgcaagcgacacttgcccacgctgtccaggaaggcaagggactggtcaggttcggcatcatcgcctacatcatcatcttgatcatcactgtcatcgcggggatggtgacgatgatcgtcgcttacaaagggctctcgggcatactgaaaaaggtcatcgccgaggtgagcgacatcgccagngggaagggcgacctcaccgcgactgtgacggttcccaccagggacgtgatgggggacctcgctgatgcgataaacgagatggtctcttccttgagggaatccatgatcgagatcagaaccatcgcggtcgagctcgccaactccgccgactctcttgcgggttctatcgaagggatgtcctcctcgatcggggaggtgacatcagccgccgagcagatctccaccggcagcgaggaccaggcgcgcaaggtcgaggacacgtcgcacgcgatgggcgaggtcagcagggtcgtagagggcatcgccgacaaggggcaggtctcggcgcgtcagagtgagctcaccgccgagctcgcggagcgcggtggcgaagcgtcgcaggaagccgcgcgcgtcatgagcgagatatacgaatcggtgaagcgttcggagaacctcgtggaggggctgggggagagatttacccaaattgggattataatcgacgtgataaccgatatcgccgaccagacgaacctgctggccctcaatgccgctatcgaggcggccagggccggggagcacgggaagggcttcgcggtcgtcgccggcgaggtgcggaagctcgcagagaactccaagcgctcagccgagcagatctcccacctcatcagggagataatgtcggaaaccagacgggttagcgcatcgatggctgagagcacaggctgtgtggacacggggcaggaagtcgcncataagaccggggaggcgctcgagggcatcatgaattcatccagcacggctgcccacgccgcctccgagatatctgatgcaatacagggcatcgcggccaacacggatcgagtgttcggggccataaacgacattgccgcgatcgcccaggagacggccgcgagcacccaggaggtcgccgcgaccatcaacgagcagagggtttcgacggaagacgtcgccgatcagtcgctggcgctggcgaggctggcatccaagttgcatgagctgaccgacggcttcaaggtctgacaggaagtcgtgggtccggcgcactcgaaagggagaagcgtaattggataatgaagaggccacgcaaacaagcgtcaaggccaggtggggcaacctctctatgacgcagaggtttgtcttgaggaccggctttgtcgcgcttcccgcggcaacggccgccgggctggttttngtcgcagtgctcgtcaagaacaagacggtaggcgtctggatagccggaggcgcgctcggccttgcggcgggcatcatcgcgatggctttcgcggggtacgccgcggtgtcgatgtacgtgcgcccgctcgagaagctcgagttattctcgcgcgagctggtcaagcacgacttctccaccgatgtcgagatnggcatgcggtcggagctgcgccccatatccgtcgccctgaaccagatgctcttctcgcttcgccggatcgtcgacgagatgcacacggtctcggacgaggtcgccgggtccagcaacctgatggcatctgtggcgaaagagacgtctgacgccgtacaggctacggcgtccaccgtgtcgggccttgcccgcggggccgaggaccaggtcaactcgatgatgctggcttcgaccaccatcagccagatggctgaagagatcgaccgggtcgccgaagccgcccgcgaggttgccaagtacagcctcgaggccagggtgaccgtcgaggacggcggggaggcggtnggccgggcgacggactcaat

SEQ ID NO: 878 - DNA, 4000 bp, Escherichia coli
  misc_feature (219)..(219): n is a, c, g, or t
  misc_feature (232)..(232): n is a, c, g, or t
  misc_feature (409)..(409): n is a, c, g, or t
  misc_feature (421)..(421): n is a, c, g, or t
  misc_feature (469)..(469): n is a, c, g, or t
  misc_feature (502)..(504): n is a, c, g, or t
  misc_feature (823)..(823): n is a, c, g, or t
  misc_feature (827)..(827): n is a, c, g, or t
  misc_feature (1363)..(1363): n is a, c, g, or t
  misc_feature (1956)..(1956): n is a, c, g, or t
  misc_feature (2076)..(2076): n is a, c, g, or t
  misc_feature (2136)..(2136): n is a, c, g, or t
  misc_feature (3030)..(3030): n is a, c, g, or t
cttttcagaaaataccagtactgtacttcaaattttagcagtagttgttcttgctgttggcggattaagctattataaccacactggcaatataaaaatggaaagcgcttcccatttagccggaagagctcaaaatatctttattaatggaaatttagatgaagctattgtaaaatttgagagagtattggcagattaccccaacacacctggagctgntcaatcgttagtntatttattgaatgatgccatgacaaaaaatgatattgaagaagcaaaaagacttttaaatgaaaatgatggttctattaatgatcctcatgttttagctgctatatataaacttcagggagatatctcacttactgaagctgacttttctactgcattaaaatatttccagaaagcngaaaatattgcngaagggaatccagttcaggccggatttcagcttgacattgctgctacnttattggcacagaataattatgaaaacgccctnnnaacattagaagaaataattgataatgaagatgttgggtttaatgaaaaaaatattgctgaagaactgatagcttacacgaagcaaaaaatggggatataattcttgtaaaaaacaagaatattgccataaattttaagtagcggaaagtggggcatgaacccactttctctttttatagacaaatcaaagctaaaattaagacagaggtatatattgattaataaggatattattgaagccttttccatgctggcgaaggaaaaaaatattgatcgtaccaatttaagtacgattattgaagatatcttcatggctctnatcnataaaaaatatggtgaggaaagagaaaatttcagcgtaattgtaaacatggaaaaaggtgaaattgaaatttaccaggaaatgaccgttgtaaacaccgtaatggatccggtaatagaaatccatattgatgaagcaattaaagagtatgatgatcttgaagttggagacgcttatgtaaatattttaagtcctgagagtttcggcagacgattaattaatactgctaagcaatatatggtacaaaaaattagagatattgagcggcaaactgtctttgatgaattctcaagtaaaattggtgaaattgttgttggtaatgtgcatcaaatacagcgtgaccagatttttgtacatgctgcaaatggtgcggaattcattatgcctaaaaatgagcaacttccaaatgaccgatttcgcaggggagaaactattcgggggattattaccaatgttgaaatatccagcagaggacctgaaattatcatttcccgaagtgatgactttttcttaaaacgattatttgaaaaagagatncctgaaattgaggatgaaattatagaagtaaaagctgtgaagcgtgctcctggagatagaagtaaaattgtggtgtactcttctgaccgccgtgtagatgctgtcggtgcgtgtgttggaatgcggggaagtagaattcagtccattgtacgagaattaaatggtgagaaaattgatattattaattggagcgataaaccagaaattcttatttcccgagctttagcgcctgcaaagcctattaatctttatattgatgaagaaagaccttatgtggttgccgtgtttgaagatgaagaattgcctatcgccatcggcagaaatggccaaaatataaaattggcttccagtgtcaccgaatatacaattgatgcagttaaaaaatctgagtatgaaggcgaacaggaagaggctctttatctggatgagattgagggaattgcaaaaaaccatattgaagtattggctaaaagtgaaatatataccagcgaagactttcttagtacaacgaaggcagatatattaacgctgaaaggatttggagaaaaaactgtggataagattacagcaataattttagaagctgtagcaantcatgaggcaaaaagtgttgagaaagaagaggggaaaacagaggtatctgactcagaagaatcgatattagaggaggttaataacgattaattatgcctgaggttgctaagaaaaaacgnatttttcaaattgcaaaagagctgaatatttcccatttggaaataatccagtttctaaanaatcatggtactgaagtcgatagccatatggctcccgtaacacctgaaacatacgatgaaattttgcttgaattttctaaagataaactgcaaattgagcgccatcgaaaagaacaggcacgaaaggtagttgtatcaaaaattcataaaaaagaaattgaagatccagcattcgccggtactcttgctaagccacctgttcgaaaactgaaaacctcacttaatgaagaaaaattggcattatccgctaaattgaaagatgcctcagataaacttacaaaagaaaagaaggctgttgccgataaagaaaaagctgaagcaaaaataaaaactgtaaagcctgaaataaatggttctaccgatgcaaagacgaaattagatacagctaaatcagaaaaaaacgacaatgatactattaagttgaccagagtatctgcaaccgaacatgctcctcctccacacagaaaattgaagaaaatcagcatccaggatatagctgataaaataaatcaaaccaaaaggcgttctccaaaagggaaaggtgatgcaagtaaaccgcaaataaagcagccattaccccaatttggaaaaagtgtttcaaaaaagaaaagtaagaaaaaagaaaaaaatattgatgttgaaacttctgatattgtaaaatccataaaggtacctgaatttactacggttgacgaactggcacaatccatggatgtaacggttcaagaagtgataatggcctgtatggggctggggctgatggtgaccattaatcagcgaatggatatggataatatcatcatgattgcagatgaatttgggtttgatgtagaaacggttactgaatttgaagaagagaaaaccagtcatgaagaagatactgaagaagatatnaagaatgctatggagcgtgctcctgttgtaacaataatggggcatgttgatcatggaaaaacatcacttttagattttattagagatgccaatgtagttgctggagaatctggtggaatcacccagcatattggtgcgtatgaggtaatattagatagtgggaaaaaaataacatttttggatactcccggacatgctgcttttactgccatgcgggcgagaggggctcaagttactgatttggtaattgtaataattgctgctgacgatgatgttatgccgcaaactaaagaagctattgatcatgcaaaggcggcagaagttcctattattattgcaatcaataaaattgatgtgccaaatgcaaatcctgataaaatccgcaaatctttaggtgaacttaatattttagttgaagaatggggtggtaaatatcaatgtcaggagatatctgctaaaaatggacaaggcgttgaagaattattagataaaatattacttgaagcagaagtattagaactgaaagcgaatcagaaaactgaagcaaaagggatcgtgattgaatctcgccttgataaagggcttggggcagttgccactgtcttaattaataaagggactcttttcaaaggcgatggatttgtttgcggcaatcaatttggaaaagtgcgggcattgatgaatgagcgaagtcaaaaactgacacaagcttatccctcggatcctgtacaaatattaggatttgatgaagtgcctaaagccggagatactttcaccgtatttaaagatgaacgagaagctaaaagaatagcaactgaacgggcacagctaacccgagaggctgaacatcgccgatttagaaaaataacccttgaccaaatcggtaaaaagatatcaagtggtgaagtccgagaattggatattattatcaaaggtgatgttgatggatcaattgaggcagttagcggtt

SEQ ID NO: 879 - DNA, 4000 bp, Escherichia coli
  misc_feature (1)..(8): n is a, c, g, or t
  misc_feature (10)..(11): n is a, c, g, or t
  misc_feature (13)..(16): n is a, c, g, or t
  misc_feature (18)..(21): n is a, c, g, or t
  misc_feature (24)..(25): n is a, c, g, or t
  misc_feature (27)..(27): n is a, c, g, or t
  misc_feature (29)..(29): n is a, c, g, or t
  misc_feature (32)..(34): n is a, c, g, or t
  misc_feature (36)..(36): n is a, c, g, or t
  misc_feature (38)..(41): n is a, c, g, or t
  misc_feature (43)..(46): n is a, c, g, or t
  misc_feature (48)..(48): n is a, c, g, or t
  misc_feature (50)..(51): n is a, c, g, or t
  misc_feature (53)..(55): n is a, c, g, or t
  misc_feature (57)..(58): n is a, c, g, or t
  misc_feature (60)..(67): n is a, c, g, or t
  misc_feature (69)..(70): n is a, c, g, or t
  misc_feature (73)..(86): n is a, c, g, or t
  misc_feature (88)..(89): n is a, c, g, or t
  misc_feature (91)..(92): n is a, c, g, or t
  misc_feature (94)..(99): n is a, c, g, or t
  misc_feature (101)..(105): n is a, c, g, or t
  misc_feature (107)..(111): n is a, c, g, or t
  misc_feature (113)..(117): n is a, c, g, or t
  misc_feature (119)..(129): n is a, c, g, or t
  misc_feature (132)..(136): n is a, c, g, or t
  misc_feature (138)..(138): n is a, c, g, or t
  misc_feature (140)..(140): n is a, c, g, or t
  misc_feature (142)..(142): n is a, c, g, or t
  misc_feature (144)..(145): n is a, c, g, or t
  misc_feature (148)..(153): n is a, c, g, or t
  misc_feature (155)..(156): n is a, c, g, or t
  misc_feature (158)..(164): n is a, c, g, or t
  misc_feature (168)..(178): n is a, c, g, or t
  misc_feature (181)..(186): n is a, c, g, or t
  misc_feature (188)..(188): n is a, c, g, or t
  misc_feature (195)..(201): n is a, c, g, or t
  misc_feature (206)..(206): n is a, c, g, or t
  misc_feature (209)..(210): n is a, c, g, or t
  misc_feature (212)..(214): n is a, c, g, or t
  misc_feature (256)..(257): n is a, c, g, or t
  misc_feature (259)..(260): n is a, c, g, or t
  misc_feature (274)..(274): n is a, c, g, or t
  misc_feature (281)..(281): n is a, c, g, or t
  misc_feature (289)..(289): n is a, c, g, or t
  misc_feature (309)..(309): n is a, c, g, or t
  misc_feature (331)..(331): n is a, c, g, or t
  misc_feature (348)..(348): n is a, c, g, or t
  misc_feature (358)..(358): n is a, c, g, or t
  misc_feature (369)..(369): n is a, c, g, or t
  misc_feature (713)..(713): n is a, c, g, or t
  misc_feature (1986)..(1986): n is a, c, g, or t
  misc_feature (1988)..(1988): n is a, c, g, or t
  misc_feature (3249)..(3249): n is a, c, g, or t
nnnnnnnnanngnnnngnnnncanngngngannngngnnnnannnnananntnnncnntnnnnnnnntnngcnnnnnnnnnnnnnnanncnncnnnnnntnnnnngnnnnngnnnnntnnnnnnnnnnncgnnnnngngngngnnttnnnnnnanntnnnnnnntctnnnnnnnnnnnttnnnnnnanaaaaaannnnnnnttttnttnnannnggggggggggcagtttgtcgcaccttatgtgacatccagatnngnncctggctgcgtagntaactgngtgaaggnttttgctttcctcccctagnccgattatcagaattggtcctncttgcctcctgactatnggtcaggggncttttttctgnccggggcgacagggggggcatgatcttgaggccgggactaccttaccccgccagccggtcgtcccgttcttctgaataatcggaaaggccgacatagagcttgccgagcaattgccggagcatcgccagttcggcctccgaaaaatcgccggtcacttttgcttccagcgctgcggcctggggcaggatggtctcggtcacgcttttgccgttagctgttagttcgacggtgaaggagcgtgcatcttcggcatcgcggacgcggcggacgagatctttcttctccatccggcccaggacgcgcgacaaggtcgagaaattgatgctggtcaggtcggacagtncgccgacggtttgagcgccccgctggtatagtgcgatcagaacccgccacgactggatatcgacgccggcctcgctgaggaccggcgtgatatcgctgatgaaccgctgcccgacgcggttgacgagatagggcaggtaagtgccgagttccaagacaggttactccgcggcgatactgtagttctcgaagttcggcgcgacttcttccatgaacttgtgcatctggtccttgaccatgccgtgcggctttttaccgacgttgaaatacaggatgcattcatcgataccggcggcctcgacggctttgagctgctcggtgatctcggcggagttgccgagcaggacggaattcgacgatagcgtgttcttcgtcatgttccggaggatctcgttgatcttcatgaagtaatgcatggtcggcggcatcgtggtcggatcatcggggaacgcgcgcagcacgcagtgctggaagtaatccatcattgcctggcgtccgatatcgtcctcttccggcgtgtccgagatatggatgaaatagctgcacatggcacggcccggcttgttgccggccttcacgcagttctcgcgatagctgtcgaccgccttatccaggctgccatagaccatcgccgcggcaaacggtgcatagatgatgttgtgacctttgttccctgccatcttggaggatgtttccgagaacgacgcgacatagaaggggatcgggtcctggatcggcttcggcgtgatatccatatcctggatatcgtaatatttgcccttgtgcgaccacgggcctttttcggtccatgccttccagacgatatccatgccttcctcgaagacttcggccgacgtcatgaagtcggcgccgaacgggtggtattcatcggcatcgtagccgcgcccgcaggcgtaatcgacgcgaccgcccgatagcaggtccaatgtcgcccacatttcggcaacatggataggatgatgaattggcaacacgttgaccgcgggggcgaggcgaatattggttgtctccggaatgatgctcgccagcaggatgtccgggcgtgaattgacgccgagccggtcaaaatgatgttcgccgatccaggcagagctgtagccgagcttgtctgccagaattgcctgttcgcggatctccagcacgaagtcgttcgcagaacgcggattgtccggataatagttgtcggagagtgtgaaatacccgaaatcgatcgccatgttgtatctccctatgctgacgttttgcttgttgangnatttgtaattgcaaataaatatatttgcaagtgcaaattatggggtggtcggaggtgactcgacaagctgcgcgccgcggtgtttttctatgcgaaataaaataatgagcccgctgatatgaaggtgatgcgcgaaacggcactcgcaacggcggaagagcggcaggcattgatcgcctcgctgccgacgcggttaaacgatgtactgcatatgcgggtccgggaaacaccagacctgccggtgatctatgcagggccggatatctttagctatgccgacctcggaagaggtgtcgaggcagcgacggccatcttgcgggatgccggtctgagggcgggcgaccgggcgttgctgatcatggagaacagctttgccggggtgtgctgcctgtatgcgatcatggcgctcgatgcatgggctgttcttgccaattcacggcttacggtgcgtgaacgcgatgtaatgatcgacaaggctcaaccgcgcctgatcgtatgcgtcatcggagacaagccggagacccatgaccttgcgccggtcggttcatcaggccatcggggaaccgcctgcggcacctttgctgtgagcacagcagacccaagtgtcataccggagccggtaccggaccggaccgatgaacaggttgcggtcatgctattcacatcggggacaacgggcgtgccgaaagcggcaatgctcgggcacaaatcgcttatgtatcagagttccatattatcggaacgtcgtgggttcggccccggtgattgaccgtatctggtggcgccgatcgttcacgtgctggggctcgccgggatattcctgcctgccgtctatagtggcagcgccgtggagctcgccacccgttttgatgccgattttgtcatggagggtttgcggcagaacaaactgactcacctttacggtgcaccgccgatgatctcgatgcttgtcgaccgggcccgtcaggaaggcgccgcgcttgatgtgggcaagctcagggagttgttcagtggcggggcgctggtcgatcgtgagctgtgcgaccgggtcgaacagaccttcggaatgaaactgagcattggctacgcggcgaccgaatgcacgccgattgccgccagctcacctgcattgccggcgaatcccggcgcggtcgggctgccgtttccgggcatggatgtccgcgtggtcggcccggacggcacgccgctgcccaccggcgagaccggggaaattcaatgtaacgggcccaacatcatgctnggctattaccgggacccggaagcgaccgcgttggcgattgacgatgcgggctggttgtcgatgggtgacctcggttttttcgacgatgatggacaaattcatctggtcgggcggctcaaggatctgataacccgctcagggttcaacgtctatccggcggagatcgaaggcgttctgaacagctatcccgacgttctgcaatctgctgttgtcgggcgagtggttccgggaaatgaagaagtgatagccttcgtcgaggcgatttcgggcgcagagattaacgtggctgaactcgccgcctatgccgccgagatgctcgcgccttacaagaaaccggcacatatcgaggtactgtcaaagctgccggtcggcgcaaccggcaagctgctgaaaaccgagctgcgtgaaattgccgacaggctggacctggcgtgatcgaagccgcatttgccgagcgccgcgaacacgctacgataggcgttcaacaaggggataaccgatgtcagaagccgtctatcgcgaatacgattcagaagcgctctttgcgcagtacgataaccgcgcgcagctttccgaagaagcgctgaacgccatcaaggcagaccagagcgcacggtccgaggcctatatcgccagcaccgagcgcaagcatatcaatgttgcttacggaccgcacgagcgcgagaagctcgatatctttctgccgcaaaatgacggcgcgccgatgttcgcattcatccatggcggttac

SEQ ID NO: 880 - DNA, 4000 bp, Escherichia coli
  misc_feature (488)..(488): n is a, c, g, or t
  misc_feature (591)..(591): n is a, c, g, or t
  misc_feature (1146)..(1146): n is a, c, g, or t
  misc_feature (1215)..(1215): n is a, c, g, or t
  misc_feature (1746)..(1746): n is a, c, g, or t
  misc_feature (1947)..(1947): n is a, c, g, or t
  misc_feature (1985)..(1985): n is a, c, g, or t
  misc_feature (3239)..(3239): n is a, c, g, or t
  misc_feature (3511)..(3511): n is a, c, g, or t
  misc_feature (3519)..(3519): n is a, c, g, or t
  misc_feature (3558)..(3558): n is a, c, g, or t
  misc_feature (3594)..(3594): n is a, c, g, or t
  misc_feature (3881)..(3882): n is a, c, g, or t
  misc_feature (3884)..(3884): n is a, c, g, or t
  misc_feature (3888)..(3889): n is a, c, g, or t
  misc_feature (3891)..(3892): n is a, c, g, or t
  misc_feature (3894)..(3895): n is a, c, g, or t
  misc_feature (3897)..(3900): n is a, c, g, or t
  misc_feature (3902)..(3902): n is a, c, g, or t
  misc_feature (3904)..(3905): n is a, c, g, or t
  misc_feature (3907)..(3919): n is a, c, g, or t
  misc_feature (3921)..(3923): n is a, c, g, or t
  misc_feature (3927)..(3930): n is a, c, g, or t
  misc_feature (3932)..(3932): n is a, c, g, or t
  misc_feature (3934)..(3940): n is a, c, g, or t
  misc_feature (3942)..(3947): n is a, c, g, or t
  misc_feature (3950)..(3954): n is a, c, g, or t
  misc_feature (3956)..(3956): n is a, c, g, or t
  misc_feature (3958)..(3959): n is a, c, g, or t
  misc_feature (3961)..(3978): n is a, c, g, or t
  misc_feature (3980)..(3982): n is a, c, g, or t
  misc_feature (3984)..(3992): n is a, c, g, or t
  misc_feature (3994)..(3994): n is a, c, g, or t
  misc_feature (3997)..(4000): n is a, c, g, or t
gggttagtggcgccgatcccggcctataccttgctcacgggcaaccagttggacgctgtgccgatgatcgcgtgggtgttctcggtcagtttcctgggcatttggatcgcctggtatctacggccctccctgctgaatgaccacgcgttgaaattccccgaaggcatggccaccctggaaaccctgttgcacatttacaaccacggtcgcgaagccgcgacgcgtttgaaggtgctgctcagcgccgcgctgctctccggtttggtcaagtgggtcgatacctttatgtgggcgttcccgcgctggtcgcccagcgcgcacttggagcgcctgacgttcactgccgacccttcgctgttgctggtgggctttggcggcatcatcggcattcgcgtgggcctgaccctgctgctcggcgccctgctcgcctggggcgggctgggcccctggttgttggcacaacacctggtgacattgcctgcggacancagcggcccacagttcgccgcgctggtggagtggttgctgtggccgggcgtgagcctgatggtgtgttccaccctggcctcgttgacgatacgtttgtggggnttgtaccgatcgacccagtccagcggcggctcgacgtggaccctgcccaagcccgggcccgccgctgggtttgcgctgtcgatcgggctggtggtgagtctgcaggcgctgctgttcggcatcgacctgggaatggcgttgctcaccattccgctggcgatctgcctggctgccgtcgccgcgcgcgtggtgggggccaccggcatcccgcccatcggtgccatcggccaactgtcccaattgagctttggcatcgttgcgccggggcaggtgccgatcaacctgatgagcgccaataccgctggcggttcagccgggcaatgcacggacctgatgaacgatttcaaggtgggcaaggccattggcgccacaccgcacaaacaagtgatcgcgcagatcctgggggttttcatcggcagtatcgtcggtgtattcgcctacctggcactgatccccgacccgcaatccatgttgctcaccgaagagtggccggcaccggcggtcgccacctggaaagcggtggcacaaaccctcacccatgggctcgactcgctntcgaccagcatccgctgggcgattgccatcggcggcttggttggcgtgctgctcggcgtgctggacagnaccttgcctgcccatcgcgcccgcttcctgccgagtgccgcggcattgggcctggccttcgtgctgccggcttcggtttcgctgatgatggccctgggcgccatactgacctggctggtgagctgccgctggccgagcctcaccgagcgttttgcgattaccgccgctgccggcttgatcgcgggggagagcatcaccggcgtcggtgcttcattgtggtcgatggtgaggtgacgcatggctcggcaaacgccgagcctgccgtcccggcctcaggcgatcttcacattcatggtgatcttcgccgtaaacaccttcaccccgccctcatcgaaaatatccaccggcacgatcttgtcgccagccgttgaccagtcaatgccactgccatccgccaccgcacggatgttcgacttggccttcgccaggtactccacggtcatgcccttgggaatccatctggcgccttgggcaatcgacacatccgtcatcgtcccaccggccaattccgccgcgttgcacaacgcaatngcatgcaccgaggccaggtggttggtgatttccttgcgaaacggcacgttgaccaccgcgtggcctgggcgcagttcggcgatttcagggttgatggtgctgaagtagggcgccacctggcaggccatctggctgaacgcggctgggcctacgctgttgaacatgctgagaaactgactcatggatttcctcctgataggnttacagaataatattctgtgacggaacaatattctgtnaattccaagggtgtcaagccatgccttctctagcggctgctgtacctttagactccgcacatttggcgagcgacttcatgcacgcacctgatctgatcgagcgcaccttcccgggccgacgcagcgacctcaagcgcagcatcctgcgcgaggcgctggcctgctttaacgaagtgggtattgaagccacgaacatcgaaaccatccgcgcgcggtgcgacaccagcgtgggtgccatctaccaccatttcggcagcaaggaaggcatcgtcgccgcgctgttttttgccgcgctggaggaccaggccgccctgcgtgagcactacctgacgcaggcgcaaaccgcccaggcaggtgtgcaagcgttggtgtgcagctatgtggagtgggtggacgcacaacccgactgggcgcgctttgtgttccagagccgtttcgccgtggccaacggcccgttcaaggatgaattgctcacccgcaacaaacagcgcaatcggcaattgaccgagtggatgagcgaggagggccgcgctgaagcgttcagccacattcccgccgagcttttgctctcgctgatcattggcgcggcagaaaactacgcccgggcgtggttgtccgggcgggtcaagaaaagcccgaatgcctatgcgtcgttgttggcccaggcggcgtgggcgtcgatcagccaaacgcctcctcaataaacgcctcgagtgtcttctcttccaggatctccatggagaagtgcccgaagcgcttgggcagccagataatgcgcccgccagaaggtgactgcaggttctcgcgggccaggggcacgccgttttcattctcgggttgcacaccggcggcgatcagctcgtcataggcgacctcgatgtccggcgtggtgtagcagtggcggtaaatcatgccttcgccgtgggcgtccaacagctcgcgcagattcccgacaatcggctggaccagcatgaaccgctcttgccccatcagcaccacggcatagcgcacatgcagaccgccgcgttcccacacgaaagtctttgagatgcgtgcgttgaggatgtgcgcgtaataggcgcaagcctcctcgaggttttcaaccagtatgtcgacgtgactgaacttcaggtccatggaggaactcctgtgaaatcgatccccatggtaaccacgcgtgtttgtcgcgttgaaatttaattgtcggcactcccggacgctggcgtagtctgtttccaagacatcctttcgctncgcggagtactcaatgatcatcgtccaccacctcaacaactcacgttcgcaacgcatcctgtggctgctcgaagaactcggcctgccttacgagatcaagcgctaccagcgtgacccaaagaccaacctggcgccgccggaactcaaggccatccacccgctgggcaaatccccggtgatcgaagacggtggccaggtgttgatcgagtccgccgcgatcatcgactaccttatccgccatcacggccagggccgcctgcaaccggacccgnccagcgcngcctatgacacctacgtgcaatggctgcacttcgccganggctcggccatgttgccgttgatgctcaacctctangttggccgcctgggtgaagccggcgcgccgttgcatccgcgtattgaatcggaagtggccaactacctgggttatctgaacgacgcgctggcggataaagcgtacttgctgggcgacgagctgagcggtgcggatatccagatgagctttatcggcgaagtcgccggggcccagggcaaattgcaggcctacccgcacctggcggcttgggtagaaaaattccaggcccgacctgcgtatcgcaaggcagtggagcagggtggggagtatgcgtttgccaagtgacnngngctnngnnanncnnnncngnntnnnnnnnnnnnnngnnngccnnnntngnnnnnnnannnnnngcnnnnncncnncnnnnnnnnnnnnnnnnnngnnnannnnnnnnnanagnnnn

SEQ ID NO: 881 - DNA, 4000 bp, Escherichia coli
atctctgcagccaatgcttgattctcaatgatcagcagcctgcttctcagaattatttgctcgttatgagactttcttccacaacttttattttatttttcaacgttttgctcgcaggcactgtctcatttatggcaggctcgctgctcagtacgtggcttcatcatcaagtcttgtctattcctgttttgtcacccagaacattccaaatcgaaactgctaaactgccggtcgattccggaaaagcacaaaaagaatttgcagtaattttggaacgcaatatctttaatgcgcaaaaaacggaaatcgaattgccgccaactcttcctgaagaggaaattattattgaggaaaccacggatggtgaaacagttgaacacacacgtttagcaatcgcacttgcaggtaccatgatttacggagagcagaattcatttgcttttatcagtaaaaaagatagtttaaacaaatatttgatttatggaataggtgaatgttttcacgcaaaaacaattaagcgtgacgaagaatgtgcagaagaaagcgtaaaagtgttgaaaatcaaggatcgctgggttttgattctttatcaaggtgaaaaacaagctttgtggatggtcagcggggatacttcaggaaagtcagcgctaactgctactcaaccaaaaaaggcaaaaggccaaactgcttctgtacagcaaactgctgcgatcgttgtaccgccacagaaaaatgttgttgcagaaaaagccattattcctgcttctactactgacacaggaaatacttatcattttcagcgggtgtgggttgatgaacaactggcaaatttccagcaactgctgaatgatgcgagggttgttccgaccacaaaagatgacaaaccttatttcatgtttcagtacattaaagaagaaagtatctatgaaaaattgggactgaaaaaaaatgacatcattttagaaataaacggatttgttgttgattcagttggaaaagcactcaagttattggaagtacttcaatcagaacgtgagatttccctcaaggtggaaagggagggtaatgcggtacaattccattactacattgattgagcgtgctaactgctaatcgctaacaaataggtatcttgcagaatgttgttcaaatggtacaaaaccggtttactcgaatttgcaacactgctggctgcactgctttggattttctcccgttatcaacacacccttaatcagcttcaccctgaatggatcttgctggcagttgtcttagctgttttttggtgcctgcggcataacttatatcttcccttttttttacttcttttgattgcagcaattctcctgcaccaatggttagttgtgcttccttcaagtgtgaactggctgaagcaggaaatttcagcggaatcaacaattatgctcaacggcaggattcagcaacgaatcctcaaagaagatactgtccgtctgcaactgagttcagtggaactgagcaaaggcgaaaaaaagctgcatcttccggaagcagttttatactttccaaaaaaacgtcgcagaatttataatttttatcgtggacgtcatttacaggtcatcggccaattgagtgaagtcagcattgataagaatcgtttgaatttaggttttgcagattttcgttatcgtaacgccatttatccgcaatccgaactcttccgcaaaagaaacagttgggtacggcaattaacagacagggcggagtttcacctttccagtcaagcactcgcgctgtatttaccactgacattggcgaagcgttcttatggttctcgttctactgcaaaggtttttcaggaaaccggaatggcacatcttctcgctatcagcggtctgcacattggtttaatctatggaattatcctcggacttgtacgcggaataggacgtctctcaatccgttttttggagcacccccgcttttacgcaatctctcagttgatttctctatccggaatttggctttatctgttcttaattggtatgcctactccggcatttcgtgcagtatttatgttgagcttactggttgccggacgtttgctcggtcaagttcatcaacctctttacgccttgtttgcaacagcattttacttcattttcctaaatcccgcagtgatttacgaagtttcatttcaactctcatttctcgcggttttatttattctgtggttcctcccactttatccacgccctggacaaaatgatagtttctggaaacgtctcattaaatacggattaatcagcgtcgccatcacgtcagcagtaatgcttggtacatggcctgttgtggccagtattttcggacgcctgtcactggaaacattctggttgaatattattatggtcttcttgcttgggctgctggttttaccaagctgtctgttgacgctttttgtcagcgctatttctttgggaaatccgcctttcggattgctggaaaacgtcgtattttcgctgaccgagctgattgtacagggttggtttgcagtacttgagtttctacatcactgggggaactgggcttcgtttacactgactcttgactggggccctccgcaatttattctgtattactcagtcatcctgctcctcggaaaactgcttacaaggcgattccgaaaaacagtctaagtatttaatattttaaagtaaaatgcatatttatgctaaaaaataagctgctgctcactgtcccaaacgattcagcaattcagtcagttttatgttataattaaagacaaaattgaaagtagaaaacggatttataccgttaatagtttatcaacacttaaaaatattattatcctgaaatagcttaaagattgataattgacatggaaaagatccagcacaaattagtagtatttcagtcaaaagacatccggagaaaatggcatgaagaagaatggttttattctgtggtggatgtttgtggtgccttaacgaacagcaataatccgcgggactactggtataggataaaaaagagggtaagtgatgaggaaaaagctgagttgtcgacaatttgtcgacaacttaaattatccgcatctgatggcaaaaaatacaatacagactgcgctaattcagaaggtatttttagaattattcaatcaattccatcacccaaagcggaaccatttaaaaggtggttggcaaaagtcggtaaagagcgtttagatgaaatagaaaatccagaactggcacaagccagaatgaaagaaatatacgagcaaaagggttatccaaaagactggattgataaacgcttacgcgggatcgccatacgacagaatttgacagatgagtggaaagaacgtggcataaaggatgatctggattatgcaattttaactgcagaaatttcaaaagctactttcggaatgacacctggagaatacaaaaaatttaaaaacctgcctgtaaaatcaaaagcaaatcttagagataacatggatgatttggaactgatttttactatgcttggtgaaagaatgacaaccgaaatttccaaagaggaagaaccggacacttttgatgaaaacaaaaatgttgcgaaacgaggcggaaatgttgcaggaaatgccagaaaaaatgctgaaaaagaacttggcaggagtgtgatctcaaaaaagaactatcttggcaaagttgataaaaaagaacttgaacaataaattatgaatgaagcagtacactactcaaacaccagcttcgattataactcaacaaacctccgtcagtatattattcagaacttattggacagtatcatagagggttcaaaaatactgaaatgcgtgcaaaataaagctgaggcatctcttcatgaaataaagtccatgttaactttctgtattcgtggtgaacgattttgtgatggacatgttgcgtcggtgattgagtcaggaaaaatgaaatcaattctcatgcgtctcaaagtaatgatggaagaa

SEQ ID NO: 882 - DNA, 4000 bp, Escherichia coli
  misc_feature (320)..(320): n is a, c, g, or t
  misc_feature (1203)..(1203): n is a, c, g, or t
  misc_feature (1205)..(1205): n is a, c, g, or t
  misc_feature (1239)..(1239): n is a, c, g, or t
  misc_feature (1401)..(1401): n is a, c, g, or t
  misc_feature (1441)..(1441): n is a, c, g, or t
  misc_feature (1605)..(1605): n is a, c, g, or t
  misc_feature (1635)..(1635): n is a, c, g, or t
  misc_feature (1984)..(1985): n is a, c, g, or t
  misc_feature (2324)..(2324): n is a, c, g, or t
  misc_feature (2582)..(2582): n is a, c, g, or t
  misc_feature (2723)..(2723): n is a, c, g, or t
  misc_feature (2957)..(2957): n is a, c, g, or t
cacagcaaggtgcgaccattcggcgcagattatatcgtaatcctgacgataagatactgggtggtgtaatcagcgggttggcagcttatcttaattgggatgtcacggtgctccggcttatcatgtttgtggtacttatctgcggatatggcgtgttgattcctatctatattatttgttggttagttattcccgaagctcgtacggcagccgagaagctgaacatgcggggagaggatatcactatcgagaacattggcaggacggtgaccgatggctttgagaggatggccaacggtgtaaacaactacgtaaactcnggtaaaccccgtagctttctgcagaaagtaggagacgcattggtgtccattgccggattcttcctgaaagcttgcctggtggttcttgccattatttgcagccctgttctttttgttcttgccatcgttttcgttgctctggtgattgctgccattgcagtagccatcggaggtggagccgctctttatcagatgttgccttcggtcgactggtcaccattgatctctacttctccgatgatgactatcgccgggagcattgcaggagttgtcttggcaggtattcctttagccgccatcattttcgtgattctccggcaaatcttcaattggtctcctatgtcatccggactgaaatggtcactgttgattatatggatactggctgtcgttatttttgtcatcaacctctcttacctgggatggccttatcctttcctttgggtcggatgacgtgaaatgccaattagttgatgatcatagaaatgcttcccgtagtgtgtccgggaggcattttttttgtaagaaaaatacggttttgtgcaacgaaccgcaaatcttttgttatttttgtttgttactcatcgaaaagaatacgtatcatatgggcgagcatatatgtttcagaagaaatgaaagactggcaacggtcaatcctcactggcggggcaatcctgtagtaagaggaaagtttgtcaatcgccagcatcgttttcgtcccggaatggggagtgtgttgaagtggcgtctttcgcccaatccgcagcggaaagagaaaaagagtgtgaagtggagtcccaagttgaattatctgcgttcgctggatggcgtggtaggcaattcactgatttggctcgggcataattctttcttcctgcagttngntaggaagcggatcatgttcgaccccgttttcggngatattcctttcgttaagcggcaaagtgattttccggccaatcccgatatatttaccgatatcgattatctgctgatcagtcacgatcattttgatcacctcgataagcaaagtgtggcacggttggtaaaaaacaatccggggatgaaactcttttgtggnctgggcaccggggagctgatcaaaggatggtttcctgagnttgaggtgacagaggctggctggtatcagcagatagaagatgacgggctgaaaataacgtttcttcccgcacaacattggagcaaacgttccgttcgcgatggagggcgcaggctgtggggggcatttatggtacaggccgatggtatttccctctactacagnggtgataccggttactccaggcatttccgngaaatacccgatcttttcggagctcccgattatgctttggtgggtatcggggcctataaaccgcgctggtttatgcaacccaatcatatatcgccttatgatgctctgactgcatcgaccgatatgaaggctgctctcacaattccgatgcattacggaactttcgatttgtccgatgaacctctgcatgaccctcctctggtttttgctgccgaagccaagaagcgaaagatagatgtatatatccccgtactgggagaggtggtgaagttgaagcggatgtagactttgggtacttcttaccttccaaatagagcttctgttgtcaacaaataaaggctctgtccgnnagggacagagcctttatttgttgacaacacagcctttatttctgtgccgtttcgtttggtttcagccattgatccagccattcgaagaaagtccgttgccacagtacaccgttctgtggtttcagtacccagtggttttcatccggataaatcagtaattcggcaggtacaccacgcatcacggcagcatcgaatgcagccattgcctggttggcaaggatgcggtagtctttctcaccgtggatacagagaattggagtatcccatttttcgacaaacaaatggggagaattggcaaatgtacgttgggctgtcggattctgtttttcccagtaagcnccgcccatatcccagttggcaaaccatttttcttctgtctccagatattgcatttccatattgaagataccgtcgtgggcaatgaatgccttgaagcgcttgtcgtgatgtccggccaaccaatacacagaaaatcctccgaagctggcacctacacaacccagacgatcactatccacaaacggctctttggccatttcgtcgatagccgtgaaataatccttcatacattgaccaccgtaatcaccgctgatagcntcgttccattccaatccgaagcccggaagtccgcgacgattcggagctacgacgatataaccgttggcggccataatctgcatgttccaacgataactccagaactggcttaccggactctgaggaccaccttcgcagaanagcagtgtcgggtacttcttattcggatcgaattgaggcggatagatgacccatgtcagcatctctttgctgtcagttgttttcatccagcggccttctactttacccatttcgatctggtcatagatttgcttgttctcttgggtcagttgcgtggtttgtccgtccaaagctattgcgtaaatttcgtcacccatactcattgaatggcgtttggcaatcagtttgtctccnaagagggcaacgccttcgtagtcgtacatacccgaagtgacggggcgtacggaatcgttagccagatcgagtgaataaatttgtgtctcgccatgccatacaccggtgaagtagatcgtcttggcatcccggctccatacgaatgcatctacattcgaatcgaaagctttacttacaaaacgtttctcgcccgtttccaggttcatgacgaagaggcggttctggtcagcttcgtaaccgtcgcgctccatgctttgccaggcaatgctttttccatccggagaatattgcgggtttgtatcataacccatcataccttcggtgatgtttactgttttcttggtattcaggtcatatacatagatatccgagttggtagatatggcataagccagtcccgtttttttgcggcaggtataagccaccttgtccgaagtcgtattccaagccagttgttcgatacctccccaaggtttcatcgggctttcgtaaggttctccttccagcacatctatgatgttggagattgatttgccatcaaagtcggcgatgaaaggatgtggagcggtggtcacccattcgtcccaatgtttatacatcaggtcggtgatgatgattccggtcgctttatccaggtcggggtatttatcagccgtgctctttactgttttcacttgagcgatgaagagtatctttttaccgtccggtgagatggaatatccctcgatgtctccgtcatacttggagatctgcttgcgtccgctaccgtccggattcatttcatacagttggctgctgccgttgtcattgctcaggaagagcagcttgcttccgtctgccgcccaagtcacttcattttcctgataaggagtgtgggtaatctgtcgattatccgttccatccgcgttcatcacaaaaacttcccggttgctcttgttctcggggacactgtaataagccacagtataggctatttgctttccgtcaggcgatacggccagtccgccgatacgtcccatcgcccaaagcgcttcgggagtcat

SEQ ID NO: 883 - DNA, 4000 bp, Escherichia coli
  misc_feature (577)..(577): n is a, c, g, or t
  misc_feature (592)..(592): n is a, c, g, or t
  misc_feature (739)..(739): n is a, c, g, or t
  misc_feature (895)..(895): n is a, c, g, or t
  misc_feature (980)..(980): n is a, c, g, or t
  misc_feature (1123)..(1123): n is a, c, g, or t
  misc_feature (1522)..(1522): n is a, c, g, or t
  misc_feature (2612)..(2612): n is a, c, g, or t
  misc_feature (2667)..(2667): n is a, c, g, or t
  misc_feature (2696)..(2696): n is a, c, g, or t
  misc_feature (2739)..(2739): n is a, c, g, or t
  misc_feature (2772)..(2772): n is a, c, g, or t
  misc_feature (3200)..(3200): n is a, c, g, or t
  misc_feature (3203)..(3203): n is a, c, g, or t
  misc_feature (3326)..(3326): n is a, c, g, or t
acggagtctttagaccaattcactcaggctctaagaactattggtgagcctatttttgggcagtcttctaagaatatttctgcgggcaaattactagctagactttttgaagtaacagaaaaatttaatatggtcactcaaccacaattattattgttacaaaaaacaatggtggtggtcgaaggagttgcaagatcattagatgaagacgcaaatatttgggaaatttcaaaaccagtattgcaaggttggttgaacaacgagattggtcctaaaaatagaatagataaaatattaaaaacgacaaccgaacttttagataaacttcctgaattacccgagatgattaatcgggctaacaaagctatggaacttttaagttcatatgaatttataaaaaatcaaaaccaaagtaacgaatatgaaattaaacaaaagtcttcaaaattaaaaaagacttatctaattataggtttattaattattgtaattatattgttaatagtattcaaatagcgcgatgctaaattcaattgagaataagaaaattttaatcgttattggtggcggaatagcngcttataaggttctngatgttattagagagcttagaaaaaataactgtgaagttaaaactattctaactaattctggaaaagaatttgtaacgccattatcaatttctgctctttctaaaaataaagtttttgaaaacctattcgatcccaataatgaaggngaaatggatcatatcgcgctatctagatggtgtgatttaatactcgttgctccaacgacagctaatctaatggcaaattttgcacacggtgaagctaaagattttgcaacaacggttatcatggcctctaacaagcctattttccttgctccagcnatgaatgttgaaatgtggaataaccaagctacccaagaaaattttcaaaagcttattcaatttaaatataaatttattggacctnctgttggtgaaatggcgtgtggagaagtaggggtaggtaaaatgtcatctcctgaggaaattattctaactatcaaaaattattttctttcaaagaatttattcaataataaaaatttaaaagcattagtcacagcaggatcnactagagagtatattgatccggtaagatttttatcgaatgagtcttctggaaaacaaggatttgagattgcaaagtcattaaatgatatcggctttaaaacaaaattagttattggtccaaattctttagatattaaaaatcaggacaatcttgaagtaatcagtgtgacaactgcaaaacaaatgtttgaagcttgcaaagataatttaccagtagatgttgcggtttgcacggctgcggtttctgattttaaagtcaaaaattacaatgaagaaaaaataaaaaaagaaggattagaagattttaatttagagcttgaaaaaaatattgatattttatctttcatcgctagccaaaatattaatcggccaagattagtagttggttttgctgcaganactaaaaacatcatcgaaaatgcacaaaagaaaatccaaaataaacactgcgattggattgtagctaataatgtagccgataaatctattggttttaattcagattataatgaggtttttttaatttctaaaaacaaagaagttgaaaaatttaataaaacgacaaaatcagaaatcgcaaaaaaactatctaataaaattcttcacgctcttattcaataatggttaaaattttagttaaaaaaattaattataaacataaagatctgcctaaatatgaaactgtgggctcttctggtttagatttaatcgctaatattgataaggaaataattttaaagcctaatgaaagaactttggtgccgacgggcctatccgttgcaatccctgaaaattacgaaatacaagtaagaccaagatcaggacttgcagcaaaaaatggtattagcgttttaaatacgcctggaactgtggacgctgattatagaggagaaattaaagtcatcttgataaacttaagtttagaaaattttaaaattgaaccgggacaaagaattgcacagatggtgctttgccctgttgtaaaagctgaattagttgaagttgatacacttcctgaatcagttcgtggaagcggtggatttggttcaacgggccgataaatattcatgaaacttagctatgacgatgtcaaaagatacattgctcatatcaatttaaaaaaaattggcagctttggtcaaaagaaaatcattgatacaaaagttctcattattggtgttggtggattaggctcgcctgttgcactctatcttgcatcatctggaattaataacatcggaatcgttgatcatgacaaaattgatatttcaaatttacacagacaaattttatttaatgaagaagatgttaataaatttaaagttgatattgctgaaaaaagattaaaaaaaattaattctaaaataaaaattaataaatttaaaactaaaatcgatagtaaaaatataaataaaattgcaaaaggttatgatctcatcattgatgggactgacagttttaaatcaaaattattaattaacgattattnttataaaaataaaaaaatcttaatttgtggagccataagtaagtttgatggtcangtttttgtttttaattttaaaaagaaaanctctccttgtcttagatgttttatgccagaaattccaagtacngacatgatggattgtcaaagtgagggggttttntctacccttgcaggaatgattggaacaatcatggctaatgaggctattcgtgaaatattaaattttgaaaactctttatgtgggaatattttaataattaatgctgagaatcttttaattaaaaaaattaaattaaataaaaacaaaaactgcattaagaagattaaatgaagtttaaaaaaattattgttattttatcttttattatttttacaggtgcagatttactagcacaaaaagttatcactaaaaaatatctgagcattagaaccagtgttgcaaatcttagaatcggaccctcgcctgctcatcctattgcattcgtttatgaaaaaaagaatatgccagttgaagtaattgatgagtttgaagtatggagaaaagttaaagattatcaaggcgatatcggttggattcatttaagtcanctntctagaaaaagaactctattaactacaaaggatggaattgttctttttaaaaatgcgacgatctattcaaaaccaattattaagattggaaatctagaagccgctgttattaaaaaatgcatnccaaattggtgtttggttgaaattcaaaaatataaaggttggatacaaaccgatcacgtttggggcttagaaaataaagagattatcaattaaatttgtcaaatcctgtattaaactgtaaattaacaactaattatcaataattttaattctctaacgatttcatgaaacaacaaaatcaatacagttaccaagatctacttgattgcgctgaaggaaaaatgtttggacctggtaatgcaaaattacctgcgccgccgatgttgatgtttgatcgaattacttcgatcacggctgaaggtggattatttaataaaggtgaaattttagcagaattagacatcaaagataatttgtggtttttcgaatgtcattttaaaggggatcctgtgatgcctggatgtttaggattagatgcgatgtggcaactgttaggattttatcttggttggttaggaaatcctggtcatggtcgagcactgggtgtgaatgaagtaaaatttacaggcgaagttgtaaaacaagtaaaacttgtaaaatatgtcattaatatcaaaagattattaagaaaaggcgaaacttgtgttggcttggctgatggtttagtctttgcggacaataaagaaatatataacgctaaaaatcttaaagttggtttatttaaaagctaagga

SEQ ID NO: 884 - DNA, 4000 bp, Escherichia coli
  misc_feature (13)..(13): n is a, c, g, or t
  misc_feature (1991)..(1991): n is a, c, g, or t
  misc_feature (2013)..(2013): n is a, c, g, or t
  misc_feature (2021)..(2021): n is a, c, g, or t
  misc_feature (2486)..(2486): n is a, c, g, or t
  misc_feature (3650)..(3650): n is a, c, g, or t
  misc_feature (3764)..(3764): n is a, c, g, or t
  misc_feature (3767)..(3767): n is a, c, g, or t
  misc_feature (3773)..(3773): n is a, c, g, or t
  misc_feature (3794)..(3794): n is a, c, g, or t
  misc_feature (3959)..(3959): n is a, c, g, or t
ttccggtacctcngctggcctgctggagcgggcccggctcggttccgatagaacagagaccgccgcggctggaaggcacgaggagatgtgggatgaggtggctcatggagttctacaacgagaggcgggggatcttggcgcgttacggcattgaggcgccgttaccagcggcggcggtcctgttgggccggaatgcggttctcgcggagtatccatcgactccgcgaagaagccggctcagcttgttcgagcgggccgagcgcgtcgggggtcaagacgcaagcgggtgggttctctaccggatcgtgaaggataacgggcacggatcaactggcgtcgcgccagcgcacgcgacataggtgccccgtgttcatgttcctctctaaaaagagaaagcgagaacaaagctcgcctctgaatgaagcccggcgagcgctagtcgagaagaagtttgagatcctccggcaggcgagcttcggattcactcacgaccgactcttacacattcaggaggaggacttgaaggggtggaccgatgcgtgtacggctgagcttcgtcggaaaatagcatcggccgcaccgtcgcatatcaagattgcgctgatcgatttccgcaagctaaggtgtgtttctctccagtgtcttcctctgtggatgcacgctgacggagccaggctcgtggacggcccggagccggcaccggcgccgtcgatttccaaggaaggggtggtcaaggcggagggtttcatctcttccccgccgagttccccgatccccgttcaggtacgcggcggagaggctgtcacgacctacaacgtggtggcgaccagatgatccaggaccatatgagcgacctccatcgcctcggctacgggcagcaggagcacgagcgatgagccgccgcgatctcacctcttaatgcaaagggaggccgtccccatgtcgagtcaggtgcttgcccgcatagctaccacaggcatctatccacaggcagatgagaaatccaggccttcatgaattggatggacgaccgcaacgcccctgccatccctctacggtctgctccggctcaccacaatgatcctcggtcagctgcacgagcgctcccatgtcggtctacgtagtgcgaaaatggagacggtctctgaggttctgcagctcccggtaataatagaggggagccggccgctttcggccgaatctcagtttcttcagaaacgcgatttcctcctcggtcgcatccccgctgagggacggatcttgaaggaagtctttgagccccggctcttcatcgaacggttgttcgggttcccgttccacaaacccaaacttcttcgggggtcccggagccagtcggcggtttaagacaacttccatgtcaaaagtcgcgaggtcgatgccccaggattcaatgagcggatccaagaaggcgacgcagtgttcaatcgacaggttgaagatatccgtatccagaaactcgagcaccgtgacccgcatctgttcgtagcttcgatcgctgagtcgagccaccgtgcggagccagtgctcactctccaattcctctttggcaactcttttgaccacgtcgagaagcttttgtgtgacgaggcgttcgagttcgccgaaggactgcttttcaaaaataacgcgtatttccgttcggttgtcggggttggatttgtgaagaatcaattctcgaacttccttaaacaagggtgtgagtgggtcccccaatcttcgcttcagttcctcctcgcgctgaagcgtggccagcttcgagagctcaccgcgctggagcttcaaaaaggtttccatcttgtcgtaaatgtccgtccggttcggtgcagggggcgcttttttgcgcgtcagcaactgtgaaatgtaggactccgtcacttgggcggcggttgccagagctctctgctccgcccccaattcttctagccgctgcctgatcactaacgggacgtccatcctgagcctcctcagtnattaactttatttgcttaagtntttaccgntttagtatccatatcgtatcttgcttgacaactaaagttaatagacttacggtagtgaacggctcgggcgattctgctcctgcctccaggtagcctgaactaagtccggttatctgaatagcgctcctcttagtccaccgagggggtcgacatgtttgctcgtaccgttcgcatgcagctgaagcccaatagcgtcccggagttcacccagttgattgagcgggaagtcattcccgtccttcggaaacagcaaggcttcaaggacgagatcaccttcgtcccctcggaaggaagggaagcggtcggaatcagtctgtgggagcagaaggagaacgcggaagcctatcaccgcggagcctatccagaagtgctgaaggccatggcgaaggtggttgaaggaactcctcaggtccaagcctctgaggtttccaactcgacctggcacaagatcgccgctcggtaacnagtccgaagccgacaggtctttggtggggacggacaagcccgtccccaccatcgcctgagaatgcgaacccgtggcggccaccgcttgagccaggcgcacccacggagggcggcgatcgcgatcggaggaggcaagtaagcctcgggagcgggagaacacgatgcgacagatgacgggcctcaatgagcttcgcgagcgaggcctgatgacgtggatcgaacaggagcacggatgggtcgcggcgccggaggagatcgtgaaggcattctcaagggatggcttcgaagaatgcaaccgcgagacaacgacgagccggcgtgattggcagccgcccggcggcgtgtggcagggggtcgatacgcgcacgggatcggtggcttcggcgacctgggtgaatcggccgccttggcatcaagccataatggcgggcggcgtgtggcaagaagcgcacacgaaatccgtagcatcgcccgtctgggtggaccgacccgcatgggatcaagccatcgtgttcatcgctgtcgatggggagtcttttaggggcgtctagggccatgatgaagggggctcgtcgaattccgaaatccgaaggagggacccggccgatgaagattcgtccgttgcacgatcgccttctggtggagcggctcgaggagaaggaagtcaaaaagggcgggatcatcatcccggacacggccaaggagaagccccaggagggcaaggtcgtcgccgtgggcaacggcaaggtcaccgacgagggcaagaaggttcccctcgacgtcaaggccggggacaagatcctcttcgggaagtattccggctccgaggtgaagctcgacgacaaggagtacctgatcatgcgcgaggaagacgtcctcgccattctcgagtaaggagggacacgagcgatgccgaagcagctgaagttcgacgaggaggcccggtcgagcctgctcaagggcatcaacattatggccgcggccgtcacggcgacgctgggccccaagggccgcaacgtcgtcatcgacaagaagttcgggagccccacgatcaccaaggacggcgtgacggtcgccaaggagatcgagctgaaggatccgtacgaggacatgggcgcccagatgctgaaggaggtcgcctcgaagacctcggacatcgcgggngacggcacgaccaccgcgatcgtgctcgcgcaggcgatctatcgggaagggctcaggaacgtcacggccggcgccaacccgatggggctcaaacgggggatcgaggcggcggtngangcggtnacccaggagctcaagaaggtntcgaagtcgaccaaggacaagaaggagatcgcccaggtcgcgacggtcgcctcgaacaacgacaagacgatcggcaacctgatcgccgaggcgatggagaaggtcggcaaggacggggtcatcacggtcgaggagtcgaagtcggccgacacggtcctggacgtngtcgaagggatgcagttcgaccgcggctacctctcgccgta

SEQ ID NO: 885 - DNA, 4000 bp, Escherichia coli
  misc_feature (1963)..(1964): n is a, c, g, or t
  misc_feature (1966)..(1966): n is a, c, g, or t
  misc_feature (1968)..(1984): n is a, c, g, or t
  misc_feature (1988)..(1989): n is a, c, g, or t
  misc_feature (1992)..(1992): n is a, c, g, or t
  misc_feature (2039)..(2039): n is a, c, g, or t
  misc_feature (2046)..(2046): n is a, c, g, or t
  misc_feature (2048)..(2051): n is a, c, g, or t
  misc_feature (2053)..(2053): n is a, c, g, or t
  misc_feature (2055)..(2056): n is a, c, g, or t
  misc_feature (2058)..(2058): n is a, c, g, or t
  misc_feature (2060)..(2061): n is a, c, g, or t
  misc_feature (2063)..(2063): n is a, c, g, or t
  misc_feature (2065)..(2065): n is a, c, g, or t
  misc_feature (2067)..(2068): n is a, c, g, or t
  misc_feature (2115)..(2116): n is a, c, g, or t
  misc_feature (2118)..(2118): n is a, c, g, or t
  misc_feature (2120)..(2121): n is a, c, g, or t
  misc_feature (2123)..(2125): n is a, c, g, or t
  misc_feature (2130)..(2130): n is a, c, g, or t
  misc_feature (2132)..(2132): n is a, c, g, or t
  misc_feature (2134)..(2137): n is a, c, g, or t
  misc_feature (2139)..(2140): n is a, c, g, or t
  misc_feature (2142)..(2143): n is a, c, g, or t
  misc_feature (2145)..(2145): n is a, c, g, or t
  misc_feature (2147)..(2148): n is a, c, g, or t
  misc_feature (2151)..(2151): n is a, c, g, or t
  misc_feature (2154)..(2154): n is a, c, g, or t
  misc_feature (2156)..(2158): n is a, c, g, or t
  misc_feature (2160)..(2160): n is a, c, g, or t
  misc_feature (2164)..(2166): n is a, c, g, or t
  misc_feature (2171)..(2171): n is a, c, g, or t
  misc_feature (2174)..(2174): n is a, c, g, or t
  misc_feature (2178)..(2179): n is a, c, g, or t
  misc_feature (2183)..(2186): n is a, c, g, or t
  misc_feature (2189)..(2192): n is a, c, g, or t
  misc_feature (2194)..(2196): n is a, c, g, or t
  misc_feature (2199)..(2199): n is a, c, g, or t
  misc_feature (2201)..(2202): n is a, c, g, or t
  misc_feature (2204)..(2205): n is a, c, g, or t
  misc_feature (2209)..(2210): n is a, c, g, or t
  misc_feature (2212)..(2212): n is a, c, g, or t
  misc_feature (2214)..(2215): n is a, c, g, or t
  misc_feature (2217)..(2219): n is a, c, g, or t
  misc_feature (2266)..(2266): n is a, c, g, or t
  misc_feature (2269)..(2269): n is a, c, g, or t
  misc_feature (2271)..(2275): n is a, c, g, or t
  misc_feature (2278)..(2278): n is a, c, g, or t
  misc_feature (2281)..(2285): n is a, c, g, or t
  misc_feature (2288)..(2288): n is a, c, g, or t
  misc_feature (2291)..(2292): n is a, c, g, or t
  misc_feature (2343)..(2343): n is a, c, g, or t
  misc_feature (2345)..(2346): n is a, c, g, or t
  misc_feature (2348)..(2348): n is a, c, g, or t
  misc_feature (2351)..(2351): n is a, c, g, or t
  misc_feature (2353)..(2353): n is a, c, g, or t
  misc_feature (2355)..(2357): n is a, c, g, or t
  misc_feature (2361)..(2361): n is a, c, g, or t
  misc_feature (2364)..(2370): n is a, c, g, or t
  misc_feature (2418)..(2418): n is a, c, g, or t
  misc_feature (2420)..(2421): n is a, c, g, or t
  misc_feature (2423)..(2424): n is a, c, g, or t
  misc_feature (2430)..(2431): n is a, c, g, or t
  misc_feature (2433)..(2433): n is a, c, g, or t
  misc_feature (2435)..(2435): n is a, c, g, or t
  misc_feature (2438)..(2438): n is a, c, g, or t
  misc_feature (2441)..(2441): n is a, c, g, or t
  misc_feature (2443)..(2443): n is a, c, g, or t
  misc_feature (2445)..(2445): n is a, c, g, or t
  misc_feature (2448)..(2448): n is a, c, g, or t
  misc_feature (2450)..(2451): n is a, c, g, or t
  misc_feature (2454)..(2455): n is a, c, g, or t
  misc_feature (2457)..(2463): n is a, c, g, or t
  misc_feature (2467)..(2470): n is a, c, g, or t
  misc_feature (2474)..(2475): n is a, c, g, or t
  misc_feature (2477)..(2477): n is a, c, g, or t
  misc_feature (2481)..(2482): n is a, c, g, or t
  misc_feature (2487)..(2488): n is a, c, g, or t
  misc_feature (2490)..(2490): n is a, c, g, or t
  misc_feature (2494)..(2497): n is a, c, g, or t
  misc_feature (2500)..(2501): n is a, c, g, or t
  misc_feature (2503)..(2509): n is a, c, g, or t
  misc_feature (2511)..(2513): n is a, c, g, or t
  misc_feature (2515)..(2516): n is a, c, g, or t
  misc_feature (2518)..(2522): n is a, c, g, or t
  misc_feature (2524)..(2524): n is a, c, g, or t
  misc_feature (2527)..(2527): n is a, c, g, or t
  misc_feature (2530)..(2531): n is a, c, g, or t
  misc_feature (2533)..(2534): n is a, c, g, or t
  misc_feature (2536)..(2537): n is a, c, g, or t
  misc_feature (2539)..(2540): n is a, c, g, or t
  misc_feature (2543)..(2544): n is a, c, g, or t
  misc_feature (2546)..(2546): n is a, c, g, or t
  misc_feature (2550)..(2551): n is a, c, g, or t
  misc_feature (2553)..(2554): n is a, c, g, or t
  misc_feature (2557)..(2558): n is a, c, g, or t
  misc_feature (2562)..(2565): n is a, c, g, or t
  misc_feature (2568)..(2569): n is a, c, g, or t
  misc_feature (2573)..(2575): n is a, c, g, or t
  misc_feature (2577)..(2582): n is a, c, g, or t
  misc_feature (2585)..(2586): n is a, c, g, or t
  misc_feature (2588)..(2589): n is a, c, g, or t
  misc_feature (2592)..(2593): n is a, c, g, or t
  misc_feature (2597)..(2597): n is a, c, g, or t
  misc_feature (2599)..(2599): n is a, c, g, or t
  misc_feature (2602)..(2603): n is a, c, g, or t
  misc_feature (2607)..(2607): n is a, c, g, or t
  misc_feature (2609)..(2613): n is a, c, g, or t
  misc_feature (2615)..(2616): n is a, c, g, or t
  misc_feature (2619)..(2622): n is a, c, g, or t
  misc_feature (2626)..(2627): n is a, c, g, or t
  misc_feature (2630)..(2630): n is a, c, g, or t
  misc_feature (2633)..(2635): n is a, c, g, or t
  misc_feature (2638)..(2642): n is a, c, g, or t
  misc_feature (2645)..(2645): n is a, c, g, or t
  misc_feature (2647)..(2649): n is a, c, g, or t
  misc_feature (2651)..(2652): n is a, c, g, or t
  misc_feature (2655)..(2655): n is a, c, g, or t
  misc_feature (2657)..(2660): n is a, c, g, or t
  misc_feature (2662)..(2662): n is a, c, g, or t
  misc_feature (2664)..(2665): n is a, c, g, or t
  misc_feature (2667)..(2671): n is a, c, g, or t
  misc_feature (2723)..(2724): n is a, c, g, or t
  misc_feature (2726)..(2729): n is a, c, g, or t
  misc_feature (2731)..(2733): n is a, c, g, or t
  misc_feature (2735)..(2737): n is a, c, g, or t
  misc_feature (2740)..(2742): n is a, c, g, or t
  misc_feature (2745)..(2747): n is a, c, g, or t
  misc_feature (2797)..(2797): n is a, c, g, or t
  misc_feature (2803)..(2804): n is a, c, g, or t
  misc_feature (2807)..(2807): n is a, c, g, or t
  misc_feature (2809)..(2809): n is a, c, g, or t
  misc_feature (2811)..(2811): n is a, c, g, or t
  misc_feature (2816)..(2819): n is a, c, g, or t
  misc_feature (2821)..(2822): n is a, c, g, or t
  misc_feature (2824)..(2824): n is a, c, g, or t
  misc_feature (2876)..(2876): n is a, c, g, or t
  misc_feature (2884)..(2884): n is a, c, g, or t
  misc_feature (2887)..(2888): n is a, c, g, or t
  misc_feature (2890)..(2895): n is a, c, g, or t
  misc_feature (2897)..(2898): n is a, c, g, or t
  misc_feature (2900)..(2902): n is a, c, g, or t
  misc_feature (2906)..(2906): n is a, c, g, or t
  misc_feature (2912)..(2913): n is a, c, g, or t
  misc_feature (2915)..(2916): n is a, c, g, or t
  misc_feature (2919)..(2919): n is a, c, g, or t
  misc_feature (2922)..(2922): n is a, c, g, or t
  misc_feature (2929)..(2929): n is a, c, g, or t
  misc_feature (2933)..(2933): n is a, c, g, or t
  misc_feature (2936)..(2938): n is a, c, g, or t
  misc_feature (2941)..(2941): n is a, c, g, or t
  misc_feature (2943)..(2943): n is a, c, g, or t
  misc_feature (2945)..(2945): n is a, c, g, or t
  misc_feature (2947)..(2947): n is a, c, g, or t
  misc_feature (2949)..(2952): n is a, c, g, or t
  misc_feature (2955)..(2956): n is a, c, g, or t
  misc_feature (2958)..(2958): n is a, c, g, or t
  misc_feature (2961)..(2964): n is a, c, g, or t
  misc_feature (2970)..(2971): n is a, c, g, or t
  misc_feature (2974)..(2976): n is a, c, g, or t
  misc_feature (2979)..(2984): n is a, c, g, or t
  misc_feature (2988)..(2988): n is a, c, g, or t
  misc_feature (2990)..(2992): n is a, c, g, or t
  misc_feature (2996)..(2997): n is a, c, g, or t
  misc_feature (2999)..(3000): n is a, c, g, or t
  misc_feature (3004)..(3004): n is a, c, g, or t
  misc_feature (3007)..(3008): n is a, c, g, or t
  misc_feature (3011)..(3013): n is a, c, g, or t
  misc_feature (3015)..(3017): n is a, c, g, or t
  misc_feature (3019)..(3020): n is a, c, g, or t
  misc_feature (3022)..(3023): n is a, c, g, or t
  misc_feature (3026)..(3026): n is a, c, g, or t
  misc_feature (3031)..(3032): n is a, c, g, or t
  misc_feature (3035)..(3036): n is a, c, g, or t
  misc_feature (3038)..(3039): n is a, c, g, or t
  misc_feature (3041)..(3042): n is a, c, g, or t
  misc_feature (3044)..(3045): n is a, c, g, or t
  misc_feature (3048)..(3048): n is a, c, g, or t
  misc_feature (3052)..(3052): n is a, c, g, or t
  misc_feature (3054)..(3055): n is a, c, g, or t
  misc_feature (3058)..(3059): n is a, c, g, or t
  misc_feature (3061)..(3062): n is a, c, g, or t
  misc_feature (3064)..(3068): n is a, c, g, or t
  misc_feature (3071)..(3074): n is a, c, g, or t
  misc_feature (3076)..(3077): n is a, c, g, or t
  misc_feature (3080)..(3083): n is a, c, g, or t
  misc_feature (3085)..(3089): n is a, c, g, or t
  misc_feature (3092)..(3094): n is a, c, g, or t
  misc_feature (3096)..(3096): n is a, c, g, or t
  misc_feature (3099)..(3104): n is a, c, g, or t
  misc_feature (3106)..(3106): n is a, c, g, or t
  misc_feature (3108)..(3108): n is a, c, g, or t
  misc_feature (3111)..(3112): n is a, c, g, or t
  misc_feature (3114)..(3117): n is a, c, g, or t
  misc_feature (3119)..(3121): n is a, c, g, or t
  misc_feature (3124)..(3129): n is a, c, g, or t
  misc_feature (3131)..(3136): n is a, c, g, or t
  misc_feature (3140)..(3142): n is a, c, g, or t
  misc_feature (3149)..(3150): n is a, c, g, or t
  misc_feature (3152)..(3153): n is a, c, g, or t
  misc_feature (3156)..(3156): n is a, c, g, or t
  misc_feature (3158)..(3159): n is a, c, g, or t
  misc_feature (3162)..(3162): n is a, c, g, or t
  misc_feature (3164)..(3166): n is a, c, g, or t
  misc_feature (3168)..(3176): n is a, c, g, or t
  misc_feature (3178)..(3179): n is a, c, g, or t
  misc_feature (3183)..(3188): n is a, c, g, or t
  misc_feature (3191)..(3197): n is a, c, g, or t
  misc_feature (3199)..(3199): n is a, c, g, or t
  misc_feature (3201)..(3203): n is a, c, g, or t
  misc_feature (3206)..(3210): n is a, c, g, or t
  misc_feature (3212)..(3212): n is a, c, g, or t
  misc_feature (3215)..(3216): n is a, c, g, or t
  misc_feature (3218)..(3222): n is a, c, g, or t
  misc_feature (3224)..(3224): n is a, c, g, or t
  misc_feature (3226)..(3226): n is a, c, g, or t
  misc_feature (3228)..(3228): n is a, c, g, or t
  misc_feature (3231)..(3236): n is a, c, g, or t
  misc_feature (3238)..(3241): n is a, c, g, or t
  misc_feature (3243)..(3264): n is a, c, g, or t
  misc_feature (3268)..(3270): n is a, c, g, or t
  misc_feature (3272)..(3273): n is a, c, g, or t
  misc_feature (3276)..(3284): n is a, c, g, or t
  misc_feature (3286)..(3288): n is a, c, g, or t
  misc_feature (3290)..(3291): n is a, c, g, or t
  misc_feature (3293)..(3295): n is a, c, g, or t
  misc_feature (3297)..(3304): n is a, c, g, or t
  misc_feature (3306)..(3310): n is a, c, g, or t
  misc_feature (3312)..(3324): n is a, c, g, or t
  misc_feature (3326)..(3326): n is a, c, g, or t
  misc_feature (3328)..(3331): n is a, c, g, or t
  misc_feature (3334)..(3340): n is a, c, g, or t
  misc_feature (3342)..(3355): n is a, c, g, or t
  misc_feature (3357)..(3373): n is a, c, g, or t
  misc_feature (3375)..(3375): n is a, c, g, or t
  misc_feature (3377)..(3383): n is a, c, g, or t
  misc_feature (3386)..(3402): n is a, c, g, or t
  misc_feature (3404)..(3408): n is a, c, g, or t
  misc_feature (3410)..(3414): n is a, c, g, or t
  misc_feature (3417)..(3417): n is a, c, g, or t
  misc_feature (3419)..(3423): n is a, c, g, or t
  misc_feature (3426)..(3430): n is a, c, g, or t
  misc_feature (3432)..(3434): n is a, c, g, or t
  misc_feature (3436)..(3436): n is a, c, g, or t
  misc_feature (3438)..(3441): n is a, c, g, or t
  misc_feature (3444)..(3444): n is a, c, g, or t
  misc_feature (3448)..(3450): n is a, c, g, or t
  misc_feature (3452)..(3458): n is a, c, g, or t
  misc_feature (3461)..(3461): n is a, c, g, or t
  misc_feature (3463)..(3469): n is a, c, g, or t
  misc_feature (3471)..(3472): n is a, c, g, or t
  misc_feature (3474)..(3475): n is a, c, g, or t
  misc_feature (3478)..(3478): n is a, c, g, or t
  misc_feature (3481)..(3481): n is a, c, g, or t
  misc_feature (3484)..(3484): n is a, c, g, or t
  misc_feature (3486)..(3486): n is a, c, g, or t
  misc_feature (3490)..(3492): n is a, c, g, or t
  misc_feature (3494)..(3494): n is a, c, g, or t
  misc_feature (3496)..(3500): n is a, c, g, or t
  misc_feature (3503)..(3504): n is a, c, g, or t
  misc_feature (3507)..(3507): n is a, c, g, or t
  misc_feature (3509)..(3509): n is a, c, g, or t
  misc_feature (3512)..(3523): n is a, c, g, or t
  misc_feature (3525)..(3530): n is a, c, g, or t
  misc_feature (3533)..(3534): n is a, c, g, or t
  misc_feature (3537)..(3542): n is a, c, g, or t
  misc_feature (3544)..(3547): n is a, c, g, or t
  misc_feature (3549)..(3550): n is a, c, g, or t
  misc_feature (3552)..(3553): n is a, c, g, or t
  misc_feature (3555)..(3555): n is a, c, g, or t
  misc_feature (3557)..(3559): n is a, c, g, or t
  misc_feature (3561)..(3561): n is a, c, g, or t
  misc_feature (3563)..(3563): n is a, c, g, or t
  misc_feature (3566)..(3566): n is a, c, g, or t
  misc_feature (3568)..(3568): n is a, c, g, or t
  misc_feature (3570)..(3570): n is a, c, g, or t
  misc_feature (3572)..(3573): n is a, c, g, or t
  misc_feature (3575)..(3576): n is a, c, g, or t
  misc_feature (3578)..(3578): n is a, c, g, or t
  misc_feature (3580)..(3580): n is a, c, g, or t
  misc_feature (3582)..(3582): n is a, c, g, or t
  misc_feature (3587)..(3590): n is a, c, g, or t
  misc_feature (3592)..(3595): n is a, c, g, or t
  misc_feature (3597)..(3598): n is a, c, g, or t
  misc_feature (3600)..(3601): n is a, c, g, or t
  misc_feature (3603)..(3607): n is a, c, g, or t
  misc_feature (3610)..(3611): n is a, c, g, or t
  misc_feature (3615)..(3615): n is a, c, g, or t
  misc_feature (3617)..(3617): n is a, c, g, or t
  misc_feature (3620)..(3620): n is a, c, g, or t
  misc_feature (3622)..(3623): n is a, c, g, or t
  misc_feature (3625)..(3629): n is a, c, g, or t
  misc_feature (3633)..(3634): n is a, c, g, or t
  misc_feature (3638)..(3654): n is a, c, g, or t
  misc_feature (3657)..(3668): n is a, c, g, or t
  misc_feature (3671)..(3676): n is a, c, g, or t
  misc_feature (3678)..(3679): n is a, c, g, or t
  misc_feature (3681)..(3684): n is a, c, g, or t
  misc_feature (3686)..(3687): n is a, c, g, or t
  misc_feature (3689)..(3694): n is a, c, g, or t
  misc_feature (3696)..(3701): n is a, c, g, or t
  misc_feature (3703)..(3705): n is a, c, g, or t
  misc_feature (3707)..(3710): n is a, c, g, or t
  misc_feature (3713)..(3718): n is a, c, g, or t
  misc_feature (3720)..(3723): n is a, c, g, or t
  misc_feature (3725)..(3727): n is a, c, g, or t
  misc_feature (3729)..(3739): n is a, c, g, or t
  misc_feature (3741)..(3749): n is a, c, g, or t
  misc_feature (3751)..(3753): n is a, c, g, or t
  misc_feature (3755)..(3757): n is a, c, g, or t
  misc_feature (3760)..(3762): n is a, c, g, or t
  misc_feature (3767)..(3786): n is a, c, g, or t
  misc_feature (3788)..(3789): n is a, c, g, or t
  misc_feature (3791)..(3794): n is a, c, g, or t
  misc_feature (3796)..(3805): n is a, c, g, or t
  misc_feature (3808)..(3811): n is a, c, g, or t
  misc_feature (3813)..(3832): n is a, c, g, or t
  misc_feature (3834)..(3834): n is a, c, g, or t
  misc_feature (3836)..(3839): n is a, c, g, or t
  misc_feature (3842)..(3843): n is a, c, g, or t
  misc_feature (3845)..(3850): n is a, c, g, or t
  misc_feature (3852)..(3858): n is a, c, g, or t
  misc_feature (3860)..(3862): n is a, c, g, or t
  misc_feature (3864)..(3872): n is a, c, g, or t
  misc_feature (3874)..(3874): n is a, c, g, or t
  misc_feature (3877)..(3887): n is a, c, g, or t
  misc_feature (3889)..(3890): n is a, c, g, or t
  misc_feature (3893)..(3896): n is a, c, g, or t
  misc_feature (3898)..(3916): n is a, c, g, or t
  misc_feature (3918)..(3964): n is a, c, g, or t
  misc_feature (3967)..(3982): n is a, c, g, or t
  misc_feature (3984)..(3987): n is a, c, g, or t
  misc_feature (3989)..(3989): n is a, c, g, or t
  misc_feature (3991)..(3997): n is a, c, g, or t
  misc_feature (3999)..(3999): n is a, c, g, or t
atataaataaattaaaacaagaaagtttgaaaattaactaccctattcaaaatgaaattggtgtaggatcacaaggctcaaaaaatgaaagagctatatctggtgagcagattaaaagtatttgtattaaactcaacatagaccgcttaggcaacattactccttcaaaaaaaactaatcagaaatcaacatcaagttttgtaaatgaagaacattctatttactacaataaagttacattcaacaaccttcaacaatccgatgaaaaaatgtttatgcatacagccaacatgaatcctgaagagcgtatggcgtatttgcaaaaactgcgtgagacaacacaagaaaatatttctgaagcagaaaagagagccattttaaatcagataaaaataaatccgccagatgaaaatacttgatttggaacaattgcaacaaattcatcgtttaaaaaacaagaaatcgtgatgagataaaaaacaaatgattaaacgtacgctctattttggcaaccctgcatacctgagcttaaagaacagtcagctaatggtgcgtttgcccgaggtggagaaaaaccaacaacttgatgttgcgtttaaacaacaggcacatgctaccattcctgttgaagatattggtattgtattgctcgaccatcaacaaattaccataacgcatggattactcgatgcattaatggagaacaatgttgccgttataacatgcaacaatacccggcatcctgcaggactgttgctgccactgcaagggcacactttacagcacgaacgatacagtgatcagctttcggccagcgagcctttacggaaacaactttggcagcaaaccattattcaaaaaattaaaaatcaggcagcaggattacaattacaaaatattgattccacacgcctctaccctatctacaacaatgtaaaaagtggcgatagtgagaatgccgaaggtgttgcagcagccttctactggtcaaatatttttacaaaaattcctgctacaatagaacatgcaccgggtaatttattcaaacgacaacgtgatggtttgccacccaacaattatctgaattatggttatgcaattcttagagcaactatggcaagaagtattgttgctgcagggctcttaccaacaaaaggtattcatcatcataaccgttacaatgcctactgccttgcagatgacctgatggagcccttcagaccttttgttgacagaattgttattgacattatcttaaaacatggtataattgatgacttgacaaaagctattaaagcagatttattgacaattcctgtaatagatgtaatgatggatggagaaaacagtccattaacaattgctacacagcgaacagctacttcattagtaaaatgttttgccggtgaacaacgcaaactaatttacccggagttgttatgaattttgaacgcctcaatgcctatcgcactatgtggactattgttatgtacgacctgcctactgaaactaaaaagcaaagaaaattagctgctaaattcagaaaagatttattgcaggatgggtttcaaatgttccaattcagtatgtacttgcggcatagcagcagtagcgaaaatgctgatgtgcatcgaaacagagtaaaaaaatcattgcctactgaaggtaaggttggaattttgcaaattacggataaacaattcggtcagatggaaattttttatggcaaaaaggcgcatgacaaaccacaaacatcgcaacaacttgagctattttaaagggtgatttaagtcaatccgttaaatttcaggaataaaaaatcccgctgtttgggcgggacttcaagttcttaaactcatttttactatcctgaaactgttcttttaagttgaatatctgttgtttagccaatagatattgaaagaactctgacaaagataaaagttgaaagcaaatcacaacnngnannnnnnnnnnnnnnnnntttnntanattgaaagaactctgacaaagataaaagttgaaagcaaatcacaacnatagtanannnncngnntntnntnantnnattgaaagaactctgacaaagataaaagttgaaagcaaatcacaacnngntnngnnnaaagntntnnnngnntnnantnnaanaantnnnanaaannnaaaanttnaaannaaannnnaannnnannngtngnntnntttnnantnncnnnattgaaagaactctgacaaagataaaagttgaaagcaaatcacaacnatngnnnnnctnctnnnnnttnttnntaaattgaaagaactctgacaaagataaaagttgaaagcaaatcacaacgngnntntgncngnnntttnatnnnnnnnaattgaaagaactctgacaaagataaaagttgaaagcaaatcacaacntnntnngattanngntntanatncntntantnnaannannnnnnncaannnnaaanntngaanncaaannanaacnnnnttnntnnnnnnnannntnnannnnnanttnaannanntnnannaannanaaanntnnaannaaannnnaanntggnnntnnnnnnagnnannttnncaananttnnaaanannnnnannaannnnaaanntgnaannnaannnnnaangnnntnnttntnnnnantnnannnnnttaattgaaagaactctgacaaagataaaagttgaaagcaaatcacaactanntnnnntnnncnnnatnnnttnnnaatattgaaagaactctgacaaagataaaagttgaaagcaaatcacaacntgcagnnagnantngattnnnnannanaaattgaaagaactctgacaaagataaaagttgaaagcaaatcacaacgttnaatctctncannannnnnntnnannnattnaaaganntnnganaangataaangttnaannnaantnanancnnnnganntntgnnnnttacanngtnnnaannnnnnaaantnnnacanngnnaaanttnnaannnannnannannttnatganngcnntnnannanntanaaananntgnnannannnnnaannnnannaannnngnnnnnaannntnaannnnnngnangtnngnnnntnnnaannnnnnannnnnnaaannntgaaacnnannaangnngancnnnannnnnnnnnannaaannnnnnatnnnnnnnanannnaannnnnanganntnnnnnanananaannnnnnannnngnnnnnnnnnnnnnnnnnnnnnnaaannnannaannnnnnnnntnnnannannnannnnnnnnannnnngnnnnnnnnnnnnnanannnnaannnnnnnannnnnnnnnnnnnnannnnnnnnnnnnnnnnnanannnnnnntgnnnnnnnnnnnnnnnnnannnnnannnnnganannnnnaannnnnannnantnnnnatnaaannntnnnnnnnttnannnnnnnannannaanaanatnanaggnnngnannnnnaanntananaannnnnnnnnnnnannnnnnttnntgnnnnnncnnnngnnannanannnananatnanancnnannanangntttannnntnnnnannannannnnnaannaaananaanannannnnnaaannaaannnnnnnnnnnnnnnnnaannnnnnnnnnnnatnnnnnnanntnnnnannannnnnncnnnnnntnnnannnnaannnnnntnnnnannnannnnnnnnnnntnnnnnnnnnannntnnnaannnaaatnnnnnnnnnnnnnnnnnnnnanntnnnnannnnnnnnnnaannnntnnnnnnnnnnnnnnnnnnnncnannnnaanngnnnnnnannnnnnntnnnannnnnnnnnangannnnnnnnnnntnntgnnnntnnnnnnnnnnnnnnnnnnnannnnnnnnnnnnnnnnnnnnnnnnnnnnnnnnnnnnnnnnnnnnnnnaannnnnnnnnnnnnnnntnnnnanannnnnnngnt

SEQ ID NO: 886 - DNA, 4000 bp, Escherichia coli
  misc_feature (90)..(90): n is a, c, g, or t
  misc_feature (107)..(107): n is a, c, g, or t
  misc_feature (2554)..(2554): n is a, c, g, or t
cggtgaaagtctttcggaaaggctcggataggggatttccggtggcatctttccacttttgtgacacttccaaaatataagccttacctncttccaaagagggcccnacttcgatcaatggcttgactccagtcttgatgcgtcctggatccatgaacaatgtcagccgggtcatctccgggttccaaagcgcttcacccagttcaagaaacggccattgaacttcacaccgatccgagaggttgaacagccgcaagtgcttgtagatggcgcccccactcatgggggcgctaaaatgaatgtagaacttgagcaggttctctggaaggacctctgcctgagggtctatttgattgacttgggtggggttggattccttttcatcagggatccaagttgaagtcatgctttcatggattgcaagatagcctatccgctcagaaaaagggaatcttggtgtgaagaggatacctttttcatcgaaaaggtaggagccgatgatggggggatctatcgaaggatcaatgcttctttccatcacataaaccctgagcaaccttgccataagctcgggattgggatggcctttggcttcatgatgccagtttagtagccgtacccccaaaggaaccgtccccccagatgccggataaacccactgaattttagtttgagccagaatggggcgatcagccagcaggatggctgccagaccccaaaggaaagcctccctgcccagtgcacgagaaaatggagtcatcatcctgcgcatgcaatgaatccagctcaggaggtgggccttaaaaaaacaacggcggccccgcacaaggccgccgttgagtgattcctctccggtttgcatcaggggagaggtcgggactccaaatggagaggcccattgtcagcacgcaccaacaaaacggcatgacggctatcgatcagatcgagctgatcgacaccttgccaggattcaacagtctggtagtcgagaccttttgtagccccgtccacgacggcttcctggatgccggaggcttcttcaatgccttcggcagggattttcatgatgccccggctactgtttgccatgagcaagaaagttttctcgtccttgtggtagacgaccatatccaagggacggttgcgattgccaagttccgccacggtcttgccaacgatcgccgccccaggctgaagggcactcaccggaaactgaaccaagggagtgcaggtgtaggctgcgagcaggtggggttgatcaccgatactgaacggcacgaaagtccgaaccggggaccgtgtctcaaagcgtccatgggctccatggtaaatttcaactttggtccccgcgctgacttgcttgaaagggaaggggattgctctaagggtggaggcaaactcctcgttcaccaatcctgcaaccaacacccgtccgtccaagaaggcgatatctgtgatggattcgagtcttggattgctgcgacgtcttccttccccaacttctttatccacaggtgcatcgggcagtagggcggtgctgtgctggagcgtcgtcatctcgaggggcgaaatcttgccagcgggggtcaccatcacaatgactggggctgcttgaggacctctccctcgagatagtgagagatagatattatgggagatggggttgacggccatatcatgaaccatcacttcctcggtaggcactccgagcatagaagccagttggcgatccagcgcctccagcttcaggggcttagaaaacgctactggcgttgtgtcagccgtggcgatggcatggatggctgcagatctggagtccgctacaaagaggataccctcagggccaaaggccagacttcctgctgagcgtaagtccagctcacccgattgcatgtcgcgggtccactcagatccattgaggtcatcttgaatcaatatgaggcttgctaagagtgaccacaatagggtgatggagtaggatctcatgctcattttgacactcttggacttcgtttcgttacagaaaacttcaatgaatcatggcttttaccgtgcgccggggagtggctgatatttctggtgtttgtaacgggtgtgtacccagacaaaatccggattgttttcgtttcctcccgcccagtagaagctgctcgtgccattggatgagtcggttgcagcttttactgtggcctcctctcgccaggtatgtgtctctccatgtccatcagcaaaggagatggtgctgttgttgccatgaaaaactgcaaatggatcgacccatcccaaagaaggttgcacgttgataacccaagtgccgcggttatgttccctggggtcagcctcctcgagaaataccatggcttgggaaggaccattgactgtcgataatttgacgtagggaggctgcgggccagaagagctgccgttggtgcctgagccctgccaacccccaccattcatgccgttggctttggagtaactatcccatgcccaaccgcttcctggcttgttacgtttggtacgtatatcaccaggacaatggtaggctccgggnccgtctacatatttgaagagtgggccgttgcgaagacctatctcgaccaaatcttgagcctcgtctttacccatgcgagaagtgatgctggtgtaattaaagcggccattgttcatggtgcctggtcccggccagaagcctcctccagggtttccatcggttgggatcatgcggtcatcgtggtcatctgcatacatgacaaatccaagggcgagttgtttctgattactcaggcacacagcccctgtggccttgagcttggccttactgagcgctgggagtaacatgccagctagaatggcgatgatggcgatgaccacaagaagctcgatgagcgtgaaccccttggttgaatggatgcaaggtttgcgtgaggctagattcaccatacagttcattttctagctcgttttgccattgaaagccagtgaaaactgactttaacgataccgataatcacttagggtcgcgcttttgtccccgtatcctgtccagcgagtcctgcatggatgtgacgattcctgggtagtcttctttgagatcccgcgattcgcctaaatcatcacccaagtaaaacaaccagccgtcgggatgattgcccaattcgatttgggtctgtcgattgaaagcctgggcacgcgagggctcgatccatttccattgacctcgcctgaggcttaaggatcgtgcttggaggaccagctcttttcttcctattgggtctttacccaatagcgccatcatcatgttctgaccatccggtgaagactcatcatcaagtcgctgccccagaagatcagcaaaactcgcaatcaagtccacttgagaaaccaaggctgcactcctgccatgggcgatacctgcgggccagtgcatgatccaaggaaccctggtgccagcttcaaaagcactgtatttgccacccctgaaagggcctgatgggtgatgctcacccagttgctctacggcttgatctttgtagccgtcgtcaatgactgggccgttatcgctggtgaaaatcaccaaggtattttcagcgagacctttctctcccaacttatccatgatttgtccgacgcaccaatcggtttgtgcgatggcgtctcccctgggtcccatggcggtctgtccccgaaaacgaggatggggcacacgcggcacatggatatcgtgtagggaaaaaaataggaagaaaggcttcttactttggcgttcaataaattctagggccttatcggtgatatcatcggccatattctcatcgttccacctcgcggcagtcccaccgctcatataaccgatgcggctgataccattgatgatggttcgatcatgaccgtgactcggatgcatggtcagtaaatctgggcgttctgcgccaataggttcggatccaacacgttctttgaagctgacttggatagggtcttcaggatcaagtccgac

SEQ ID NO: 887 - DNA, 4000 bp, Escherichia coli
cttgacacgcaagatggtgggtcactgacggtaaccaatatagggaaaacgtacaccttggatatctatggctcaggtaatggtataaatccttataaatcatccagtttcagccttggttctgcagcctctatccaaacagcattgaccgtgaccctgacaccggtcttgcagtcaccaactctttttgctggtgtaactgtcgataacctgacgacaacaggggggactattacgagcataggtctggtatccaatgccgcaacttctgccaatactattaacacggatcacggatcagataaccagactttgacgatcaccggtaatggagctctttccattcttggcgttacacctaacgccacaaaaggtgatacgatcaatgcttcagggtttgcccaggccttgactttgggtactattggtggcactcatgcagttgcaactgcagctggtgatacaggtaaaggcgatgtgattaagttggggtctggtacaagctatattactgtatcatcttttgataaaggtgacctcattacgttactggcgagccataccgcggctgacactcttgacacaacgctgatagcatcacatattgctggcgttggaggccagtatgcgagtgcggcggctcagaaagctgatataacgcaaatcaccaacttccatacaaacagtgatattctaaaagtggggattggcggagctatagctcctcaaaatggtatagcatctgaccttactggtcatgcatggacagtaacgaatggttttgttacgaaggccggtttaactggtgcaaccggtcttacagccttccttgctgatgtcgcggcatcaacaacctttgccgcaaatgatatgcttgcgtacaacgatggtgtgaatacctatattgctatcggtgaccatgtggccggaacagctcgtggtgagcatattgtagagttggtaggtcttcatactgccacagccttgggtattgctggtggagtaaacaccattcatattgcataatgaacactatcaatgccaataatcttttataaaacaagtggtttaagagaagaagaacgatgaaaaaaaacattttattagtcttgggtattgcagggatgatgatcggttgctccgaaaaaagtcattctcctgaagtcaaagtgcaaaccagcacagaaagcaccccatcttttgttatcgattcacctccgaattttatttatctgaaaaatcaaggcttttcagtatccaaggacagcccttacgatatcatctcttttgatggcaattattacatcaacaataacgctcactggtaccgttcatctgattaccatggaccgtggattcttattcaggatagttggctgccctcgaagataggcaggtacagcatggaggatataaggaggtatcgcgatattgaaaaccgcaagcctgataaaggtaatcgccagtatcagcacaacaacgtcaacacgaggcgaattcttgatcagcgtaaccagcgtaacgatgccaacgacaggaatgttcgggatcaacaatacgaagctgccgacaacaggaactacgagccagtcagtagagaaagttctccatcttttgttatcgattcaccgccacgttttatttatctgagagatcaaggtttttcagtatccaacggaagttctgttgacatcgtttactatggcgacagttattacacccgtcatcatgaccactggtaccgatcatctgattaccatggaccatggatttatgtccaggatgagaggttgccctcaaagctgagaaggcatagctccgaagaaataaagaggtatcgtgatattgaatatcgcaggcaggatagtcagaataaccagtatcagcgtgaggatgacaacaaaaggcgagtccttgatcagcgtaacgaagccaacagtaggacaactcagcctcaacaaaacaaagctcctgaaaacgtcaaggctcaggttgaccagcacaaaggccctgatcatataaaggccgcggatcagccgcacaaagtacctgaaaacgtcaaggttcaggttgaccagcacaaaggccctgatcatataaaggccgcggatcagccgcacaaagcacctgaaaacgtcaaggttcaggtcgatcagcacaagacccctaatcaaaagaagactcaggatcagccacacaaagctattgataatagcaaaaatcaggatcacagagataaggtctctgataataaaaaggagaataaatgattttccctgacagcattggcggggaagtacacaggtataaatgttataaaatttaatccactcgccccatggcaactatcgaagaaaaaatcatcaatgcaggctttgcacttccacagcctcccgcagctgcaggtctttattctcctgcaattcgcagtggcaaccttgtttttacctctgggcagctacctcttcgggatggtcaactggtagaacctggaggaaaaggtaaggtcaatgatctcagaaaggatgatgcttttcatgcatccagagtcgctcttctcaatgcactggcagccattaaatctgtgactggtacactggatagtattgaaagaatcgtaaagctcaccctctatgtttcgagtgaaacctgcttttccagccaacatctggttgctaacggtgcatcttcattgctgcatgaaatctttggagagaggggagcccatgcaagaagtgctgtgggcgttgcggagttaccccttgatgcaagtcttgaacttgagcttattgtgcagtttaaaccaaccattttgtaatcatattacctgcgattacatcatccttcatcgatgttgattcttcaatatcctcaattaaaatcaactattactacactataaaatcacttgcattatcattgatataagcacatatatctttaatgctgcaagtgttttatgcttattatagataattttaagatatgatttaaagcaagtatatctcgacaagttatagtgctttaattcataaaaatacttctctatagtttgatttaaaaatcatataacttattaaaaaatactttaagtaaaaaatgttaaaatattgtattaaaataactaatatagtttaatatgaatattaatttaaataattattaatgttatatacatttatcggtttaatgatttgtagttgaatattttgttcattccttagtgttaataattttatcaatagttatttttattgttgtttatgatatttgtaacatattttatgtattcattttaaaacatttctatgcagttttttctcttgtttttgattgattatgtcttttattcagattgatttcgctatagcagtacgttgtgatttgatgtcattagtagctgctgtattggttgttacttttgtggttatttttgattttatgaaggaccttattttgctgatgatgctggcggatgtgatcttcggcaggtaatcggttgatagatcaatgattttttgtgattttgatctgcgataggtaaactgtatttcaggaaccaaatattcactctctcatacccggtaactaaaccactcctcatgtcccgtacactgactattgtaatgatgcttgttgtgcttgttttcggcatttttctcggaaccaggctcaacggaggcggggagagccgggttgaacagcagaaaaaaatgcttgaggcttatagtttgatgaaagagctctatgtagataaggttgacagcgacagtcttgccggtgcagggattcagggaatggctgagtatctcgatcctcatacggtttatctggagccggaaaaggtctcatattctcaggcggaatttgatgggaattttgatggcataggtattgaatttgaagttataagagatacgcttcttgttgtcactcccctctcgggcggaccgagtgctgctgtcggtatttctccgggtgaccgtattgtcgggattga

SEQ ID NO: 888 - DNA, 4000 bp, Escherichia coli
  misc_feature (1)..(2): n is a, c, g, or t
  misc_feature (4)..(4): n is a, c, g, or t
  misc_feature (6)..(6): n is a, c, g, or t
  misc_feature (14)..(16): n is a, c, g, or t
  misc_feature (22)..(22): n is a, c, g, or t
  misc_feature (28)..(29): n is a, c, g, or t
  misc_feature (33)..(33): n is a, c, g, or t
  misc_feature (46)..(46): n is a, c, g, or t
  misc_feature (50)..(50): n is a, c, g, or t
  misc_feature (54)..(54): n is a, c, g, or t
  misc_feature (59)..(59): n is a, c, g, or t
  misc_feature (61)..(61): n is a, c, g, or t
  misc_feature (66)..(66): n is a, c, g, or t
  misc_feature (2757)..(2758): n is a, c, g, or t
  misc_feature (2762)..(2763): n is a, c, g, or t
  misc_feature (2767)..(2768): n is a, c, g, or t
  misc_feature (2773)..(2773): n is a, c, g, or t
  misc_feature (2777)..(2777): n is a, c, g, or t
  misc_feature (2788)..(2790): n is a, c, g, or t
  misc_feature (2792)..(2795): n is a, c, g, or t
  misc_feature (2797)..(2799): n is a, c, g, or t
  misc_feature (2801)..(2807): n is a, c, g, or t
  misc_feature (2811)..(2812): n is a, c, g, or t
  misc_feature (2814)..(2815): n is a, c, g, or t
  misc_feature (2818)..(2819): n is a, c, g, or t
  misc_feature (2821)..(2821): n is a, c, g, or t
  misc_feature (2823)..(2823): n is a, c, g, or t
  misc_feature (2825)..(2829): n is a, c, g, or t
  misc_feature (2831)..(2833): n is a, c, g, or t
  misc_feature (2835)..(2837): n is a, c, g, or t
  misc_feature (2839)..(2846): n is a, c, g, or t
  misc_feature (2848)..(2852): n is a, c, g, or t
  misc_feature (2856)..(2863): n is a, c, g, or t
  misc_feature (2865)..(2865): n is a, c, g, or t
  misc_feature (2867)..(2868): n is a, c, g, or t
  misc_feature (2872)..(2873): n is a, c, g, or t
  misc_feature (2876)..(2878): n is a, c, g, or t
  misc_feature (2881)..(2881): n is a, c, g, or t
  misc_feature (2883)..(2886): n is a, c, g, or t
  misc_feature (2888)..(2889): n is a, c, g, or t
  misc_feature (2891)..(2903): n is a, c, g, or t
  misc_feature (2905)..(2915): n is a, c, g, or t
  misc_feature (2919)..(2920): n is a, c, g, or t
  misc_feature (2923)..(2932): n is a, c, g, or t
  misc_feature (2935)..(2935): n is a, c, g, or t
  misc_feature (2938)..(2940): n is a, c, g, or t
  misc_feature (2942)..(2948): n is a, c, g, or t
  misc_feature (2950)..(2952): n is a, c, g, or t
  misc_feature (2957)..(2960): n is a, c, g, or t
  misc_feature (2962)..(2969): n is a, c, g, or t
  misc_feature (2971)..(2986): n is a, c, g, or t
  misc_feature (2991)..(3000): n is a, c, g, or t
  misc_feature (3002)..(3008): n is a, c, g, or t
  misc_feature (3010)..(3013): n is a, c, g, or t
  misc_feature (3016)..(3017): n is a, c, g, or t
  misc_feature (3021)..(3024): n is a, c, g, or t
  misc_feature (3027)..(3030): n is a, c, g, or t
  misc_feature (3032)..(3040): n is a, c, g, or t
  misc_feature (3042)..(3042): n is a, c, g, or t
  misc_feature (3044)..(3044): n is a, c, g, or t
  misc_feature (3047)..(3047): n is a, c, g, or t
  misc_feature (3049)..(3054): n is a, c, g, or t
  misc_feature (3056)..(3064): n is a, c, g, or t
  misc_feature (3066)..(3089): n is a, c, g, or t
  misc_feature (3091)..(3093): n is a, c, g, or t
  misc_feature (3096)..(3099): n is a, c, g, or t
  misc_feature (3101)..(3105): n is a, c, g, or t
  misc_feature (3107)..(3114): n is a, c, g, or t
  misc_feature (3116)..(3131): n is a, c, g, or t
  misc_feature (3133)..(3133): n is a, c, g, or t
  misc_feature (3135)..(3135): n is a, c, g, or t
  misc_feature (3139)..(3143): n is a, c, g, or t
  misc_feature (3145)..(3147): n is a, c, g, or t
  misc_feature (3149)..(3151): n is a, c, g, or t
  misc_feature (3153)..(3169): n is a, c, g, or t
  misc_feature (3171)..(3172): n is a, c, g, or t
  misc_feature (3174)..(3174): n is a, c, g, or t
  misc_feature (3176)..(3179): n is a, c, g, or t
  misc_feature (3181)..(3183): n is a, c, g, or t
  misc_feature (3186)..(3188): n is a, c, g, or t
  misc_feature (3190)..(3191): n is a, c, g, or t
  misc_feature (3193)..(3198): n is a, c, g, or t
  misc_feature (3200)..(3216): n is a, c, g, or t
  misc_feature (3218)..(3238): n is a, c, g, or t
  misc_feature (3241)..(3241): n is a, c, g, or t
  misc_feature (3243)..(3244): n is a, c, g, or t
  misc_feature (3246)..(3260): n is a, c, g, or t
  misc_feature (3262)..(3267): n is a, c, g, or t
  misc_feature (3270)..(3274): n is a, c, g, or t
  misc_feature (3276)..(3279): n is a, c, g, or t
  misc_feature (3281)..(3293): n is a, c, g, or t
  misc_feature (3295)..(3302): n is a, c, g, or t
  misc_feature (3304)..(3312): n is a, c, g, or t
  misc_feature (3314)..(3325): n is a, c, g, or t
  misc_feature (3327)..(3338): n is a, c, g, or t
  misc_feature (3341)..(3362): n is a, c, g, or t
  misc_feature (3364)..(3365): n is a, c, g, or t
  misc_feature (3368)..(3368): n is a, c, g, or t
  misc_feature (3370)..(3376): n is a, c, g, or t
  misc_feature (3378)..(3381): n is a, c, g, or t
  misc_feature (3384)..(3387): n is a, c, g, or t
  misc_feature (3389)..(3400): n is a, c, g, or t
  misc_feature (3402)..(3403): n is a, c, g, or t
  misc_feature (3405)..(3419): n is a, c, g, or t
  misc_feature (3421)..(3435): n is a, c, g, or t
  misc_feature (3439)..(3444): n is a, c, g, or t
  misc_feature (3446)..(3448): n is a, c, g, or t
  misc_feature (3450)..(3450): n is a, c, g, or t
  misc_feature (3453)..(3468): n is a, c, g, or t
  misc_feature (3471)..(3484): n is a, c, g, or t
  misc_feature (3487)..(3489): n is a, c, g, or t
  misc_feature (3492)..(3493): n is a, c, g, or t
  misc_feature (3496)..(3516): n is a, c, g, or t
  misc_feature (3518)..(3522): n is a, c, g, or t
  misc_feature (3525)..(3536): n is a, c, g, or t
  misc_feature (3538)..(3540): n is a, c, g, or t
  misc_feature (3542)..(3545): n is a, c, g, or t
  misc_feature (3547)..(3550): n is a, c, g, or t
  misc_feature (3552)..(3554): n is a, c, g, or t
  misc_feature (3558)..(3561): n is a, c, g, or t
  misc_feature (3563)..(3565): n is a, c, g, or t
  misc_feature (3567)..(3568): n is a, c, g, or t
  misc_feature (3570)..(3571): n is a, c, g, or t
  misc_feature (3573)..(3574): n is a, c, g, or t
  misc_feature (3577)..(3577): n is a, c, g, or t
  misc_feature (3579)..(3579): n is a, c, g, or t
  misc_feature (3581)..(3585): n is a, c, g, or t
  misc_feature (3587)..(3587): n is a, c, g, or t
  misc_feature (3589)..(3591): n is a, c, g, or t
  misc_feature (3593)..(3598): n is a, c, g, or t
  misc_feature (3600)..(3602): n is a, c, g, or t
  misc_feature (3608)..(3608): n is a, c, g, or t
  misc_feature (3610)..(3612): n is a, c, g, or t
  misc_feature (3615)..(3616): n is a, c, g, or t
  misc_feature (3618)..(3623): n is a, c, g, or t
  misc_feature (3625)..(3627): n is a, c, g, or t
  misc_feature (3630)..(3631): n is a, c, g, or t
  misc_feature (3633)..(3634): n is a, c, g, or t
  misc_feature (3636)..(3644): n is a, c, g, or t
  misc_feature (3646)..(3646): n is a, c, g, or t
  misc_feature (3649)..(3649): n is a, c, g, or t
  misc_feature (3654)..(3655): n is a, c, g, or t
  misc_feature (3657)..(3657): n is a, c, g, or t
  misc_feature (3661)..(3661): n is a, c, g, or t
  misc_feature (3670)..(3670): n is a, c, g, or t
  misc_feature (3676)..(3679): n is a, c, g, or t
  misc_feature (3698)..(3698): n is a, c, g, or t
  misc_feature (3700)..(3700): n is a, c, g, or t
  misc_feature (3706)..(3708): n is a, c, g, or t
  misc_feature (3711)..(3711): n is a, c, g, or t
  misc_feature (3713)..(3714): n is a, c, g, or t
  misc_feature (3716)..(3716): n is a, c, g, or t
  misc_feature (3721)..(3724): n is a, c, g, or t
  misc_feature (3727)..(3727): n is a, c, g, or t
  misc_feature (3731)..(3731): n is a, c, g, or t
  misc_feature (3738)..(3738): n is a, c, g, or t
  misc_feature (3759)..(3761): n is a, c, g, or t
  misc_feature (3763)..(3764): n is a, c, g, or t
  misc_feature (3777)..(3777): n is a, c, g, or t
  misc_feature (3784)..(3784): n is a, c, g, or t
  misc_feature (3788)..(3788): n is a, c, g, or t
  misc_feature (3808)..(3808): n is a, c, g, or t
  misc_feature (3810)..(3811): n is a, c, g, or t
  misc_feature (3813)..(3818): n is a, c, g, or t
  misc_feature (3820)..(3825): n is a, c, g, or t
  misc_feature (3827)..(3831): n is a, c, g, or t
  misc_feature (3833)..(3833): n is a, c, g, or t
  misc_feature (3835)..(3835): n is a, c, g, or t
  misc_feature (3839)..(3844): n is a, c, g, or t
  misc_feature (3848)..(3848): n is a, c, g, or t
  misc_feature (3852)..(3852): n is a, c, g, or t
  misc_feature (3854)..(3854): n is a, c, g, or t
  misc_feature (3856)..(3856): n is a, c, g, or t
  misc_feature (3859)..(3859): n is a, c, g, or t
  misc_feature (3862)..(3862): n is a, c, g, or t
  misc_feature (3865)..(3867): n is a, c, g, or t
  misc_feature (3869)..(3869): n is a, c, g, or t
  misc_feature (3871)..(3873): n is a, c, g, or t
  misc_feature (3988)..(4000): n is a, c, g, or t
nntntntttttttnnntatttnaataanntttnttttttttttttnattnattnaatananttttntttttttttttttttttcatatttagtatcattatttttttttattacaaaagatacaataaataatagaatagaaggaatataataaatataaggaaaggtatgtgaatataaaataatgtttttataatttttttaattgttatgtttaaattttatataatatataatatttaaaataataatagtaataagagaaactatagtccatttaaattatttaaaacaatattggaaatttataaaattatacatattaaataatatatatattattattaaaaaaacattaatatataataactaaaataaatatacacttatgtaccattcatcatatttaaatgatagaaattatattaataatattttgatatattgctcttatctttttgatgataataattttaataatagtaatattaacttttggaaataaataaactttatattataaattggttaaatttctaaaagtaaattttaataaatgaatttatgaaaatcattaatatgtctttattttttttagtttgttttcttcctataaagatttataataattaattttataaatacctttaatatgacaataatataatttacaatagataattatattttatttatggttttaatatttagaaaaaaaaaataataataaaattatatgaacgaattaaaatattataaaataatcactaaccaaaataatttaaattttatatacatatataattgggtaatatatatgacatcttggaaataaattaataatttataaagaataaaaaaagatgacttctgtcataaaaatcgattttcctgaaaattcagtaactgtagtattatttttgctcacagcttttgttattttattcagttacatatcatatttcgttaaagagcgacttttcttatctgagcctttagtagcaacattagttggtatcttattaggaccaaaagttttgggttggattaatccattatcttggactgatgaaattcatcatttaacatttgaaatttctcaagtaataaaattagtttatttttattaataatatttatttattaaataaaaatttattttattaactattattattaatatatatatatatataaaaggctattattcttatacaaatcatatgtgctgttatacagacaccaaaaaatttctttaagcaccattggaaaggattagcaacattatggggaccagtatctatttacatgtgggttattacgggactgatttttaaatttggactcaatattgattatgtaagaattaataaaaaatttacctcaaatttatgaatatataaatatataaataatgattattatttttatctattattataattatggtattgtaattaaaataaaatattattgttattatttttaaaaacgtattatagtggccagcttttattctttcatcatgtacaacaccaactgatccagtaattataaaatataatataaaaattttgaaaaatgataaacaatattaatagagataagaattataataataaattataattattattaaaactttagtaatacaataaattaatttattaaattgattattaaaaaattaaataatatttattattaaaggtattagctaattcaattgttagtggtcgtttcgcgacattacatattccaattaatattagatatgttttatctgctgaaaggtaatacaaaataaaatataatatactaataatttaatattaacaataataaatcactatatatttcataaaaattagtgctggaaatgatggtatggttgaagtttttaaatttttttttttctttattaaaaaataacatcaaaatataatattaaaaaattctttttttttttttttttttttaaaatattttttgaataaataataatatataaaaattgaatataaaattattaattattattgataaatgataaataatacgtaaatatatataattttattttataattaaaggggttgcttatccacttttcctattagcctttttattccatacacaatctgataaatctatttttttgaatattcttcaatggcttggtgaagttatatgttattctgtaattttagctgttattgttggttgcgctattggatattgctcaaagtttatatttaaactttgtttacaaaagaaattaatggataaacctagttttatggcatttcttgtttgtttagctgtaagtaaaaataaaatataattttaatatatatatatatatcattaaattattaaactaatataactaaataataattatatattatttttaaattaaaatatttatatatatatatatgtaataaaagatatgtactggtgcaatttgtgatttctttactatttcaaactatattgctgtatgttgtgctggtgtggttattgcatgggtaaatatattttctattatcaataaattttaatattattagattataatagatcaaaatattttcatttttaataattgaatctttcatattaaatatttatatttaatatatatgatcttcataatttttaattttattgtaaataaaatcaaatataataacaaaattttattaaattaaattaaattaaattaaattaaaaaaaaaaaaaaaaaaaaannaaannaaannaaaanaaanaaaaaaaaaannnannnntnnntnnnnnnnaaannannaannananannnnnannnannntnnnnnnnntnnnnnaatnnnnnnnntntnntttnnttnnnttntnnnntnnannnnnnnnnnnnnannnnnnnnnnnttannttnnnnnnnnnnttnttnnntnnnnnnntnnnttttnnnntnnnnnnnntnnnnnnnnnnnnnnnnttttnnnnnnnnnntnnnnnnnannnnttnntttnnnnaannnntnnnnnnnnntngnttngnnnnnntnnnnnnnnntnnnnnnnnnnnnnnnnnnnnnnnnannnaannnntnnnnntnnnnnnnntnnnnnnnnnnnnnnnnananaaannnnnannnannnannnnnnnnnnnnnnnnntnnantnnnntnnnttnnntnntnnnnnntnnnnnnnnnnnnnnnnnannnnnnnnnnnnnnnnnnnnnttnanntnnnnnnnnnnnnnnntnnnnnnaannnnnannnnannnnnnnnnnnnnannnnnnnncnnnnnnnnngnnnnnnnnnnnntnnnnnnnnnnnnaannnnnnnnnnnnnnnnnnnnnnannaanannnnnnnannnnaannnngnnnnnnnnnnnnannannnnnnnnnnnnnnnannnnnnnnnnnnnnnaaannnnnnannnanaannnnnnnnnnnnnnnnaannnnnnnnnnnnnnaannnaannaannnnnnnnnnnnnnnnnnnnnannnnnaannnnnnnnnnnnannnannnnannnnannnaaannnnannnannannannaananannnnnanannnannnnnntnnntttttnannnaanntnnnnnnannnaannannannnnnnnnnanttnttttnntntttnttttttttntttttnnnnttttttttttttttttttntntttttnnntantnnanttttnnnnttntttnttttttnttttttttttttttttttttnnnannttttttttttttnttttttntttnttttttttttttaatatttntnntnnnnnnannnnnntnnnnntnantaannnnnnaatnattnananttnaanaannnanannnaatttttttttattcatattttattaatatttaatatttaatattatattttattttatttctttttattttgaatttatattatttaatttttttttttttttttttttttttnnnnnnnnnnnnn

SEQ ID NO: 889 - DNA, 4000 bp, Escherichia coli
  misc_feature (4)..(8): n is a, c, g, or t
  misc_feature (10)..(13): n is a, c, g, or t
  misc_feature (15)..(17): n is a, c, g, or t
  misc_feature (20)..(21): n is a, c, g, or t
  misc_feature (23)..(29): n is a, c, g, or t
  misc_feature (31)..(31): n is a, c, g, or t
  misc_feature (33)..(34): n is a, c, g, or t
  misc_feature (37)..(39): n is a, c, g, or t
  misc_feature (41)..(43): n is a, c, g, or t
  misc_feature (45)..(52): n is a, c, g, or t
  misc_feature (54)..(54): n is a, c, g, or t
  misc_feature (57)..(62): n is a, c, g, or t
  misc_feature (64)..(64): n is a, c, g, or t
  misc_feature (66)..(67): n is a, c, g, or t
  misc_feature (71)..(74): n is a, c, g, or t
  misc_feature (76)..(79): n is a, c, g, or t
  misc_feature (82)..(88): n is a, c, g, or t
  misc_feature (91)..(95): n is a, c, g, or t
  misc_feature (97)..(98): n is a, c, g, or t
  misc_feature (100)..(100): n is a, c, g, or t
  misc_feature (102)..(102): n is a, c, g, or t
  misc_feature (104)..(107): n is a, c, g, or t
  misc_feature (109)..(109): n is a, c, g, or t
  misc_feature (111)..(116): n is a, c, g, or t
  misc_feature (118)..(121): n is a, c, g, or t
  misc_feature (123)..(127): n is a, c, g, or t
  misc_feature (129)..(134): n is a, c, g, or t
  misc_feature (136)..(136): n is a, c, g, or t
  misc_feature (138)..(143): n is a, c, g, or t
  misc_feature (146)..(147): n is a, c, g, or t
  misc_feature (149)..(151): n is a, c, g, or t
  misc_feature (153)..(154): n is a, c, g, or t
  misc_feature (159)..(160): n is a, c, g, or t
  misc_feature (163)..(165): n is a, c, g, or t
  misc_feature (173)..(173): n is a, c, g, or t
  misc_feature (175)..(175): n is a, c, g, or t
  misc_feature (177)..(178): n is a, c, g, or t
  misc_feature (180)..(180): n is a, c, g, or t
  misc_feature (182)..(183): n is a, c, g, or t
  misc_feature (186)..(187): n is a, c, g, or t
  misc_feature (190)..(192): n is a, c, g, or t
  misc_feature (194)..(196): n is a, c, g, or t
  misc_feature (199)..(200): n is a, c, g, or t
  misc_feature (202)..(204): n is a, c, g, or t
  misc_feature (208)..(218): n is a, c, g, or t
  misc_feature (220)..(220): n is a, c, g, or t
  misc_feature (222)..(222): n is a, c, g, or t
  misc_feature (224)..(227): n is a, c, g, or t
  misc_feature (229)..(229): n is a, c, g, or t
  misc_feature (231)..(231): n is a, c, g, or t
  misc_feature (233)..(233): n is a, c, g, or t
  misc_feature (235)..(235): n is a, c, g, or t
  misc_feature (237)..(242): n is a, c, g, or t
  misc_feature (246)..(246): n is a, c, g, or t
  misc_feature (248)..(252): n is a, c, g, or t
  misc_feature (256)..(260): n is a, c, g, or t
  misc_feature (263)..(264): n is a, c, g, or t
  misc_feature (266)..(266): n is a, c, g, or t
  misc_feature (270)..(270): n is a, c, g, or t
  misc_feature (273)..(283): n is a, c, g, or t
  misc_feature (285)..(288): n is a, c, g, or t
  misc_feature (290)..(293): n is a, c, g, or t
  misc_feature (296)..(304): n is a, c, g, or t
  misc_feature (306)..(306): n is a, c, g, or t
  misc_feature (309)..(309): n is a, c, g, or t
  misc_feature (311)..(314): n is a, c, g, or t
  misc_feature (316)..(317): n is a, c, g, or t
  misc_feature (319)..(328): n is a, c, g, or t
  misc_feature (330)..(330): n is a, c, g, or t
  misc_feature (332)..(335): n is a, c, g, or t
  misc_feature (337)..(339): n is a, c, g, or t
  misc_feature (341)..(342): n is a, c, g, or t
  misc_feature (344)..(348): n is a, c, g, or t
  misc_feature (350)..(355): n is a, c, g, or t
  misc_feature (357)..(360): n is a, c, g, or t
  misc_feature (362)..(363): n is a, c, g, or t
  misc_feature (365)..(369): n is a, c, g, or t
  misc_feature (371)..(381): n is a, c, g, or t
  misc_feature (383)..(383): n is a, c, g, or t
  misc_feature (385)..(392): n is a, c, g, or t
  misc_feature (394)..(397): n is a, c, g, or t
  misc_feature (399)..(399): n is a, c, g, or t
  misc_feature (403)..(403): n is a, c, g, or t
  misc_feature (405)..(405): n is a, c, g, or t
  misc_feature (409)..(410): n is a, c, g, or t
  misc_feature (412)..(432): n is a, c, g, or t
  misc_feature (436)..(440): n is a, c, g, or t
  misc_feature (442)..(443): n is a, c, g, or t
  misc_feature (446)..(447): n is a, c, g, or t
  misc_feature (449)..(450): n is a, c, g, or t
  misc_feature (454)..(465): n is a, c, g, or t
  misc_feature (468)..(468): n is a, c, g, or t
  misc_feature (470)..(472): n is a, c, g, or t
  misc_feature (474)..(477): n is a, c, g, or t
  misc_feature (483)..(484): n is a, c, g, or t
  misc_feature (486)..(486): n is a, c, g, or t
  misc_feature (488)..(488): n is a, c, g, or t
  misc_feature (490)..(490): n is a, c, g, or t
  misc_feature (493)..(494): n is a, c, g, or t
  misc_feature (496)..(498): n is a, c, g, or t
  misc_feature (500)..(506): n is a, c, g, or t
  misc_feature (509)..(510): n is a, c, g, or t
  misc_feature (512)..(516): n is a, c, g, or t
  misc_feature (518)..(521): n is a, c, g, or t
  misc_feature (523)..(523): n is a, c, g, or t
  misc_feature (525)..(525): n is a, c, g, or t
  misc_feature (531)..(533): n is a, c, g, or t
  misc_feature (536)..(543): n is a, c, g, or t
  misc_feature (545)..(545): n is a, c, g, or t
  misc_feature (547)..(547): n is a, c, g, or t
  misc_feature (549)..(558): n is a, c, g, or t
  misc_feature (561)..(562): n is a, c, g, or t
  misc_feature (565)..(565): n is a, c, g, or t
  misc_feature (567)..(571): n is a, c, g, or t
  misc_feature (573)..(573): n is a, c, g, or t
  misc_feature (575)..(577): n is a, c, g, or t
  misc_feature (579)..(580): n is a, c, g, or t
  misc_feature (584)..(587): n is a, c, g, or t
  misc_feature (589)..(589): n is a, c, g, or t
  misc_feature (591)..(597): n is a, c, g, or t
  misc_feature (600)..(600): n is a, c, g, or t
  misc_feature (603)..(608): n is a, c, g, or t
  misc_feature (610)..(611): n is a, c, g, or t
  misc_feature (614)..(618): n is a, c, g, or t
  misc_feature (624)..(626): n is a, c, g, or t
  misc_feature (629)..(630): n is a, c, g, or t
  misc_feature (632)..(633): n is a, c, g, or t
  misc_feature (635)..(636): n is a, c, g, or t
  misc_feature (638)..(639): n is a, c, g, or t
  misc_feature (641)..(642): n is a, c, g, or t
  misc_feature (644)..(644): n is a, c, g, or t
  misc_feature (646)..(647): n is a, c, g, or t
  misc_feature (649)..(652): n is a, c, g, or t
  misc_feature (654)..(654): n is a, c, g, or t
  misc_feature (656)..(657): n is a, c, g, or t
  misc_feature (659)..(661): n is a, c, g, or t
  misc_feature (665)..(665): n is a, c, g, or t
  misc_feature (668)..(668): n is a, c, g, or t
  misc_feature (672)..(674): n is a, c, g, or t
  misc_feature (676)..(679): n is a, c, g, or t
  misc_feature (681)..(682): n is a, c, g, or t
  misc_feature (684)..(685): n is a, c, g, or t
  misc_feature (687)..(687): n is a, c, g, or t
  misc_feature (689)..(690): n is a, c, g, or t
  misc_feature (692)..(700): n is a, c, g, or t
  misc_feature (702)..(703): n is a, c, g, or t
  misc_feature (707)..(711): n is a, c, g, or t
  misc_feature (714)..(714): n is a, c, g, or t
  misc_feature (716)..(717): n is a, c, g, or t
  misc_feature (720)..(723): n is a, c, g, or t
  misc_feature (725)..(726): n is a, c, g, or t
  misc_feature (728)..(728): n is a, c, g, or t
  misc_feature (730)..(731): n is a, c, g, or t
  misc_feature (733)..(735): n is a, c, g, or t
  misc_feature (737)..(737): n is a, c, g, or t
  misc_feature (740)..(750): n is a, c, g, or t
  misc_feature (752)..(752): n is a, c, g, or t
  misc_feature (1316)..(1316): n is a, c, g, or t
tttnnnnntnnnncnnnttnnannnnnnncnannaannngnnntnnnnnnnntnaannnnnntncnntttnnnntnnnnaannnnnnnccnnnnnanncntnannnncntnnnnnngnnnntnnnnntnnnnnnancnnnnnnaanngnnnannaaaannaannnaaaaaaangnanncnannttnnaannnannnttnntnnntttnnnnnnnnnnntncntnnnntncngnangnnnnnntttnannnnntttnnnnnccnncntttnaannnnnnnnnnntnnnngnnnnccnnnnnnnnnanccntnnnnannannnnnnnnnntncnnnntnnnanncnnnnnannnnnntnnnncnncnnnnntnnnnnnnnnnngntnnnnnnnntnnnncnaaangntttnnannnnnnnnnnnnnnnnnnnnngggnnnnntnnttnntnngggnnnnnnnnnnnnggntnnntnnnntttttnnangnanggnnannnannnnnnnttnncnnnnncnnnncnantttttnnnaannnnnnnnantncnnnnnnnnnnaannccnannnnngntnnncnntttnnnnantnnnnnnnaanttnnnnnnannaannnnncccttnnnaanngnnanntnnannantnntnnnncnanngnnnaaanccntttnnntnnnncnntnnantnnannnnnnnnnanncccnnnnnccnannaannnntnntngnnannnanttnnnnnnnnnnngnatttggtgtcatctctgcatataccgttacgggaactttcatagtctcaattttgtcgtaaaattaatgtaaacaatccaagaataagaaagaaatgtgctttattctttagtaaaaatgttttatttttgaaagttatgaaacaaattaagtcttttgtgctcgcatcttcagctatgctcctcatgataggaagtattggtgttgtggcactctcgtgcttttgtaatgacgatcaagtctctttgtcttttttcgctacaacgaccactccgtgtgacgatcataccaaaaccgtgcaacacggtagaacatgttgcgctcatgaaactgaaactgccgaaaaagaaaaaaactgttgcaccaacactacagaaaaaaaaggctgctgtgaagatgagttccaacacataaaagtcaaacttgacttcttcagtaaatatgccatccatcccttactccacatccaattcactgaagaacgattcattggatccctcgatagcgagctgaatcgagatgttgttgagtaccacaccaactcccctcctcccatagcaggangggaacgactcctaaaaaaacagcattggctcatttgattcctgactgactattcgaaagagtaattaatcaaaatcaatccaatgaagtacataattttaacagcgctcttccttatttccctgagcgcaacagcacaagtaaaaggagtcatctatggctcaaaaggtgaaaaaacaaaaaaaacaaaactttacggggcaaaagcacgccttctaaaaggtaaaatcggtgacattacagatgaagaaggaaacttcgagttggtattgccaaaagcactgccagacaccctcattttttctgcgatggggtattatccggacacaattgttgtcacaaaagcagaccggtacaaatcctttgtcgtgaccttgtattccgatttgattctccccgaaattgttgtcgcatacaagaaaggatcgacctcaatttcaagattaaaaacactcgccacagagacactctctgcgggagaattgcgcaaagccgcatgctgtaatttgtccgaatcatttgaaacaaatgcctcggtagatgtgaacattacagatgccgtttcgggcgctaaaaaaattcagatgatgggcttggatggtgtttacacacagatccaaatggaaaatattccctacctacgtgggctcgaaacctcatttggattgcactccatccctggaacatggatcgaatccattcaaatcaccaaaggaacaggaaacgtagtgaatggttatgaatcgatggcaggacttgtcaacctcgagctcaaaaaacccgaagaaatggaggcactttacctcaatgtctataccaacgcaatgggacgcactgagttgaattttaactctggattccgcatgggggaaaaatggtcctccggatggttcgctcatgcagctgcgcacccaattgagatggactacaacatcgacggctttagagacatgccaaacggcacgaacttcgctgtactcaaccgctacaattatgagggtgaaaaaatggaggcccaatttggagtgaatgcctattgggacaataaaattggtggacaagtcgatgcacttcgtactgctggaaacgacttctacaacgtcaccattgactcaagacacattgatgcctttggtaaaacagggtttttctttaaaaaacctggacattcaattggaattgtgtacaatgcaaaataccagaccgtcgacacccattttggaccacgtgtttttaatggaacggagcgacgcggatacatcaatgccatctatgacggaatcataaaaacaacagaccacaagtacaaacttggtctcaatggcgtatactccgacatcacgcaacgcatggactcattgcgttccgaccgtatcgaaattgtaccgggtgcctttggagaatatacgctcacgacatcccgtttgtcactggtgcttggagggcgtgccgattaccacaatatatatgggtttcaaggcgccccgcgtgttcatgccaaattcaaactcacagaatatacagacctgcgatttacatccggcaaaggatggcgtgttccgaattatatgattgacaacatctctttgctcgccacatctcaggcttgggttgcccccgattcattgacacctgagatttcatggaacatgggcggaagtatcgcacaagaattcaaattgttcaaacgaaaagcaacagcagttgtggatttctatcatacccagtttgaaaaccaaatgcttgtcgatcgtgatgtgaatgcttcccaaattgtatttggcaaccttgacggaaaatcattctcgaacagtttgcaagtggaaacaatgattacaccttggaagacgattgacttgcgttttgcctacaaataccttgatgtccgtgccacttatggcggtaaattacaacaacaagtgatggttccaaaacaccgcggatttttcaatcttgggtacaaatcacgcagcaaacggtgggaatttgacctgacttgttcggtatttggaacagcgcgactgcctcaagttgaactcccagatggaagcgagacagtgaacaattcgagtgccgtctaccccttgttgagtgcccaaatcacacatgtaaaaaaagcatgggagttttacctcggaggggaaaacctcctcaattaccgacagaccaacccgatcatcgatgcagaaaacccgtttagcgaaacattcaatgcgacgcgcatatgggctcctgtttttggtcctaatgtgtacttcggtgtgcgcttttccattcagcaagaagaggaaaaagagaattaaaattgaatcgaattgcgagtgcaactgaaggaaaaatttattcaatcgataaatcgttcctatcttgcacacatattcgcaccaatttaatgttgattcgttacataaaaccacttctttcgattttcatcttattgacgatcaaattgagttatggacaaacttcaactgaaaaaattcggtttatttcgaatgggagcgttggatttgatgcatttgcagcagcagaatggaaaaacgaatacgaggtacttgaagactcaataccctattttgttgcacacaaatcggttgcaaaaggaacgagagactcggtgcaattcatttccccctataccatcgattccctggattttatcatccaagattcgagtcatcagc

SEQ ID NO: 890 - DNA, 4000 bp, Escherichia coli
  misc_feature (759)..(759): n is a, c, g, or t
  misc_feature (999)..(999): n is a, c, g, or t
  misc_feature (1991)..(1991): n is a, c, g, or t
  misc_feature (2588)..(2588): n is a, c, g, or t
  misc_feature (3036)..(3036): n is a, c, g, or t
  misc_feature (3607)..(3607): n is a, c, g, or t
  misc_feature (3653)..(3653): n is a, c, g, or t
  misc_feature (3790)..(3790): n is a, c, g, or t
  misc_feature (3841)..(3841): n is a, c, g, or t
gccgcgacggtatcaaacgtatcgccaatctctttcaccaccgccttgcacgcaccgcagcgtatgccgtagacgagtgagcgatagttgtcggagtgttcgtccaccatgtcgatcgcggggtcgacttcaccggcgtcgacgtgcgcgatgaacgctcggcgagtcgtcaatgcgaggcctacggtgagcgcgatcgcggtgcgtcggcgcgagcgctcggatcgagacgatcgcgggttgagcatcgtgagcgaggtcgattgtgaggtaacatccaccaccacgactgcgagtcgcgctcgcgcgaaagaatagtgcaatgtgctaaagacagtgttggtacaaaccttcaaataataaatattacgacgacgccgtggcgtcttcgggcgaggacgctcgcgtggagggcgcgcggtcggatatcgccggcgtctcggtggcgtcgacatccggtctcgagacgcgaatgaatatgaagcgtccttcgaaggaagtcatgaattcccgcaagacgtcgacgtcagcgagcatggcgatagacgcttcttcgtcggcgacgatggtggacgcgccaaacttgacgagctctttcgcgctcgccgtccaccaggcgtcggcttgcggcggcagggcgcggtgcaaatgaccgccttggtattccttgacgtcgtcctcgccgtcgaaacgttcgatggcggatatttgcaaccgcatccctcgagacagcagagcgtgcgtaaagtcggcgagaangcctccgtggcgacacgcgttgagaatgtagccgcatcctcccggccgaattcgtcgcgtgagactcgcggcgagcggcgcagcgtgttcgtcggaatacaaaacatccgtcgccaagacaacgtcgaagacgtcgtcgacgggaagtttacacgactcaatcattgatttgtgcgctgcggagcgcgcgtgcacccagtgcctcgcctcattcgatgcgcgggcttgctcgagcgagangacgcccgctaagatgtcgtcgtcgtcgcgaaagtctagaaacatcgcctttgtggtcgccgcacactcgggcggcagctcgctcacgctccgcgcgatcgcatctatcgcccccggcgcaccgtcggtgatgcgcacgcgcttcgcgcccacacgcgccgccgtcaaccccgcgagcccgcacccggcgccgatttccaacacgtcgagcgctcgcacaagctcgggcgccgcatctaaacacctcgacatgatctgcgacgacccccagacgcgccaggccaacccagcgtcgcgccattcgctctcgtgcactcgaacgactatatcagacaccggaagccgcacctcgagcgtcgacggcttcgcccccgcgcgttcgcccacctgactccccgccaccgaccgcaactccaccgaactctccctcttcgccatctccgacgccttccccagcgcgctcccgatcgcgtccatcatcatctcgtcgtcatcccgcaccgcgcgatcgagcgccttgatcagcaccggcctcgcgccgagcgcctccgccagcgacgcccggctcgccccagccgtcatctccgcgcacagcctcgccaccccctcccgcctcgccgccgcccccgtcatcacctccagcgcctcgatcgctcgtcgcacgcgttcgtgcccctatcgcgcgcgccattcgcgccgtcagtcgccgcgcgtcgtcctcgcgcgcgcaagatgactcgccgcgtcgccgccgccgtcgccatctttcgcgcgcatcgcgcgtctcgcgcgtcgcgcgcgcgctcgaaccgcgctcgcgcgatcgcgcgcgcaccgcgtcctcgcactcgtcgccgtcgacgtcgagcatggcgtcgcgcctccgcgcgcgcggcgcgccgtcgcgatgtgtcgccgccgacgcggcgcgcgatatacgaagcgtcgcgccgtcggtcgcggatgacgcgtatgcgcaaacagtcagcggntatcggtcggtcgcgggcgctcgacgcgacgacgtcacggcgcgacgcgcgacgcgcgcgaggcaccggcgcgcgcgcgagatggcggacgacgcgccgaggcgcgcgtacccgcgcgtcggcgacggcgacgcggcggcgcggcgcgacccctggcggaacgtcgacctcacgccgccgatcgaagggtacgacgccgacgtctggcgcgcgcgcgtcgagctcgcggcgtgctatcagctgtgcgataagcttggattcaacgagggcgtgtgcaatcacctgacgtgcgcggcgccggggcgagaggatgcgtttctgtgcgcgccgtacgggttggcgtggagcgaggtctcggcgagtaatctggtgatgatcgatgggcgcgggaagttgctcgaggggtcgggagaggtggacgcgacggcgttttttatacatctcgcgatacaccgcgcgggagtggcgtgcgtgctgcacacgcacatgccgcgcgcgagcgcgctgtgttgcgtggagtcgttcgagttggcgatgtgtcatcaaaactcgttgcgattcgccgaagacgtggcgtacgacccgacttttaacggnttggtgttggataacaccgagggcgagcgattggtgaaggtgatggatgggaaacgggtgttgatgcacaagcatcacggcgtcatcgtgtgcggcgcctccgtcgccgaggcgttcgatgatttgtactacctcgagcgcgcggcggaggtgcaaatcttagccatgtccaccggttcacccctgagcatcatcggcgacgacgtggcgcgacagtttaggcgggatatggaatcggacggcggcaaggcgcgctgggcgcagttgcactacgacgcgcgcatgcgcgaactcgccagagacccgcttcggcgcatcttcatcgactagcgcgttcggcgcgaaggctcaccgaacgctcgcgcgcatttcgcccgagaaccgttcgcgagcagctcaatcacacacatttcattgttattgtaaactgaatccgttttgtcgcttnggcgcgacggcgaggcgaagccacagactccgtcgcgtcggccctcgcgcgcgacgcgcgcgcgacgcatggatgtcgccgccctcgaccgcgcgctcgacgatgtctccacgtccctcgaagccttcgccgaggtgcgtttcgcgtcgtctttcgaaccaactcgaaccaacgaactttgtcgagacgacgcgcggtgactgactcgcatcgacgcgcgcagcacggcgcgaggcgcgcgcgcgacgtcgcggtgtcactctgcgccgaagccgcgcgcggaggggtggaggacgcgatcgcgggcgcgcagaaggtggttgacgcgctggagcgacgaagggcggagagcgcggcgcgcgccgagcttcggcgagcgagcgcggagggcgcggcgcgcacactgcgggagacggtgaagaaacacgcggtagaacgcgaaagtgtgtgcgaggacatggcgagggcgtcgttaatgacggaacgcgtgttggaacggttggagtcgccggcgaacgcggaagctgcgagcgcgagtcgacgcgccgacgcgttggggacgttggctgangttttggagtgcgtgtgtgcgttttctaagggtggcgaagcggtcncgaaggcgtgcgatggactgtttgcggacgcggcgcgacgaggcgaagcgggacgcttggcgaaaagatcactctccgtcgtcgaacgcgcgcagtcgtgtcgcatcgcggacgaggacgcgggcgcggagcgaatngcgctcaaggacgcctcgacggcgttgcaaaggtactgtgaagacgttganaacgcacttttggacaaatttgccgcggcgtgcgcgaataagtcgtacgcagcagcgcgagccgacgctgaggcgttatttgagttcaacggcggacacagcgtcgtctcgcggtacgtcgcgagccgtgaaatgttcatctctgcgaacgcgatggaa

SEQ ID NO: 891 - DNA, 4000 bp, Escherichia coli
  misc_feature (87)..(87): n is a, c, g, or t
  misc_feature (1823)..(1823): n is a, c, g, or t
  misc_feature (1970)..(1970): n is a, c, g, or t
  misc_feature (1987)..(1988): n is a, c, g, or t
  misc_feature (1991)..(1991): n is a, c, g, or t
  misc_feature (2563)..(2563): n is a, c, g, or t
  misc_feature (2678)..(2678): n is a, c, g, or t
  misc_feature (3111)..(3111): n is a, c, g, or t
  misc_feature (3142)..(3142): n is a, c, g, or t
aacagctcgttcttcccgatagtgcggttggtggcgcgggtgacgcggtaatgcacgatcgccccgttcggccccgacccggcgatngtcgggaacgaaatatccttcaatagaccgctatcgcggcggaagctttccagcgcctccaccgcgtcgatctcggtcagcttgccggccggcgcctcgcgctcgagccaggccaggaagcgcgccatcgccacgccgtcgcgcttgtgggcggcgcgcgagccggcgatctcggcgtggtttttcaccgccttcatcagcgcgatcggatcggcgccgcgcaccggcttgccgccgtacccggaaaccaggcgcgtgagcgcatcggccgcgctcgcctggtcgagccgcacggtcttgtccttgagttgcgcaaggtcgcgggcaagctcggcggtcgcgcgcaccgccgcgatctcctccagcgctggacgcgttttgttgtcgagcttggccgtttccacatagagcgcgggcttgccctcgcgcgggataaccgcgaaggcgagcgccagcggcgtatgcgcgatgtccgagccgcggatgttgaacgcccaggcgacgttctgcgggtccgacaccaccagcacatcggcgcgcagctttttaagttcggcctggatgcgcttgaacttgtcggccgcgctttcgccggcgagcttgatatcgcgcaagctcacggggccggcgggcggcgccgggcggtcgctccacagcgcgtcgatcggattattatcgaccgccaccaattcggcgccggcggtggcgcaggccttgcgcagcctgtcggcgctctccgatgtgtgcagccacggatcgtaaccgagcttcgccccgcttttgagattctgttcgagccattgctcaggcggcgagtccaccagatgctcgatggcgaagagtttggcatcgatctgcgccgccgcctgcacggtgtagcggccgtccacgaatagcgccgcgcgctcggccagcacggcggcggcgcccgccgagccggtgaagccggtgagccaggccagccgttcctcactggccggcaaatattcgttctgctggcggtcggcgcgcggcaccaccaagccgtcgagcccgcgccgcttgagctcgtcgcgcaaggcagcaatgcgcgccggtgctgtcgcgcgctcgtgcgaatcgtcgaatgtctgaaagcgggcctcgaacataggcggcactctagcgcgctccccggtgagggcaacgcaggcatacgccaggcgtcagccgaggcatgtctgtcatgccagcaggcacgaacgcgaaaaattcgcgtcgtgctggcgctcaattcggcaacgaatcacctgtttgactcaaaattgtgcactgcattaaaattgtcgtaataatgccaccgatctcaccgattgattaagcaattcatgcggtgtttacagggcttctatgcattgttatgactttctcgcaattgcgagatagtttatgttgcgtcgcaatagtcaagagtgtaagtcgggacattcgctgacgcttcgttttcgaaaaggagagacactatggttgccattacatatggcgttgctacccgtgccgttgccgacaccgccacggccaacaagagcaagggctttttcacgatcgtattcgaggcgctcgccgcctcgcagatgaagcgggccgagcgcgaactcacacgctatcggcatttgctgccgcacgcgggcgacggcaacgaggatgagccgttcggcggctggtaatcgtaagcatttcaccagcaaagccgccccgctcatcgccgcccggggcgnttttgttttccgcttcgcagcaccagcgtgacccagccgtcgagcgggatgcgccgctcgagcgccaagccctgcgcgcggtagatcgccagcacggcattggcgtggcccggcagcaggccggataacacgatgcgcgcgcccggngcagcgagccggcgcannggnaccgccagccgcagcagcggccccagcagaatattggcgaagatcagatcgtagggcgcctgcgccgtgatggcgcgggcgttcgcgccggcggcgcgcacgaaggtgatcgccgcggctgcgcgattgagccgcgcattggcgcgcgcggcctcgaccgcgaccgggtcgatgtcgctggcggtgacgcgggcgcgcagaattttcgccgccgcgatcgccagcacgcccgacccggtgccgacgtcgagaatctttttatccatcctcctgcaagggggagggtggcgagcgaagcgagccgggtgggggtcattccttctttgtttgaccccaccccgatcctcgctccgccatagccgatgctttgcatcggcgttcttgcttccaaggacggcggccaaaggccgcctatgtcgaccctcccctttcaggggagggatagaaaaattacgctgccgcttggccaattcatccagcgccagcaggcagccgcgcgtggtgccgtggtggccggttccaaacgcaagcgccgcctcgatctcgatgccgatgtcgttgggcttgacgcnggcgcggtcgtgcgcgccatgcacgatgcagcggccggcgcgcaccggtttgagaccggcgaggctttgcttgacccaatcggccggcgcgaccggctcgatggtgagcgcggcngccgccgcttcgccggcggcgatcgcgaccagcgtgcgcagcacggcttcgtccggcttgtcgcggaaatgaaccgccacctgccattgcccgccatcgtcctcgaaagcggcgcaggcagtgccttcggagtcgaggctttcgccgagataggccgccagccggcgggcggtcggctggtcgcaggccaggcgggcgacggtggtggtcattccctgtcattgccgggcttgacccggcaatccatgaggccgcgccgcaacggcaatcttgcggtaggtcccccgaatgcggctactcatcatggatgcgcgggtcaagcccgcgcacgactgaggttggtgaaagccccggccatggttatgtagggccaatcatgaccatcgaaacgcccaacgctaccgacaccgaggcgctcgcgctggcccgccgnagcggctggccggaggatttgcgcgtgctgntcgcgcgctttccgcgcgagcaatggcagggtcatgccaatctcggcgagatggcgcggttctggctatcgcgccacgatatgtttcgcgagctcgccaccatgatccaagcgatcgaggcgcaattccgcgatggcgcgctgtcgccggcggaattcccgcgccagttcgtgccgcggctgcagttcctgctgtcgcagctcggcgtgcatcaccagatcgaggatctgcattattttccgatcttccgcgccgccgataagcggctggcgcgcggctttgatgtgctggagggcgatcaccatgccatccacgaggacatggcggcgaccgccgacaccgccaacgcgctgttgcgcgcgctatcgggcgatgccgacgtgctgcgccgttgcggcgatgcctatgcggcggcgagcggcgcgctgctcaaggggctgatccgccatctcgacgacgaggaagacctgatcgtgccgctcattctcgagcgcggcgaggccgcgctcggcgtcgcacatcacggatagagtggacaagggcgcagtcgcgcaatcaggatgtccaggtcgcgtcggtattatctcaagtcgcgcagctgccggtaaattcaacttaaccaagcaattattttgacgccggatcaccgggagttgtagtccgccaccaccttttgaatcacattttgaccgatgctgcgccgcgaggacggggctctcagggagtcttgcaatgaaaaaactactgattgctttcgtgatggctacgttcgtggcgtcgccggcgtttgcccagaaacgccacgcgatctcgccggaagcggcagcggcgcaagcttacgcgccaagtgatcctggc

SEQ ID NO: 892 - DNA, 4000 bp, Escherichia coli
  misc_feature (45)..(45): n is a, c, g, or t
  misc_feature (1988)..(1988): n is a, c, g, or t
  misc_feature (3333)..(3333): n is a, c, g, or t
ttgaaaaactccatcgcgttacaggttaacgtcccggttttatcngataaaacggtgtgtaccatcccgagttcctcgttcaagttactcgttcgtgcgctcatcggcgtgtccgtttcttcgtgatacatctttcggtcccgatttaacaaaaccatcgcttggaaaactttcacgaattccaacgagacgtataaagaaataggaatcaaatatccgtacaacacgtaggaggtaaagaatgcaaacacaccgacaatgtcggttttattcacgtcgaagggttcgtccgaattcgcggtatccaagtaccaatgctttggactttcgtttttcacccaccaggaacaataaattgcggaaatcgtggacatggagagcaacaaaatgagcatacctaaaacgacataatccatctgtttctccacgtgcgaccgtttcgatggcgtttccgacgcgttcatcataacttttgaatcgtgtccggtgtaaatgacaataccgtaaacgtattccgtgtttcttaactgcgaccctctcaacaaaacgttcgtcggcgtcacggctattttctttttttccgacacaaaaggcggtttcaactccaagttcccgctgaacgtgtataaagagttattcgggtgttcgcactcgaccgtgcataaattgccactcaagtgatcctctgcattcgccatcacgtcgtctcgttgagagttgcgacacaaattcgccagctttgcgtttgaaatcaccttgaccccatcgcccatatctacgctccttttcaacttcaagttcgtctcgccgtctaaattcttcgtttccacgtaacacgttctctcctcgttgctcgatccaatcatgatcaaatcgcacggaaaaaacgcatctcgtaccaccctcacgacgtcgccacacaccaaatctcgccactccttattctccatgcactctccgttaaaccgttcaatcggcgttcgattttgctcgttatcttgcttgtgcctcttataatcctccacggcttctttcgtcatgctcaacgtgatgataaacgtcagcggcacccacatcgtgtacggcttaatcggcgaaatgctctcgaaacacgaaatcgtcgccacggataaaaagtacaagttcgcgactctccgaaactgttcgtataaacctttgggaagaaacgtcaccacgttatacttcgacgtcgatatcgagttgctcttgaactttaacggcgcgttcgtctctcggtcagagctgattgaaaacacccgcgatatcggtttttcctgttcttttttaaacatcgacgtcgctcgttcgagaaccgaaggtgatttcgtcaaggatttgttccttttttgcagcttcgaattcgacgaagacgacgagaccgacggtctcgattccaacgcatttgccgggtcgacatccgtcgtcgtttgcgtcgttttatctctcgctttctctgcatcaccgctgctcattcttagtatcagatatcaaactctaaaaccaaagcgcgcttcgtttacgcgcgcgtgtgtgtatatccttcctccgaaatgcgttcgatttctgttgacctcgtcccgggacgatgatgacgatccgaaatcgcgaacggttttcgttcttcacgaacaaaaacactcggcaaagtttctcccgaaaatcctccctcgatgtatccttttcgtcggggtcgttctctcgcaaagaagacaaagaagacaaagagaacgtctccttctcctctttaatcaacacgagaggaagaatagaattttgacgttttttggactgcaggctggcaatttacgtgaaatttgtgagatttcaaatgtgtgttgagatatataatacgctttcgcgcgcggacgagacgtgtctgtcgttttatgcatcacaacggtttgcctatatgtatatatacgcttacggcttactgtagtgattacaactttttttttttaaatatntagatttttatctcctcacgcggtgggtgcgttttgaaacggcaaaccttcggcgtcgacgcactcgtacgccttgtcgtcgacggggactttgtcttcgctgccgacgatacacaccgtcatcggtttgttcaggaggtactcctgcgcgactctggtcatgtcttccgctgtgcaatcgagcagacgcgtgcggaagttttgacgttgggcgtcggtcattctctgcgcgtataaggattggccgcgagaggctggggcgatcggcgagtcgatggatttgaacgcgcgcaaatgcgcctcttcgaccatggttttcgtgattgagctcggttgagcggcccattcgcaggctttttggaacgtttcgatagtttcgagcgtgttcgggtcgcggtaggaggaaaaatagaagatgccggcagacgggacgaacgaggaaccgccgccgtaagcgccgcctttctcgcgaatctctcggtggaggaattccgtgctcatggcttgcgagaggaggaagagcgccggggcgtccggatgttcgtacccgacggtttcgatcgcgccggtgcagtagttggtttgacctttgatggcgacgtaggttttcgacgcggattgcggggtaaacgcggccaatttcgcgttcaacgacgatccatccgaggaagaaggtttacttcccgtggacggcaacgccgacaaccatttcgccaactgcgctttgccagcttccacgtcttgcgcttgagacgcgacgcggcatctcttcacgttctctggcgtcaagagtaaactttgaatttcagagcacgcggctttgacttcttccacgcctgcttgttcggctttcgctaagcgttgcgccaatgcaacctgtggaagaccgccggtgcggttttcgagttcacccgcggcggacattttggacgcacacacggctttaccgtaccccatgccgttttgcgcgacggacgcgcctagctgcgcggaccgacgtttgatcaagaacttcaatcgttcgtcgtcgccgaaccatttcgcatccgtgcagacgtccaacaagatgtcgcccatagcgtcggcgttacgcgctaaacagtgagatccgatgttcatggcaacttcgccgttctcggtccatttcaacggcatattcgtgtcattgttactgagaacatcgatggatacgccaccgctgacgcctttgattttctccgcgaagtctttgtacccaactttcgatgtgccgatttggtccacgtaatccgcgaaatagtccaagtacggcgtcaatctgtccggtaattgagagcaatcaaacatggcgccgacgtagaccacnccattcgtcggttgctcgtccacttgtaacttcaagtcgatgttgttcgagttcaatcgtaacttttcctctttcgatccccactttttgatcgatcggtccaccgcttcagcgacttttaacgtcggcaacagctcggcgttttgttcgccgtcttgcgcggctttcaatttaacgccgtcctcgacaattttcttcttttcgtcttcggaaagtttagattctaattctttcaacaacgcgttctcggcttcttccaatttggcgtcgtacttttcgtccgatcgcgcacgaacgataactttgtgttggttattcaaaaagtacttcgagattaagttttgccaatactgaggatcggaatccaatttctcttgcaattgcctcgcgagcgagagtgttctcagcggtctcaaagcgtcgccgtcgtgcacccacgtggacatggtcccgatgccaaccattaaaccaaagtttggcttcacagctgcggcgtctaattcgatttggtgcaacgtcgagtcgacccggtttctcggaaacccggatttcgcgacactttccaacgtttcttgaatcttttgttcgacgattggaatctcctcttccccgacgcctttcacgccaaccgagaaggaggtttctcttctcgagttgccgtagccgc

SEQ ID NO: 893 - DNA, 4000 bp, Escherichia coli
  misc_feature (463)..(463): n is a, c, g, or t
  misc_feature (1228)..(1228): n is a, c, g, or t
  misc_feature (3433)..(3433): n is a, c, g, or t
  misc_feature (3690)..(3690): n is a, c, g, or t
atatatagccctgatgaccattcttggtatttccgccattgaccttgtattagcagtaagtgttgtggcccttggtgctgccattcaggcagctgtaggtttcggtctggcattgatcgccgcaccagcgctgctgctcataaacagggatctggtgcctggaccactgatagcggcagcactgtacctggtctgctgggttgcatggaaagaacgccagtccattgattacagtcacctcaaagcggccctgatggggcgattgattggatcgcccccagcagcttatttaatggggactgtttccgcggttacctttgatttgctttttggtgggcttgtcctgatagctgttattctgagcctgattcataccaatatcacagccagttcccgtaatgtattcctggccacgattgcatcagggttcatgagtaccatttcatccataggtgggcctccngtggcacttgtgtaccaaaatgccagtggaccagctctgagagctaacctgtcagtactgttcattatgggctgtgttgtgtctttatctgccttgataatagtggaccgtttccatcttgaggacctgctgtacagttttttactttttattggtgtttttgtgggaatgtcctgttcaggtccattgacaagaattatggataaacgcagcgccagaccatggcttttgggcttgtgcactttctcctcactgctggttctggggcgggcggtatatcagctaatttaggattcagacttcttccgttgattcctcaacaactggtacagggatgtcataaggcatctccatactcaataaacctagctttcctgccctgaggtcatttaacagggcttcgccggtcttgttaaaatctataccaccacgcttgagacagcctcgtttacggcctatttcttcaagcagaaatactggatcctgattcaaatcatcaagctggtaacgctttaccagtgcagcggggtaggcacggcaaagaaagttaacggcatagagggcaatatcctcaaattctatggccgtgttcctgattgccccggtcatggccaggcggtaagcagagtcctgattttcaattttcggccaaagtattccgggtgtatcgagcaaacagagatccgtatcaagtctgatttcctgctgccccttggtgacagcgggttcattgcctgttttggcgattttgcgaccggccagganattgatcaatgtagacttgccgacgttcgggatacccgcaaccatgatcctgaatggtggctttacggacgatttgagtttgttgaaatgctgtactacctgctgctgtatatggcctggattcttaccgcaggcagtgatcgcgggtctgttttctgccgtaaaataatcaagccaatggctggttttgtcgggatcagccaggtctgatttgttgagaataagcagtgaaggtttatctccggccagttcctgcagtagcggattctgactcgaatagggaaggcgggcatccacaatttccaggatggcatgtaccttctttaaagactgtataatctctttccgggccttgttcatgtgacccgggtaccaaccgatctgcatagtggtctccatgtgtgcagaccgcatattgtcgcagaatatgagccaaaaaggagcctacacaccccgtgagtacagaaaataccatacacagcaagctgaatgcttcatgccatcccgaccatttggaacttgttaatgaaagtcacatgcatgcagggccggccacagattcccatttcaaactggtgatggtatccacggattttgaagggcttaacagagtgaaaaggcatcaactggtatataggatattgtctgaggaactggcaggaaacgttcatgcactggcgctgcatctgtataccccgcaggagtgggcagaaagacactctgtgcctgactcccctcaatgtgcaggaaaaaatgtttaaaaacaataagatagggttaatcggaaagtttcctggggcacgtttaagctctgtaaagttacagaatatgactgaaatactgtgctaccattttaacaaaacaggaaaaactgcttgaacatgaatatatcctggacaccacgcaaggctgcaacagcctattgccttatcattcttggcttcttccttggcttcttcatacccctgatttttttggtcgaggaggagaaagattctgatcttactcaggatgatctcgttacgcttcccgaggaggtccctgattttgccagtatcgaagatgtaaggctcaagaagcagatgttctttgattacattgaaccctatgttgatgcggtgaataaagacatcattcgacaaagggagcgtgtgcttatgataagaagtgccttgcgtgccggggaagcattgactgacagtgatcaccggtatatttccactcttgctgaacagtacgaactggaggccgaggattacaccagtagtgagtttatcaatgtactcctaaggcgcgttgataaaattcctgcgtcactggctcttgcccaggctgcaaatgagtcagcctggggaacttcccgatttgcccaggacggtaataatttctttggtcagtggtgttacaccgatggatgcggcatcgtgccaagtcggcgcagggaaggcaccagtcatgaagtcaggcggtatgaaaatgtcagggattccgttgaggcctacattcacaacctcaatacttttcccagttaccagatgttgagaagaatcaggcagcaattacgccgtcaggaacgcccggtggatggcatatcccttgctgatggactcgaaagttattcttcccgtgggcatgactacatcgatgaagttcagcgcatgatcttctcaaacaatcttctgacccgcgataaccacgcgctctagactttactcgggtatatccggattcacccagggaattgaataccagaaataccggccttcctgacccggtgcagtacagttataacgaaagcgcctggaacggttattaatatgagtgcttaccttatatctattctcagcattgttaagtacttctatctcgatcctttcattgttgttaaaacaggataatccacgcagtcccgcttgatcagcgacaaaatctagttcagccgttggactcgattcacgggtaacaggtgtgacaggcaggacttcatccagtgaaaaggcaaggctcatgaccttggtgggaaaagagttcatggacgcatagatcccggaaaagggaaagcggggcaaggctgtgaaatccgaagttgcattgaccggacctgaatgctgtccaatccctgtgaagcctagttcactgacaagttgttgaatagccgggttatattcaccatagggataggccactattttgtgtccctggccngttttttccagaattgtggcctctgcctgcagtatttcaatcctcacaccctccagccactgctgctctgattggccatctggatgctcaaggagataggggtgtgaaaccgtgtgattggcgatcgtagcgccattgctggccatgatctgtatctcttcccatgttgagtagagcgaatcgttggtgctcacaaggcccgtagtgacaaaaacggtgaacggccagcctttttcctgtaacagggggtaggcganctcatatacggaggtatagccatcatcgaaggtgatcacggccgttttgtccggcagtaatggcccgtttttcaggcgatgcaggacagtctcaaggggtaaaatggtgaatccgttttcgtcaagataatccatgtgtgccgtaaaagattccttgctcagactcgttacagggggactgtctgtgctgacgtgatgatactggaggattactgcctggttatctgactgggtataccccacaactgtggtggacagcaggataaacatggtcaggattcgggttcgtatcaagggtcccatggaagct

SEQ ID NO: 894 - DNA, 4000 bp, Escherichia coli
ttgacggaggaaatgaaaggtacggcaaccaatcacaaaatacttctcatgtcctcgcctgggtaagaaccgtggggtcaacagttgccgattctcgattctatctcgatggattcgaacaggcatcgacctcggacagcaacggggcaagcttcccctcaagtgtcacaagcctctatgtcctcggagccaactccgcaggaacgggcaactttttccatggatctattggggaacttattgttctcaactctgattcctccacggaccgaaccgctctcgaagaataccttaccagtaaatggggcttgggtgatcgccactacgcagacctatccggtgggaaccgtaggctcgtttacagcggggaggaaaacaccggggacgccaagtttggcccttctctgaaatttaatggtcttggtgatttcgctcgtataccggtggttgcacccgattccgctccttttgaattggaggacataacgcgcccagaacttcttcatggctggtggccaatggacgggaacgggactgaccgatcaggctacgagagagacggttctctctccgcaaatgccaatttcactacgggtcgttttggcaaggctctggatctgtcttcgggcggcagcttcatcgtcccacaagtctctggtggtggaatcctcggaaaccaagcacgcacggtgtcatgctgggtaaagacaaactccctgaatgtccccatagtacagtggggtttgtccaacacagatggaaaactttggaagataatgctcgacttcaacgaaggcccaggagggactttggcacttaacctaggcggatcatctgtcaccggcggactttaccccgtcaacgacggcaagtggagacatattgccgtcagcttgtcggataggatcgaaaatactcaggtcgcgactctctatgtggacggttacgaagataaccttttttacaccaattttaactccaacaccctaaacatagactcttcaccctctgacctcgttgtagggggtgaagactttgtcggatgggtggatgatctacgaatttattcaggggaactcaatgcaggcgaaatccttcgaatccaccaggagggctcccttgatgacctcaatctggttggtgctgacttcactctttcggtatggatcaagccagatgccctaccagatagtgaccagtttgaattcgctaccggtcgagcatactggagaaattggggtggggatgtgcgctttcaaaaatggccacaagacaaggttcacaacgatgttcccctgttcgatccaggaggggaaatgtttgatgaaattatacctgaacctgctgagctctatctttttgagggagcacttggcgacatgaccaaggttgtcggagcagacaactggggaagctggtccataggttcatcaggtggtttcctcgaagacgaagacccctctgatcatgccaaaattatgcgaatccctgcgggggacccagatggcgaacctgcctatgcaacagactaccaggattccttgagcaaagatccgctttatttcgcctcatcacttaacaccgaatattctggaagatggccccaaggtgctttcatggccagaggcatgttcaacatagacaaccaagtgcagccaggcttgtattacctctacgctggaggcggcggatggtcgactttctggatcgatcgcaatcaagatcaagaatgggaccgtaaggctgaaagatttgttcataatatcggaggctggggatgggacaggagtaaccaccgaagcttcgttttccttggtcatcaagtaccccttatcacccagcccggcatcgcagccgaccaaggtctcgccattggcccaaaccagtctatatcaacttggaaaagctacactcaggaaacagttcaatctttccgggaaaaagcttggaaactcgggcaatggcatcacattgcagccactttcgatcatgcgaaacataaactttcgacctttttggacgggcgactggtaggctccattaatttagattctgaagagattggtgatcaccgttggggagactggtacctcggaggccctggacctctgggaagtatgcagttttttgcgggaagtatggatgatctgcgaatttacgatgcagcactttctcctgttgaaatttacaaaattcacaacggaggtgaaggcgatcttggggtagctggttaccttgaagcccctgaggtcacctctctttcagaaatagatctaaccctctcgttctccaaatacggccaatcaactccggtttcaggacttactgctgccgaaataaacgccagcttaataaatgctgaacttatccctgaaacatttcaatcctcggatcagaatcacactttcaatttcagaattatttctgcctccggcaaaaaagtttctttcaaccttggtgcaggagctgccgaatggatgggtgaacctacccttgcggtcaatcgtgagattatgatcatgcccgaggtggcacacgctgaacaaatccttcactggtggtggctagatgaggggttgggtgccgagacttcagacagtattgatggatcggtggggaatttaaaaggagatgcatcttggtgggctgactccctctacggaactagcctaggcttcagatcggccggagaccttgcccttatcggctccctcgatgaaaatttcactgaggaccaattcagcttatctttttggttcaaacgggaagcagataccctctttcgctctcctcagcaggtagggaatgtaatgttgtccttgggcggtgcagatttggccagtctacaggtaggaactggcccttcaagtgtggaggtattcctcaattctgaaatttacactggtaaagtacagcttggaacaaatgtcaaagatggagagtggactcacctccttctttcctatgatgcagattcctctgacggttatgaattgaagctttaccttaacggcacctttgctgccgagtcaggagactttggcaactctttgatcaccactaacgattcttcatggattttaggtgcagactctaccttaggattggataccggaaggttttttgggctactcgatgatctcagaatctattctacagtactcaaggaaaatgatgctgaaaatctctataatcttggagtcagtgacctccaactaaccctcgaaccatacgaattggatgccactcaagaccctttgaagtcaaacgaagtggtggtcgacttcaggtttaaaaaatacggcgactttcttgacctcaatgaagtctcaatacccgatctcgacttttcgcttcctgcaccagatgattaccctgaagttttactttggctggatgggtctgatccttcgaatatggatcaatctaccaccttcggggcgtctggatctccttcggatggagatcctgttaagttttgggccgataaaagcggaatggaacaccatgctgttcatgttagcggtactgattccccgatttttcgctcaaacacatttgatggtgagctagcatgtgtcgagaccgataatgcccagttccagttatctaacagttccgaggacttcgatgccttaaataacctttctctttttctggtttatcggtggactggctccggtgacacatggaagagcatgatttggaagggctcaggttacggtcacaactttgttggtactttctgcgttgggaaaatgaatctcggtgcaaaccagggattaggagtttggtactacaatggtagcagcggcaaggtaaagcagcatggcaaccgacccagctatgctgatacctctgctcgaattttctctttggtatatgacagctcaacgggaattagttcgatttgggcagatggtatcctcgcatccactcacagcgttggctacaatcctctaccttccagttcaggtacgccggtgaagcttggtgacta

SEQ ID NO: 895 - DNA, 4000 bp, Escherichia coli
  misc_feature (73)..(73): n is a, c, g, or t
  misc_feature (1983)..(1983): n is a, c, g, or t
  misc_feature (1986)..(1986): n is a, c, g, or t
  misc_feature (2025)..(2025): n is a, c, g, or t
  misc_feature (2028)..(2028): n is a, c, g, or t
  misc_feature (2031)..(2031): n is a, c, g, or t
  misc_feature (2040)..(2040): n is a, c, g, or t
  misc_feature (2124)..(2124): n is a, c, g, or t
  misc_feature (2631)..(2631): n is a, c, g, or t
  misc_feature (2757)..(2757): n is a, c, g, or t
  misc_feature (2961)..(2961): n is a, c, g, or t
  misc_feature (2967)..(2967): n is a, c, g, or t
  misc_feature (3150)..(3151): n is a, c, g, or t
  misc_feature (3263)..(3263): n is a, c, g, or t
  misc_feature (3357)..(3357): n is a, c, g, or t
  misc_feature (3362)..(3362): n is a, c, g, or t
  misc_feature (3366)..(3366): n is a, c, g, or t
  misc_feature (3368)..(3368): n is a, c, g, or t
  misc_feature (3370)..(3370): n is a, c, g, or t
  misc_feature (3373)..(3374): n is a, c, g, or t
  misc_feature (3380)..(3380): n is a, c, g, or t
  misc_feature (3384)..(3385): n is a, c, g, or t
  misc_feature (3387)..(3387): n is a, c, g, or t
  misc_feature (3557)..(3557): n is a, c, g, or t
  misc_feature (3559)..(3559): n is a, c, g, or t
  misc_feature (3561)..(3563): n is a, c, g, or t
  misc_feature (3566)..(3568): n is a, c, g, or t
  misc_feature (3570)..(3570): n is a, c, g, or t
  misc_feature (3572)..(3572): n is a, c, g, or t
  misc_feature (3576)..(3576): n is a, c, g, or t
  misc_feature (3579)..(3581): n is a, c, g, or t
  misc_feature (3585)..(3586): n is a, c, g, or t
  misc_feature (3588)..(3590): n is a, c, g, or t
  misc_feature (3592)..(3592): n is a, c, g, or t
  misc_feature (3594)..(3595): n is a, c, g, or t
  misc_feature (3598)..(3598): n is a, c, g, or t
  misc_feature (3600)..(3603): n is a, c, g, or t
  misc_feature (3608)..(3608): n is a, c, g, or t
  misc_feature (3610)..(3618): n is a, c, g, or t
  misc_feature (3622)..(3622): n is a, c, g, or t
  misc_feature (3624)..(3625): n is a, c, g, or t
  misc_feature (3627)..(3628): n is a, c, g, or t
  misc_feature (3633)..(3634): n is a, c, g, or t
  misc_feature (3639)..(3640): n is a, c, g, or t
  misc_feature (3642)..(3642): n is a, c, g, or t
  misc_feature (3644)..(3644): n is a, c, g, or t
  misc_feature (3646)..(3651): n is a, c, g, or t
  misc_feature (3654)..(3655): n is a, c, g, or t
  misc_feature (3657)..(3658): n is a, c, g, or t
  misc_feature (3660)..(3661): n is a, c, g, or t
  misc_feature (3663)..(3665): n is a, c, g, or t
  misc_feature (3667)..(3667): n is a, c, g, or t
  misc_feature (3669)..(3669): n is a, c, g, or t
  misc_feature (3672)..(3676): n is a, c, g, or t
  misc_feature (3678)..(3683): n is a, c, g, or t
  misc_feature (3688)..(3688): n is a, c, g, or t
  misc_feature (3691)..(3695): n is a, c, g, or t
  misc_feature (3697)..(3699): n is a, c, g, or t
  misc_feature (3705)..(3705): n is a, c, g, or t
  misc_feature (3709)..(3718): n is a, c, g, or t
  misc_feature (3721)..(3721): n is a, c, g, or t
  misc_feature (3723)..(3727): n is a, c, g, or t
  misc_feature (3729)..(3731): n is a, c, g, or t
  misc_feature (3733)..(3733): n is a, c, g, or t
  misc_feature (3736)..(3737): n is a, c, g, or t
  misc_feature (3739)..(3739): n is a, c, g, or t
  misc_feature (3743)..(3745): n is a, c, g, or t
  misc_feature (3747)..(3748): n is a, c, g, or t
  misc_feature (3750)..(3750): n is a, c, g, or t
  misc_feature (3755)..(3755): n is a, c, g, or t
  misc_feature (3757)..(3762): n is a, c, g, or t
  misc_feature (3765)..(3765): n is a, c, g, or t
  misc_feature (3767)..(3769): n is a, c, g, or t
  misc_feature (3771)..(3772): n is a, c, g, or t
  misc_feature (3775)..(3781): n is a, c, g, or t
  misc_feature (3783)..(3783): n is a, c, g, or t
  misc_feature (3790)..(3794): n is a, c, g, or t
  misc_feature (3797)..(3797): n is a, c, g, or t
  misc_feature (3799)..(3799): n is a, c, g, or t
  misc_feature (3803)..(3803): n is a, c, g, or t
  misc_feature (3805)..(3805): n is a, c, g, or t
  misc_feature (3807)..(3807): n is a, c, g, or t
  misc_feature (3813)..(3814): n is a, c, g, or t
  misc_feature (3816)..(3817): n is a, c, g, or t
  misc_feature (3819)..(3823): n is a, c, g, or t
  misc_feature (3826)..(3827): n is a, c, g, or t
  misc_feature (3829)..(3835): n is a, c, g, or t
  misc_feature (3837)..(3839): n is a, c, g, or t
  misc_feature (3842)..(3844): n is a, c, g, or t
  misc_feature (3846)..(3854): n is a, c, g, or t
  misc_feature (3856)..(3856): n is a, c, g, or t
  misc_feature (3859)..(3859): n is a, c, g, or t
  misc_feature (3861)..(3863): n is a, c, g, or t
  misc_feature (3865)..(3865): n is a, c, g, or t
  misc_feature (3867)..(3871): n is a, c, g, or t
  misc_feature (3876)..(3876): n is a, c, g, or t
  misc_feature (3881)..(3881): n is a, c, g, or t
  misc_feature (3883)..(3885): n is a, c, g, or t
  misc_feature (3890)..(3890): n is a, c, g, or t
  misc_feature (3892)..(3892): n is a, c, g, or t
  misc_feature (3894)..(3895): n is a, c, g, or t
  misc_feature (3899)..(3899): n is a, c, g, or t
  misc_feature (3903)..(3903): n is a, c, g, or t
  misc_feature (3909)..(3910): n is a, c, g, or t
  misc_feature (3914)..(3917): n is a, c, g, or t
  misc_feature (3923)..(3925): n is a, c, g, or t
  misc_feature (3929)..(3938): n is a, c, g, or t
  misc_feature (3941)..(3944): n is a, c, g, or t
  misc_feature (3946)..(3946): n is a, c, g, or t
  misc_feature (3949)..(3950): n is a, c, g, or t
  misc_feature (3952)..(3953): n is a, c, g, or t
  misc_feature (3955)..(3957): n is a, c, g, or t
  misc_feature (3960)..(3961): n is a, c, g, or t
  misc_feature (3964)..(3979): n is a, c, g, or t
  misc_feature (3981)..(3989): n is a, c, g, or t
  misc_feature (3992)..(4000): n is a, c, g, or t
gtacgaaaaaattgatcttttaggtgaagttctagaaaaagtgcaagacgaatatgtcgatgaaatagatcangcagaagtaatggactttgcaattaatgggattctgcaatctttagatccgtactcagcttacatgaacccaaaaatttatgaagagatgcagactgaaacaagcggtgaattcggaggtttaggaatagaagtaagtatggaaggtggagttgttaaagtcatttcgccaatagatgatacgccagcagcaagagttggtgtaaaagctggagattatattgttagaataaatggtgaacaggttcaaggaaaaacacttatggaggctgtgaatttaatgagaggaccggtaggttcacctattgaaataacgataagaaggaaaggtttaaaaaaagcaaaaatttttacaatcattagagaaattattgaaataaaatcagtaatttctaagttaattgataatgaaataggctaccttagattaagagcctttaatgaaaacagtagcaatcaattaaaaggggaaatttcaaaattagaaaaaaacaataaattagtgggatatattcttgatttaagaaataatcccggaggtcttttgtcccaagctgttagaatttctgacttcttcctcgatgatggagaaattgtttctactagaggaagaaaaagtagagaaaatagaaaattttttgctaaaaaaggagaccgaattaagggtaaacctttaattgttttaatcaataatggatcagcgtcagctgctgaaattgtggcgggagccttacaagatcaaaaaagagcagtattattgggtgaagctacatatggtaaaggatcagttcaatccattattcctctaagaaataagggggcaatacgattaacaatatccaaatactatttaccatctggaaaatctatttcagaagtgggagtaactcctgatatcagagttgaggaggaagatgaagaattttcaatcaacactattacagataatcaattaaattacgcagttaaacttttcagtggctaaagtttaatgaagaatagaaaagaattaccattaagaattggtgtgggcatagctttattgaatcatgaaaataaggtttttgtaggaaaaagaatagataatcctacaaattcatggcaaatgccacaaggtggaattgatcaaaatgaaaattttttagacgcagctaaaagagaacttgaggaagaaactgggataaaatcagtaaaattaataaaagaattagatggatggtttaaatatgatttaccgaaatatcttctaggtaaactctggaaaggtaaatataggggacaaaaacaaaaatggttggttatgaaatttctaggaaaacccgatgaaataaatgtcaaaacgaaaaatccagaattctttgattggaaatggattgaactatcaaaattacctaacgtcgctgtgcactttaaagtagatatttataagaaaataaaagaagagttaacttctttaagtttgaattagactcgtatttctttgagcgcatcaagtttgtgattaagaacataacgatcatgatctgtaatattcttatctgtgagtttatcttgagtatcttcgtttagattatccacaaactctttagataaatcttttacatttattgcggaagctgaaagtaccactaaactatcattaaagaattccacagcaccatcctggacaaaaaattctttaaaatttccatcattttgcacctttattattccgggtcttaaaagagttattattgaaatatgattttttaatatgctcatatcaccctcatacgagggaagtgtaaccatttttgtttcatccgaaaaaataattttttctggactaatgatttcaagtttaaaactatcttccattaagctgctgcgtccttcgccattttttcagctttttcaactacctcttcaatngtncccaccatataaaaagcggcttcgggtaaatgatcatantcnccnttacatatngcatcaaaccctttgatggttgcttctaaatctacaagtttacctggagaacctgtaaaaacttctgcaacaaaaaatggttgngataaaaatctttgaatttttcttgctctcatcactgttagtttatcctcttcagaaagctcatccatacccaaaattgcaattatgtcttgtaaagatttataagtttgtaatattttttgaacttctcttgcaacgctataatgttcttcaccaactattctgggatctaaaattctagaagtagaatccaaagggtcaactgcaggatatatccctaactctgcaatttgccttgataaaactgtagtagcatccaaatgcgcgaatgaggtagctggagcagggtcagttaaatcatccgctggaacataaatagcttggacagaagtaattgaacccttatctgtagttgtgattctttcttgtaaatttcccatatcagtagctaaggttggttgataacctacggccgatggaattcttcctagtaaagccgacacctctgatcctgcttgagtaaatctaaatatattatcaataaaaaataaaacatcctgaccttcnttgtctctaaaatattcagcaactgttaaaccgctcaatccaactctaacacgtgctccgggtggctcgttcatttgtccataaaccaaagcaactttcgagccttttccatttaatttaataacnccagactcaatcatttcgtgatataaatcatttccttctctcgttctttcaccaacaccagcaaatactgaaaaaccaccgtgtgcctttgcaatattattaattaattccataataattacagttttgcccacacccgctcctccaaaaagacctatttttcctcccttagcgtaaggagccagtagatcgacaacttttatncccgtnactaatatttcagtttctgtcgattgctcagtgaattttggtgcaggtctatgtataggccatctttcttttgtagatatttttcctttttgatcaataggctctccaataacgtttattattctacccagtgtttctggcccaactggtactttaattggagaaccagtatcggtaactttnnttcctctctttaaaccctctgtactatccatagcaatagttctaacagtagcttctcccaaatgttgggcaacttctagtacaagtctatttccagagttatcacattctancgctgtcaaaatttccggcaactgaccttcaaattgaacatcaaccaccgctcctataacctgtgtaatttttcctaatcctttactcattttntaaantttncncnccnnatattntttnnanaagttctttggtaattgctgcttgtctacttctgttataattaattgtcaatttgtccactaaatcttcagcatttcgtgttgcattatccatagctgtcatcctagaaccttgttcacttgcagcattttcaagaaacgctttaaagatttgagtagaaatattttttngnannnaannntntnaaanttnnntttnntnnngntnnaantnnnnaaaantnnnnnnnnntttnanntnnttttnnttttnnantngnnnnnnttnntnntnntnnngnanttnnnnnannnnnnttttnaannnnntnnnaaaaantttnnnnnnnnnnaantnnnnntnnntnaannantttnnnannanttttncnnnnnnttncnnntnnttnnnnnnnanttttttnnnnnccntnaaantnantttttnnannannnnnttnncnnnnnnncnnnttnnntnnnnnnnnncnttngnnncnannnnnaaaanttttnannnttttncntnntttnaaantttttnnaaannnntttttnnntttnnnnnnnnnnttnnnntnaanncnncnnnaannccnnnnnnnnnnnnnnnnannnnnnnnnaannnnnnnnn

SEQ ID NO: 896 - DNA, 4000 bp, Escherichia coli
  misc_feature (443)..(443): n is a, c, g, or t
  misc_feature (446)..(446): n is a, c, g, or t
  misc_feature (1988)..(1988): n is a, c, g, or t
  misc_feature (1990)..(1990): n is a, c, g, or t
  misc_feature (2019)..(2019): n is a, c, g, or t
  misc_feature (2023)..(2023): n is a, c, g, or t
  misc_feature (2025)..(2025): n is a, c, g, or t
  misc_feature (2031)..(2033): n is a, c, g, or t
  misc_feature (2035)..(2040): n is a, c, g, or t
  misc_feature (2385)..(2387): n is a, c, g, or t
  misc_feature (2389)..(2391): n is a, c, g, or t
  misc_feature (2393)..(2401): n is a, c, g, or t
  misc_feature (2404)..(2406): n is a, c, g, or t
  misc_feature (2408)..(2409): n is a, c, g, or t
  misc_feature (2411)..(2411): n is a, c, g, or t
  misc_feature (2413)..(2417): n is a, c, g, or t
  misc_feature (2419)..(2419): n is a, c, g, or t
  misc_feature (2421)..(2421): n is a, c, g, or t
  misc_feature (2423)..(2424): n is a, c, g, or t
  misc_feature (2426)..(2428): n is a, c, g, or t
  misc_feature (2431)..(2432): n is a, c, g, or t
  misc_feature (2434)..(2435): n is a, c, g, or t
  misc_feature (2437)..(2448): n is a, c, g, or t
  misc_feature (2451)..(2455): n is a, c, g, or t
  misc_feature (2458)..(2459): n is a, c, g, or t
  misc_feature (2461)..(2462): n is a, c, g, or t
  misc_feature (2464)..(2468): n is a, c, g, or t
  misc_feature (2470)..(2476): n is a, c, g, or t
  misc_feature (2480)..(2481): n is a, c, g, or t
  misc_feature (2483)..(2483): n is a, c, g, or t
  misc_feature (2485)..(2485): n is a, c, g, or t
  misc_feature (2487)..(2490): n is a, c, g, or t
  misc_feature (2494)..(2497): n is a, c, g, or t
  misc_feature (2500)..(2503): n is a, c, g, or t
  misc_feature (2506)..(2506): n is a, c, g, or t
  misc_feature (2508)..(2508): n is a, c, g, or t
  misc_feature (2511)..(2514): n is a, c, g, or t
  misc_feature (2516)..(2536): n is a, c, g, or t
  misc_feature (2538)..(2541): n is a, c, g, or t
  misc_feature (2543)..(2545): n is a, c, g, or t
  misc_feature (2547)..(2549): n is a, c, g, or t
  misc_feature (2551)..(2559): n is a, c, g, or t
  misc_feature (2561)..(2561): n is a, c, g, or t
  misc_feature (2563)..(2575): n is a, c, g, or t
  misc_feature (2577)..(2581): n is a, c, g, or t
  misc_feature (2584)..(2584): n is a, c, g, or t
  misc_feature (2587)..(2591): n is a, c, g, or t
  misc_feature (2594)..(2597): n is a, c, g, or t
  misc_feature (2599)..(2604): n is a, c, g, or t
  misc_feature (2606)..(2609): n is a, c, g, or t
  misc_feature (2611)..(2614): n is a, c, g, or t
  misc_feature (2616)..(2619): n is a, c, g, or t
  misc_feature (2621)..(2627): n is a, c, g, or t
  misc_feature (2629)..(2637): n is a, c, g, or t
  misc_feature (2640)..(2641): n is a, c, g, or t
  misc_feature (2643)..(2645): n is a, c, g, or t
  misc_feature (2648)..(2649): n is a, c, g, or t
  misc_feature (2651)..(2652): n is a, c, g, or t
  misc_feature (2654)..(2655): n is a, c, g, or t
  misc_feature (2658)..(2660): n is a, c, g, or t
  misc_feature (2662)..(2663): n is a, c, g, or t
  misc_feature (2667)..(2667): n is a, c, g, or t
  misc_feature (2669)..(2671): n is a, c, g, or t
  misc_feature (2673)..(2673): n is a, c, g, or t
  misc_feature (2675)..(2679): n is a, c, g, or t
  misc_feature (2681)..(2683): n is a, c, g, or t
  misc_feature (2685)..(2688): n is a, c, g, or t
  misc_feature (2690)..(2690): n is a, c, g, or t
  misc_feature (2693)..(2696): n is a, c, g, or t
  misc_feature (2700)..(2702): n is a, c, g, or t
  misc_feature (2704)..(2704): n is a, c, g, or t
  misc_feature (2706)..(2709): n is a, c, g, or t
  misc_feature (2711)..(2716): n is a, c, g, or t
  misc_feature (2718)..(2718): n is a, c, g, or t
  misc_feature (2720)..(2732): n is a, c, g, or t
  misc_feature (2734)..(2738): n is a, c, g, or t
  misc_feature (2741)..(2746): n is a, c, g, or t
  misc_feature (2748)..(2748): n is a, c, g, or t
  misc_feature (2753)..(2756): n is a, c, g, or t
  misc_feature (2758)..(2758): n is a, c, g, or t
  misc_feature (2763)..(2763): n is a, c, g, or t
  misc_feature (2766)..(2771): n is a, c, g, or t
cccacatatctgaccctgctaattcctcttcttcgccaactcttaaaccaatcgttagtttaaggatgtaccagataattagcgatgatacgaatacaaatccgaagattgctccagtaccaactaactgtccattaagcgtggctgaagtatttaagataggaactaacattaatcctaaaatacctgctacgccgtgaacagagattgctcctactggatcatcgataccccatttctctaatagagacatggatactggaacgatcaatccaccgatagcaccatataaggctgccatttcgggagaaggagtaaaaggatcagcagtaataactactagtcccgctaatgcaccatttaatgtaacatttaatatagtcttctttaaccaaagcttggagagcaccattgcacttaataaacctgcagcggccgcagtnttngtattaacgaagatttgagcaactgcgttagcgttgtcaatacctaagatacttaactgagaaccaccgttaaatccaaaccaacccatccaaagaataagagtacctagtgcaacctgagttgaactagaaccatggataggcgtaggattgccctccatgtcgtacttacccttacgtgggccaatgagtagtacagctgctaaagctgcggcagctcctgccatgtgtacgattcctgaacctgcaaagtcaaagaaccctacctccgataaccatcctccgccccaagaccacgagccttggattgggtaaatcactgcagtaaagactgcggcgaaaactaagaatgaccatagtttcttacgttcagcaacagcacccgatacaactgacattgcagttgctacgaatactacttgaaagaagaagtctgacattaatgcgtggtcttctggagcgttccatccaccgtacattaactcataccctacaaacaagaaggtgagcgatgcaacactgtaaagtgctacgttttttataaggatctctgttacgttcttcgaacgaactgatccagcttctaacattgtaaaacctgctgccatccacattactaaaactgcggataccaggaagtacaatgtatttaaggcatagcctaattccatattattttcctattgtgccggctacactgatacctaaaaacccgcaattaagcggggtatttcagttactctaatccgttacttccttccattcggggttcccctatatactccgtccttggaaaaccatttgcggtagaacttagacatcctcttttgatattcttcttttgtcatataagtattataccataaaagatagatttgtcaaccactaaaactcttaggtgcctaggtatagatactctgtggaatctaaatatatcatcttctcctttgtgctatactctactgactcaatattattgtacacttcatactttatacacatcttaatagcaaatacccctgcgttcttaatcctagtagcatacttcgacaagtccccttgccttgctccttccatattgcagcttatcttacttacatggagctgcatatccgtaactagtttatccatcttctcgtactctttatccgttaggtcgtcccatacagcatctataaaagactctgctagtatgttttgaatgtctccaagtctgctccacctctcattccaacgttcagttgctgaattagacatgtttctatacccggcatcttggttactcctcctaatccagtatataggattagtttttccttttacccctccgccaggaactgctccccatcttgacataatagttccttattgtagttatatgagtatattatacctgattttgaaaatttgtcaataataatttttttgaagttgtgaaaagttgtgggaaattggggtagtctatctctgggctgggtacgttgataccgttatatacgcctttacggttcttggtttatttctaattgtttacgtgcgggngngcccagaggaaacgccactatttcggtcnaatnancccccnnntnnnnnnggggggtggggtagcctacccccgattatttccacatggtgaagccatctgaaatccaatatgccatagcgaaagcaagaacaacacaacctaataaaactaaaactgggactgggataaaaaccattttcttttccttttcttatttaatatatacatattataccacgaaaaacacacgatgcaacactttattttatttaatttaatttcacaaataggcttgacttctaagattatatctgtataatggtattcagaggttaagcaaagggcgaaacccaaaacaatataaggaaatactaatatgaatactactgttaagaactacacgaaagaacaagnnncnnnannnnnnnnngannncnnantnnnnncnananncnnnacnntnnannnnnnnnnnnntgnnnnnggnnanngnnnnnannnnnnnatcnntnancnnnnaacnnnnaannnntangntannnntnnnnnnnnnnnnnnnnnnnnnannnngnnngnnngnnnnnnnnnantnnnnnnnnnnnnnannnnncanttnnnnnttnnnntnnnnnntnnnntnnnngnnnnannnnnnnannnnnnnnntanngnnnatnntnnannatnnngnntaangnnnancnnnnncnnntnnnncntannnnatannnantnnnncnnnnnngnannnnnnnnnnnnncnnnnnccnnnnnncnaatgnnnntnattcncannnnnnaagcgccaaaatctatattagaatattataatataatgatattctaatatgcgccgattataccagaaagcaacagcgatgtcaaatttatttcgaaaataaatctatattagaatattattatattataatatgaaaaaactaatttcaatttaattgcaattaatgcttgactcggtggcttaatctgatataatagactcatacaaagaaagaaaggaattaaccctttttattgtatcaaggaatgaaaatgaaaaaagactattacttaattattgatactgaaactactatgagcgacaaggtggcggattttggtgcggttgttattgacagacaaggcaacatacagacacaatgtggcgtacttgtaaatggcgtatttggtattgacccactattttatattgctaatgagaaagaaaaatctctttggtcaaagcaaggcaaagacagaagatttaccaaatacaatgaaatgctagaaaatggctcaagaatgttagcctctgtaaacgctattaatttatggttggctaaggttgcggggcaatatgacccaattcttacagcgtataatttaccttttgaccttgacaaatgcaataagacgggaattgatttaacaatgtttactaattctttttgtatgtggcgtgtagcatttaataaatatgctatgacaaaatcatataagaatttcgcaatgcaatgccatgcgattaatcccccgacaaaattcggtaattgctcatttcaaaccaatgcggaaattatgaccaaatttgtaactaataatcctgaattggttgatgagcctcataccgctttggaagatattgtatattatgaacttctaatattgaaaaatatgctcaagaatatgacaaaatcagaattgctggaaaatgaccttggatttgattggcgaaaggtgcaattaaaagaccacttcaaagcggtttaaaataacaacaaatgggaatgataatgattctcatttggggcgccgattttaccacataatgcgggataatgcaaggaaaatatcatttatttattttcatttatttatgcaaattaacttgatttatgcttgacaaatcccccaattatgatataatactaccatacaaagaaagaaattaatctttctcaaatataaggaaatactaatatgactactattacagataaaaaaccaacatttactttaaacaaaaaat

SEQ ID NO: 897 - DNA, 4000 bp, Escherichia coli
  misc_feature (845)..(845): n is a, c, g, or t
  misc_feature (854)..(854): n is a, c, g, or t
  misc_feature (875)..(875): n is a, c, g, or t
  misc_feature (887)..(887): n is a, c, g, or t
  misc_feature (901)..(902): n is a, c, g, or t
aaagaatttttataagtaagtgatttgatcatggaaagcaaacacaaactatccatcaaccagtgggcgctggaagaccgtccccgggagaagatgatggagaaaggagcagccgcattgagtgatgccgaactactcgccatattaatcggctccggaaatacggaagaaagtgctgtcgaactgatgaggcgtttgcttctctcttgtgataacaatctgaactccttggcaaagtgggaagtctgcgactattcccgttttaaaggaatgggaccggcaaagagcatcactgtaatggctgccctggaactcggcaagcgacggaaactgcaaaatatccaagaacgcccccgcatctcttgttcaagagatatttatgacatcttccagcctgtcatgtgcgaccttgaacaggaagaattctgggtattattattgaatcaggcgacgagactgatcgataaggtacgtatcagcaccggcggaatagacggaacgtatacggatgtacgtaccattcttcgggaagcattgctgcagagagccacgcaaatagccgtagtgcataaccatccttcgggaaatatccaacccagccaaccggaccggacgctgacggaacacatccgccgggcagccgacacaatgaacattcgcctgatagaccacgttattgtttgtgaggataagttttacagttttgccgacgaagggctgctctgaataaatttattcttatctttgcaatacatattaataaggaaagccctatggaaaaatttaaaatagaagaaaagatcgtagccatgctaaagacggtgtacgatcctgagattccggtnaatgtatangatcttggactgatttataanatagacgtctcngacaatggggaagnngcgcttgatatgactctgactgctcccaactgtccggcagccgatttcatcatggaagatatccgccagaaagtagaatcggtggaaggagtgacatctgccactatcaaccttgtgttcgaaccggaatgggataaagatatgatgagtgaggaagcaaaactggaactcggattcctgtaaattcatagctcaaaatataaaactgataactctaaactcaaaactcatgaagaacgtttatttcctttccgatgcgcatcttggttcccgtgccatagaacatggacgtacacaggaacggcgcttggtgaacttcctcgacagtatcaagcataaagcttctgccgtttacctgttgggagatatgttcgatttttggtatgaattccggttagtggttcccaaaggatacacccgctttttaggaaagctctccgaactcacggatatgggagtggaggtacatttctttaccggcaaccatgatatctggtgtggggattatctttctaaagaatgcggagtgattattcatcgtgaagcattgactaccgaaatatacggaaaagagttttatctggctcacggtgacggactgggtgacccggacaagaagtttaagttgctgcgctggatgtttcacagtacaacacttcagacactgttttctgccatccatccccgttggagtgtggaattgggcttgacgtgggcaaaacatagccgcgaaaagcgggtggacggcaaagaaccggattacatgggggagaataaggaacatctggtactttatacaaaagaatatctgaagagtcatcctaatatcaacttcttcatttatggccatcgtcacattgaactggatttaatgttgagtgctacttcccgtgtgctgattcttggagactggattaactatttctcctatgcggtattcgatggggagaatctatttttggaagagtatatagaaggagaaacacaagtttgattcttattccattaaaaagtggaaattccgattgatataaggtttcttgaagatagatagaaaccggaaaaagtcaagaccacgtcttcagatttattctattcttatgaaatgaatctgaagacgtggtcttgatgtatttagttgcccaacttgaatactacagaggcgtatcctcccagtttcaaggtgtaactgtcgctgtctgtattttgttgagcttcgccattcacaaacaatactttctcaatcttgtctgtcagcggaagtagcatggccgttccgccgaaattatggatgacaagcagtttctcgttgtccttggtcatataccaggcggcaatcggcttatagtctttctcctgtgattcgttgtagacggaatgtttggtcatatttccttctgccagtgccggataggtgttgcgcaatcgggtgagggagaaatatatgttcagaagtgaatgggtatcggcttgttggtccgctaccgttttcacatttttcgaaacggtggcatccgtcttgtctgtgtagttggtagtgtagctatctccccatagcatcgggctgcgcacatattcgtctccgttatcctttgttccgtaaagtcccagttcttcaccgtaatagatgtaaggatgtccggcggaagtgagtaagacggcggcggccagtttgcatttgtcggcggatttacccaacttggacgatgtacggtcttcgtcatggttactcagtttcgttgcttcgatgtaatcgcttcgatagttggcgtatttctgttggtaagaaaggatgtctttggcaaaataacatccggtactattattgattccccattccagacgataccagaaggaaaattcaaaaagggcgggcagacctttataataaggagctactttatcgtattccgataacacttcgcctaccatatagaagtcgtccgtatgtcctttttgtttgtaataggcgttcatatcttcatagaacattttcaggaaacgaggattttcttcgctggtctcactgtggtagatgtgcttcacggcgtcgaggcggaggccgtccacaccacgggcgatccatcctttggcggcgtctgctattgcctgatatgccggtgattcgcctgcctggtctacagggccgtagttaaggtcggcaaaccagtcggtgcagaaatgagaatggaaataggtgatctgctggctgtcgaacatgatgttggcagggttgccggcgttggtcagtttgaaatccttgttcagcgcgagtttctcggacgaggaagaggcgccgtattttgttccggatggccaggaagaagcattgctggtacggatcagaagcccccaagtggactcaaagtcgacggtgagttcatagatgttgtttcctttgtcataaaactttttacagatgtcttctccgtagtataagtatttggcgttgtcggtacctgtgtctggattatcctcgtctgctttggtgcctgtggaaacgacaaggatgggggaagatgcgttgctccagtccagtgtaaatttcagcagtcctttcacggcagcggtctcgtcagaaacctgaaaccattctgcggcattgtatccggctgctccttcttgggtgatcatggcgattttgcctgctgcgatatctgttttcgggtcttcagagaaagaataataattgcgatacgggctttcggatgatgaactagcttcggtgaaccacgggtgggcagtgccggtgtggttcattacgtagtccagataaatcttgatgcctcggttgtgggcttctgtaaccagacggtcgaagtcgctttctgtgccgagctgcggattgactttggtgtagtctgtgacgtcatatccgtgataagacatacaggggtggatgggagagagccagagggctttcacgcctagttggttgagatagtccagcttttgggtgacgccattcaggtctccatatccgtctccgtcgctgtcggcgaaggaatagaccagtaactggtaggagatatctgcccgtttggtctcgtcccatgtgtcgggagaggcggtaagtgcggtccattgcccttcgatgg

SEQ ID NO: 898 - DNA, 4000 bp, Escherichia coli
  misc_feature (235)..(235): n is a, c, g, or t
  misc_feature (463)..(463): n is a, c, g, or t
  misc_feature (1985)..(1985): n is a, c, g, or t
  misc_feature (2153)..(2153): n is a, c, g, or t
  misc_feature (2476)..(2477): n is a, c, g, or t
  misc_feature (2504)..(2504): n is a, c, g, or t
  misc_feature (2600)..(2600): n is a, c, g, or t
  misc_feature (2604)..(2604): n is a, c, g, or t
  misc_feature (2610)..(2610): n is a, c, g, or t
  misc_feature (2612)..(2612): n is a, c, g, or t
  misc_feature (2627)..(2627): n is a, c, g, or t
  misc_feature (2641)..(2641): n is a, c, g, or t
  misc_feature (2643)..(2643): n is a, c, g, or t
  misc_feature (2645)..(2646): n is a, c, g, or t
  misc_feature (2652)..(2658): n is a, c, g, or t
  misc_feature (2660)..(2665): n is a, c, g, or t
  misc_feature (2667)..(2667): n is a, c, g, or t
  misc_feature (2675)..(2675): n is a, c, g, or t
  misc_feature (2677)..(2679): n is a, c, g, or t
  misc_feature (2681)..(2681): n is a, c, g, or t
  misc_feature (2683)..(2685): n is a, c, g, or t
  misc_feature (2687)..(2687): n is a, c, g, or t
  misc_feature (2689)..(2689): n is a, c, g, or t
  misc_feature (2692)..(2692): n is a, c, g, or t
  misc_feature (2694)..(2694): n is a, c, g, or t
  misc_feature (2697)..(2698): n is a, c, g, or t
  misc_feature (2700)..(2709): n is a, c, g, or t
  misc_feature (2712)..(2718): n is a, c, g, or t
  misc_feature (2720)..(2720): n is a, c, g, or t
  misc_feature (2722)..(2724): n is a, c, g, or t
  misc_feature (2727)..(2729): n is a, c, g, or t
  misc_feature (2732)..(2737): n is a, c, g, or t
  misc_feature (2741)..(2742): n is a, c, g, or t
  misc_feature (2748)..(2750): n is a, c, g, or t
  misc_feature (2752)..(2752): n is a, c, g, or t
  misc_feature (2757)..(2760): n is a, c, g, or t
  misc_feature (2762)..(2762): n is a, c, g, or t
  misc_feature (2764)..(2764): n is a, c, g, or t
  misc_feature (2766)..(2766): n is a, c, g, or t
  misc_feature (2768)..(2769): n is a, c, g, or t
  misc_feature (2771)..(2775): n is a, c, g, or t
  misc_feature (2777)..(2781): n is a, c, g, or t
  misc_feature (2785)..(2786): n is a, c, g, or t
  misc_feature (2789)..(2789): n is a, c, g, or t
  misc_feature (2791)..(2794): n is a, c, g, or t
  misc_feature (2796)..(2796): n is a, c, g, or t
  misc_feature (2798)..(2799): n is a, c, g, or t
  misc_feature (2802)..(2805): n is a, c, g, or t
  misc_feature (2807)..(2809): n is a, c, g, or t
  misc_feature (2812)..(2818): n is a, c, g, or t
  misc_feature (2822)..(2830): n is a, c, g, or t
  misc_feature (2838)..(2842): n is a, c, g, or t
  misc_feature (2844)..(2844): n is a, c, g, or t
  misc_feature (2846)..(2849): n is a, c, g, or t
  misc_feature (2852)..(2861): n is a, c, g, or t
  misc_feature (2867)..(2874): n is a, c, g, or t
  misc_feature (2876)..(2877): n is a, c, g, or t
  misc_feature (2882)..(2888): n is a, c, g, or t
  misc_feature (2890)..(2891): n is a, c, g, or t
  misc_feature (2893)..(2893): n is a, c, g, or t
  misc_feature (2895)..(2896): n is a, c, g, or t
  misc_feature (2899)..(2900): n is a, c, g, or t
  misc_feature (2902)..(2905): n is a, c, g, or t
  misc_feature (2909)..(2916): n is a, c, g, or t
  misc_feature (2918)..(2921): n is a, c, g, or t
  misc_feature (2923)..(2925): n is a, c, g, or t
  misc_feature (2927)..(2934): n is a, c, g, or t
  misc_feature (2936)..(2938): n is a, c, g, or t
  misc_feature (2940)..(2940): n is a, c, g, or t
  misc_feature (2942)..(2948): n is a, c, g, or t
  misc_feature (2951)..(2952): n is a, c, g, or t
  misc_feature (2954)..(2954): n is a, c, g, or t
  misc_feature (2956)..(2957): n is a, c, g, or t
  misc_feature (2959)..(2960): n is a, c, g, or t
  misc_feature (2962)..(2962): n is a, c, g, or t
  misc_feature (2966)..(2966): n is a, c, g, or t
  misc_feature (2968)..(2973): n is a, c, g, or t
  misc_feature (2976)..(2979): n is a, c, g, or t
  misc_feature (2981)..(2982): n is a, c, g, or t
  misc_feature (2985)..(2985): n is a, c, g, or t
  misc_feature (2987)..(2991): n is a, c, g, or t
  misc_feature (2993)..(2993): n is a, c, g, or t
  misc_feature (2995)..(2995): n is a, c, g, or t
  misc_feature (2999)..(3001): n is a, c, g, or t
  misc_feature (3004)..(3004): n is a, c, g, or t
  misc_feature (3006)..(3010): n is a, c, g, or t
  misc_feature (3012)..(3012): n is a, c, g, or t
  misc_feature (3016)..(3019): n is a, c, g, or t
  misc_feature (3021)..(3024): n is a, c, g, or t
  misc_feature (3026)..(3027): n is a, c, g, or t
  misc_feature (3029)..(3040): n is a, c, g, or t
  misc_feature (3044)..(3045): n is a, c, g, or t
  misc_feature (3048)..(3049): n is a, c, g, or t
  misc_feature (3052)..(3054): n is a, c, g, or t
  misc_feature (3056)..(3058): n is a, c, g, or t
  misc_feature (3061)..(3065): n is a, c, g, or t
  misc_feature (3067)..(3068): n is a, c, g, or t
  misc_feature (3070)..(3072): n is a, c, g, or t
  misc_feature (3074)..(3074): n is a, c, g, or t
  misc_feature (3076)..(3076): n is a, c, g, or t
  misc_feature (3080)..(3086): n is a, c, g, or t
  misc_feature (3088)..(3090): n is a, c, g, or t
  misc_feature (3093)..(3096): n is a, c, g, or t
  misc_feature (3098)..(3100): n is a, c, g, or t
  misc_feature (3104)..(3106): n is a, c, g, or t
  misc_feature (3110)..(3119): n is a, c, g, or t
  misc_feature (3121)..(3122): n is a, c, g, or t
  misc_feature (3124)..(3127): n is a, c, g, or t
  misc_feature (3129)..(3129): n is a, c, g, or t
  misc_feature (3131)..(3133): n is a, c, g, or t
  misc_feature (3135)..(3137): n is a, c, g, or t
  misc_feature (3139)..(3141): n is a, c, g, or t
  misc_feature (3146)..(3151): n is a, c, g, or t
  misc_feature (3153)..(3155): n is a, c, g, or t
  misc_feature (3158)..(3165): n is a, c, g, or t
  misc_feature (3167)..(3169): n is a, c, g, or t
  misc_feature (3172)..(3172): n is a, c, g, or t
  misc_feature (3174)..(3174): n is a, c, g, or t
  misc_feature (3176)..(3176): n is a, c, g, or t
  misc_feature (3178)..(3179): n is a, c, g, or t
  misc_feature (3182)..(3182): n is a, c, g, or t
  misc_feature (3184)..(3184): n is a, c, g, or t
  misc_feature (3186)..(3195): n is a, c, g, or t
  misc_feature (3197)..(3199): n is a, c, g, or t
  misc_feature (3201)..(3202): n is a, c, g, or t
  misc_feature (3204)..(3207): n is a, c, g, or t
  misc_feature (3209)..(3210): n is a, c, g, or t
  misc_feature (3212)..(3212): n is a, c, g, or t
  misc_feature (3215)..(3218): n is a, c, g, or t
  misc_feature (3221)..(3222): n is a, c, g, or t
  misc_feature (3224)..(3224): n is a, c, g, or t
  misc_feature (3226)..(3226): n is a, c, g, or t
  misc_feature (3229)..(3230): n is a, c, g, or t
  misc_feature (3233)..(3239): n is a, c, g, or t
  misc_feature (3241)..(3242): n is a, c, g, or t
  misc_feature (3280)..(3280): n is a, c, g, or t
  misc_feature (3285)..(3285): n is a, c, g, or t
  misc_feature (3345)..(3345): n is a, c, g, or t
  misc_feature (3421)..(3421): n is a, c, g, or t
  misc_feature (3495)..(3495): n is a, c, g, or t
  misc_feature (3507)..(3507): n is a, c, g, or t
  misc_feature (3529)..(3532): n is a, c, g, or t
  misc_feature (3534)..(3534): n is a, c, g, or t
  misc_feature (3537)..(3549): n is a, c, g, or t
  misc_feature (3556)..(3559): n is a, c, g, or t
  misc_feature (3561)..(3564): n is a, c, g, or t
  misc_feature (3566)..(3566): n is a, c, g, or t
  misc_feature (3569)..(3569): n is a, c, g, or t
  misc_feature (3571)..(3572): n is a, c, g, or t
  misc_feature (3574)..(3574): n is a, c, g, or t
  misc_feature (3576)..(3577): n is a, c, g, or t
  misc_feature (3581)..(3585): n is a, c, g, or t
  misc_feature (3587)..(3592): n is a, c, g, or t
  misc_feature (3594)..(3596): n is a, c, g, or t
  misc_feature (3599)..(3603): n is a, c, g, or t
  misc_feature (3605)..(3609): n is a, c, g, or t
  misc_feature (3611)..(3612): n is a, c, g, or t
  misc_feature (3614)..(3617): n is a, c, g, or t
  misc_feature (3619)..(3620): n is a, c, g, or t
  misc_feature (3622)..(3622): n is a, c, g, or t
  misc_feature (3624)..(3630): n is a, c, g, or t
  misc_feature (3632)..(3632): n is a, c, g, or t
  misc_feature (3639)..(3640): n is a, c, g, or t
  misc_feature (3643)..(3644): n is a, c, g, or t
  misc_feature (3648)..(3648): n is a, c, g, or t
  misc_feature (3653)..(3654): n is a, c, g, or t
  misc_feature (3656)..(3658): n is a, c, g, or t
  misc_feature (3660)..(3664): n is a, c, g, or t
  misc_feature (3666)..(3667): n is a, c, g, or t
  misc_feature (3669)..(3683): n is a, c, g, or t
  misc_feature (3685)..(3686): n is a, c, g, or t
  misc_feature (3688)..(3689): n is a, c, g, or t
  misc_feature (3691)..(3691): n is a, c, g, or t
  misc_feature (3693)..(3693): n is a, c, g, or t
  misc_feature (3695)..(3695): n is a, c, g, or t
  misc_feature (3698)..(3700): n is a, c, g, or t
  misc_feature (3702)..(3703): n is a, c, g, or t
  misc_feature (3705)..(3705): n is a, c, g, or t
  misc_feature (3707)..(3712): n is a, c, g, or t
  misc_feature (3714)..(3714): n is a, c, g, or t
  misc_feature (3717)..(3720): n is a, c, g, or t
  misc_feature (3722)..(3723): n is a, c, g, or t
  misc_feature (3725)..(3726): n is a, c, g, or t
  misc_feature (3728)..(3729): n is a, c, g, or t
  misc_feature (3738)..(3740): n is a, c, g, or t
  misc_feature (3742)..(3745): n is a, c, g, or t
  misc_feature (3747)..(3753): n is a, c, g, or t
  misc_feature (3755)..(3761): n is a, c, g, or t
  misc_feature (3766)..(3766): n is a, c, g, or t
  misc_feature (3768)..(3768): n is a, c, g, or t
  misc_feature (3770)..(3771): n is a, c, g, or t
  misc_feature (3773)..(3775): n is a, c, g, or t
  misc_feature (3778)..(3780): n is a, c, g, or t
  misc_feature (3782)..(3782): n is a, c, g, or t
  misc_feature (3785)..(3787): n is a, c, g, or t
  misc_feature (3790)..(3790): n is a, c, g, or t
  misc_feature (3792)..(3796): n is a, c, g, or t
  misc_feature (3798)..(3798): n is a, c, g, or t
  misc_feature (3800)..(3800): n is a, c, g, or t
  misc_feature (3802)..(3806): n is a, c, g, or t
  misc_feature (3808)..(3809): n is a, c, g, or t
  misc_feature (3812)..(3813): n is a, c, g, or t
  misc_feature (3816)..(3818): n is a, c, g, or t
  misc_feature (3823)..(3825): n is a, c, g, or t
  misc_feature (3827)..(3827): n is a, c, g, or t
  misc_feature (3829)..(3832): n is a, c, g, or t
  misc_feature (3835)..(3851): n is a, c, g, or t
  misc_feature (3853)..(3859): n is a, c, g, or t
  misc_feature (3861)..(3866): n is a, c, g, or t
  misc_feature (3868)..(3869): n is a, c, g, or t
  misc_feature (3872)..(3873): n is a, c, g, or t
  misc_feature (3876)..(3886): n is a, c, g, or t
  misc_feature (3888)..(3888): n is a, c, g, or t
  misc_feature (3890)..(3894): n is a, c, g, or t
  misc_feature (3896)..(3896): n is a, c, g, or t
  misc_feature (3898)..(3898): n is a, c, g, or t
  misc_feature (3900)..(3900): n is a, c, g, or t
  misc_feature (3903)..(3909): n is a, c, g, or t
  misc_feature (3912)..(3914): n is a, c, g, or t
  misc_feature (3920)..(3923): n is a, c, g, or t
  misc_feature (3926)..(3926): n is a, c, g, or t
  misc_feature (3928)..(3929): n is a, c, g, or t
  misc_feature (3931)..(3931): n is a, c, g, or t
  misc_feature (3933)..(3942): n is a, c, g, or t
  misc_feature (3944)..(3944): n is a, c, g, or t
  misc_feature (3946)..(3947): n is a, c, g, or t
  misc_feature (3949)..(3949): n is a, c, g, or t
  misc_feature (3955)..(3956): n is a, c, g, or t
  misc_feature (3961)..(3964): n is a, c, g, or t
  misc_feature (3967)..(3982): n is a, c, g, or t
  misc_feature (3984)..(3985): n is a, c, g, or t
  misc_feature (3987)..(3998): n is a, c, g, or t
  misc_feature (4000)..(4000): n is a, c, g, or t
atcaactagaattgagcccgtgtattttgaactattttggtaggtatcattagcgattaagcgaatatttttataaatatcttttaagttacccgcaatcgtaatttcctcgaccggatgaacaatctttccattttcaacccaaaaacctgatgcaccgcgggaataatcaccagtaaccatattggtgccatgccctaaaatatcagtaacgagaagaccggttcccattttnatcaataaatctttaaaattaatattagaagatttaatgagtaaattatgtgctcctcctgcattgccagttgagaccaggttgagtttattcgccgtatacgttgataaaaaataaccattcaatatgccttgatcaacaactactcgctctttcacttttacaccatcatcatcaaaatacgtacttgcattacctctctttaaaaaaggattctcaatgatcgtnaattgcggagaagcaataactttgccaattgcgttgagcaaaaaagaattttggcgatacaagttgccgcctgatacagctgataccaaagtagctatcagtgatgttgcaattggtgcttcaaaaatgacagggtaacgtcccgtttttattttttttggatgtaatttactcacagcacgctgagcagtctctttccccagatctaaatgattttttaaatcagaaaaatttcttgccgtcgtgtagatactgtctcgttgcatttgctcatcgtcatttgcaatcactgagcaacttaatgttacccgcgaggatgggaagcctccgataaaatcatggctgtttgcataaataaaatttgcctcagaatttgaaaactgcacaccctctgaattctttatcttagcattaaactgtaaggcttcagcttcggtcgctaaagcatggtcaatcataaatctttcggtaagatcaaatggaaagtaaacttccaattcatgactctcattcgctaaaagttttttatcagcaagcccataacctttgtcttcttgcgtatatttagcaatttgacatgcggataaaacacaatcttcaatggcttttagactaaaatctgagcttgttaccaatcctcttttttttccaaaatagaccgacagcgtaagacttttatcattgttcacttcaattgtttccagttcagaaagtcttactgtaatgctctttccttgagcaatactgacttctacttcagcttccgttgctccattagcctgggctttttcaagcgcaaaagaagctaaatcgataaggttttgatttttctgtctcgttattttcaattgatgaaagtttaaattgtaaaactgatatgatacaggtgaattaaaaataaaaattgtctatgagtaacaatcagcaagaagaaataagcaagacccagctaaaaaaacaatccaaagatattaccagctttggccaagcgataacgctactcaatcaaaaccaattagagcagcttaatttacccagtgatatcaataatgccattgaagactacaaaaaaataaaatctttaagtgcaaaaaaaaggcaattactttttataggcaggttattaaggtcaacagatttgcatgaggcatttattcaatacgaagcgataaaaaaccattcacaacttgcaaatcagcagtttcatttagtcgagcaatggcgcgataaattaattcaatcccccgatgccattactgaatttattaatcaatttccaaaaactgacgtgcagcagttacgttcgctaataaagaactcaatcaatgaaattgaaaaaaataaaccattaaaatcatcacggagcttatttaaaattattcaatccattttaaataattaaatatccaccattactgttttttcttcacctgcgcgcaaaaatgaaacttttattttttttcctttgtttttttggataattttaataaactcactggggtcatttaccttctcatcgttnactgcagtaatactgtccttccgcataattccagccactgctgcaggcgagtctttaatgactgcaataatttgaatgccaggattttgttcatcagtattttgattggtaagtttaatgaagtgtgtaccaaaagtaggttttggtaatttcacccaatagcttgcntaaaattcgtacatggcattgggatcagccaaatctttttcatcgataatgatttcggtggtgttgccatctttatccaattgttgggttaaaatactttcacgcgctctttttattgcggtggcacgagtattttcattaagctgtctatcataaatcagtaccatatctgcctgaatggcttgaccatgagtcaaggccaactctggaggaagatttttactggtaaatccagtaaagcccattaaatcatatccatcctctagcatttttatgttatcagtttcttttgcccagccccgcataatttttgtatcaggcgnntctgcaaaagacttaaaacctttaggnctttgtgtttggtaatttttttcaaacagattttcttctgcgaaaattgatagtgaaaataaacaaaaaaacaaaaaactgagggcgcgaagatanttantcatgngnatgccttttaagaantgataatatagttnantnnttaaannnnnnntnnnnnngnaaaaaaantnnntnannntngnttnanttnnannnnnnnnnnggnnnnnnnangnnnttnnnaannnnnngggnntccctnnntnaaaannnngntngncnnannnnntnnnnncccnnttnannnngnannaannnntnnnccnnnnnnntttnnnnnnnnnaaaaaaannnnngntnnnnttnnnnnnnnnnaaaaannnnnnnntnnttttnnnnnnngnngnannggnncnnnnaaannnnnnnntnnnncnnnannnnnnnntnnnantnnnnnnnaannantnncnngntttngnnnnnnaannnngnnaantnnnnntnantttnnnccnannnnnantttnnnnannnnanntnnnnnnnnnnnnaaannaannttnnntnnnaannnnncnngnnnancnaaannnnnnnannnaannnntnnngggnnnaaannnnnnnnnnannannnnancnnngnnngnnnttttnnnnnnannnccnnnnnnnntnnnttnantngnnggncntnnnnnnnnnncnnngnngnnnntnntnaannnnttnngncnaannaannnnnnntnnagccgacatcatcaatcgattctttaagaaaaaaacgngtgcnccattaggtattggtgatgacgcagcattaatcaataaaaatacaaaagaatattgggcnctttctcaagatacactaaatgtaaatactcattttctcccctcaactcctgcacttgatttaggttggaaagcantggctgtgaatgtttcagatatttatgccatgggcggtcagccaaagtatgcgttagtatcgattgctatcaanaaacacaatatnccgtggcttgaagacttttcannnngnttnnnnnnnnnnnnnaaaaaannnngnnnngnaantnntngnngggnnnnnannnnnngnnnaannnnnannnnnannannnntnntngnnnnnnngnaaaaaannaanntttnaaaannannngnnnnnanntnnnnnnnnnnnnnnngnntnncngncnaannngnntngnnnnnntnggnnnngnntnncnnaaaaaaaannntnnnntnnnnnnngnnnnnnnaaaantngnnannnaannncnttnnnaancnnnnncnancnnnnntnnaannttnnnaaaannncnannnnttnnnnnnnnnnnnnnnnntnnnnnnngnnnnnntnncgnnttnnnnnnnnnnntnannnnntncnanttnnnnnnnaannntttttnnnnccnanntncnnnnnnnnnntngnntnaaaaannaaaannnnttnnnnnnnnnnnnnnnngnngnnnnnnnnnnnnan

SEQ ID NO: 899 - DNA, 4000 bp, Escherichia coli
  misc_feature (362)..(362): n is a, c, g, or t
  misc_feature (1992)..(1992): n is a, c, g, or t
  misc_feature (2015)..(2015): n is a, c, g, or t
  misc_feature (2260)..(2262): n is a, c, g, or t
  misc_feature (2264)..(2269): n is a, c, g, or t
  misc_feature (2271)..(2273): n is a, c, g, or t
  misc_feature (2278)..(2280): n is a, c, g, or t
  misc_feature (2282)..(2283): n is a, c, g, or t
  misc_feature (2285)..(2287): n is a, c, g, or t
  misc_feature (2290)..(2290): n is a, c, g, or t
  misc_feature (2292)..(2292): n is a, c, g, or t
  misc_feature (2294)..(2297): n is a, c, g, or t
  misc_feature (2299)..(2300): n is a, c, g, or t
  misc_feature (2304)..(2305): n is a, c, g, or t
  misc_feature (2307)..(2308): n is a, c, g, or t
  misc_feature (2310)..(2310): n is a, c, g, or t
  misc_feature (2316)..(2318): n is a, c, g, or t
  misc_feature (2321)..(2328): n is a, c, g, or t
  misc_feature (2330)..(2331): n is a, c, g, or t
  misc_feature (2334)..(2334): n is a, c, g, or t
  misc_feature (2337)..(2337): n is a, c, g, or t
  misc_feature (2340)..(2340): n is a, c, g, or t
  misc_feature (2343)..(2343): n is a, c, g, or t
  misc_feature (2346)..(2346): n is a, c, g, or t
  misc_feature (2349)..(2349): n is a, c, g, or t
  misc_feature (2352)..(2353): n is a, c, g, or t
  misc_feature (2355)..(2357): n is a, c, g, or t
  misc_feature (2359)..(2360): n is a, c, g, or t
  misc_feature (2363)..(2363): n is a, c, g, or t
  misc_feature (2367)..(2368): n is a, c, g, or t
  misc_feature (2370)..(2370): n is a, c, g, or t
  misc_feature (2373)..(2373): n is a, c, g, or t
  misc_feature (2376)..(2376): n is a, c, g, or t
  misc_feature (2378)..(2382): n is a, c, g, or t
  misc_feature (2384)..(2384): n is a, c, g, or t
  misc_feature (2392)..(2392): n is a, c, g, or t
  misc_feature (2394)..(2394): n is a, c, g, or t
  misc_feature (2397)..(2397): n is a, c, g, or t
  misc_feature (2400)..(2401): n is a, c, g, or t
  misc_feature (2405)..(2407): n is a, c, g, or t
  misc_feature (2409)..(2409): n is a, c, g, or t
  misc_feature (2413)..(2413): n is a, c, g, or t
  misc_feature (2415)..(2415): n is a, c, g, or t
  misc_feature (2418)..(2421): n is a, c, g, or t
  misc_feature (2423)..(2423): n is a, c, g, or t
  misc_feature (2426)..(2426): n is a, c, g, or t
  misc_feature (2434)..(2434): n is a, c, g, or t
  misc_feature (2436)..(2436): n is a, c, g, or t
  misc_feature (2438)..(2440): n is a, c, g, or t
  misc_feature (2445)..(2446): n is a, c, g, or t
  misc_feature (2448)..(2450): n is a, c, g, or t
  misc_feature (2452)..(2452): n is a, c, g, or t
  misc_feature (2454)..(2454): n is a, c, g, or t
  misc_feature (2460)..(2460): n is a, c, g, or t
  misc_feature (2462)..(2462): n is a, c, g, or t
  misc_feature (2465)..(2466): n is a, c, g, or t
  misc_feature (2468)..(2469): n is a, c, g, or t
  misc_feature (2475)..(2479): n is a, c, g, or t
  misc_feature (2483)..(2484): n is a, c, g, or t
  misc_feature (2488)..(2488): n is a, c, g, or t
  misc_feature (2491)..(2491): n is a, c, g, or t
  misc_feature (2497)..(2499): n is a, c, g, or t
  misc_feature (2503)..(2504): n is a, c, g, or t
  misc_feature (2514)..(2518): n is a, c, g, or t
  misc_feature (2532)..(2532): n is a, c, g, or t
  misc_feature (2534)..(2534): n is a, c, g, or t
  misc_feature (2544)..(2544): n is a, c, g, or t
  misc_feature (2546)..(2547): n is a, c, g, or t
  misc_feature (2553)..(2554): n is a, c, g, or t
  misc_feature (2557)..(2565): n is a, c, g, or t
  misc_feature (2567)..(2570): n is a, c, g, or t
  misc_feature (2574)..(2574): n is a, c, g, or t
  misc_feature (2578)..(2579): n is a, c, g, or t
  misc_feature (2583)..(2584): n is a, c, g, or t
  misc_feature (2589)..(2590): n is a, c, g, or t
  misc_feature (2595)..(2595): n is a, c, g, or t
  misc_feature (2597)..(2602): n is a, c, g, or t
  misc_feature (2604)..(2608): n is a, c, g, or t
  misc_feature (2612)..(2612): n is a, c, g, or t
  misc_feature (2614)..(2616): n is a, c, g, or t
  misc_feature (2618)..(2621): n is a, c, g, or t
  misc_feature (2625)..(2627): n is a, c, g, or t
  misc_feature (2629)..(2631): n is a, c, g, or t
  misc_feature (2634)..(2635): n is a, c, g, or t
  misc_feature (2637)..(2642): n is a, c, g, or t
  misc_feature (2644)..(2646): n is a, c, g, or t
  misc_feature (2649)..(2650): n is a, c, g, or t
  misc_feature (2655)..(2656): n is a, c, g, or t
  misc_feature (2659)..(2661): n is a, c, g, or t
  misc_feature (2663)..(2663): n is a, c, g, or t
  misc_feature (2667)..(2668): n is a, c, g, or t
  misc_feature (2671)..(2671): n is a, c, g, or t
  misc_feature (2674)..(2674): n is a, c, g, or t
  misc_feature (2677)..(2678): n is a, c, g, or t
  misc_feature (2680)..(2681): n is a, c, g, or t
  misc_feature (2686)..(2689): n is a, c, g, or t
  misc_feature (2694)..(2698): n is a, c, g, or t
  misc_feature (2700)..(2700): n is a, c, g, or t
  misc_feature (2703)..(2705): n is a, c, g, or t
  misc_feature (2709)..(2709): n is a, c, g, or t
  misc_feature (2711)..(2711): n is a, c, g, or t
  misc_feature (2714)..(2714): n is a, c, g, or t
  misc_feature (2718)..(2720): n is a, c, g, or t
  misc_feature (2723)..(2723): n is a, c, g, or t
  misc_feature (2727)..(2727): n is a, c, g, or t
  misc_feature (2734)..(2737): n is a, c, g, or t
  misc_feature (2739)..(2740): n is a, c, g, or t
  misc_feature (2745)..(2745): n is a, c, g, or t
  misc_feature (2747)..(2747): n is a, c, g, or t
  misc_feature (2749)..(2750): n is a, c, g, or t
  misc_feature (2755)..(2759): n is a, c, g, or t
  misc_feature (2761)..(2761): n is a, c, g, or t
  misc_feature (2763)..(2766): n is a, c, g, or t
  misc_feature (2770)..(2770): n is a, c, g, or t
  misc_feature (2772)..(2772): n is a, c, g, or t
  misc_feature (2774)..(2775): n is a, c, g, or t
  misc_feature (2778)..(2781): n is a, c, g, or t
  misc_feature (2783)..(2783): n is a, c, g, or t
  misc_feature (2785)..(2786): n is a, c, g, or t
  misc_feature (2788)..(2789): n is a, c, g, or t
  misc_feature (2792)..(2792): n is a, c, g, or t
  misc_feature (2797)..(2798): n is a, c, g, or t
  misc_feature (2800)..(2801): n is a, c, g, or t
  misc_feature (2805)..(2805): n is a, c, g, or t
  misc_feature (2807)..(2810): n is a, c, g, or t
  misc_feature (2813)..(2813): n is a, c, g, or t
  misc_feature (2816)..(2818): n is a, c, g, or t
  misc_feature (2821)..(2824): n is a, c, g, or t
  misc_feature (2826)..(2832): n is a, c, g, or t
  misc_feature (2834)..(2835): n is a, c, g, or t
  misc_feature (2837)..(2837): n is a, c, g, or t
  misc_feature (2842)..(2842): n is a, c, g, or t
  misc_feature (2846)..(2847): n is a, c, g, or t
  misc_feature (2849)..(2849): n is a, c, g, or t
  misc_feature (2851)..(2854): n is a, c, g, or t
  misc_feature (2856)..(2856): n is a, c, g, or t
  misc_feature (2858)..(2862): n is a, c, g, or t
  misc_feature (2867)..(2867): n is a, c, g, or t
  misc_feature (2871)..(2872): n is a, c, g, or t
  misc_feature (2875)..(2875): n is a, c, g, or t
  misc_feature (2877)..(2878): n is a, c, g, or t
  misc_feature (2881)..(2881): n is a, c, g, or t
  misc_feature (2883)..(2886): n is a, c, g, or t
  misc_feature (2891)..(2891): n is a, c, g, or t
  misc_feature (2893)..(2893): n is a, c, g, or t
  misc_feature (2898)..(2898): n is a, c, g, or t
  misc_feature (2902)..(2905): n is a, c, g, or t
  misc_feature (2907)..(2908): n is a, c, g, or t
  misc_feature (2912)..(2912): n is a, c, g, or t
  misc_feature (2914)..(2918): n is a, c, g, or t
  misc_feature (2921)..(2924): n is a, c, g, or t
  misc_feature (2926)..(2926): n is a, c, g, or t
  misc_feature (2931)..(2931): n is a, c, g, or t
  misc_feature (2934)..(2936): n is a, c, g, or t
  misc_feature (2939)..(2939): n is a, c, g, or t
  misc_feature (2944)..(2944): n is a, c, g, or t
  misc_feature (2946)..(2946): n is a, c, g, or t
  misc_feature (2948)..(2949): n is a, c, g, or t
  misc_feature (2951)..(2954): n is a, c, g, or t
  misc_feature (2957)..(2957): n is a, c, g, or t
  misc_feature (2959)..(2960): n is a, c, g, or t
  misc_feature (2962)..(2963): n is a, c, g, or t
  misc_feature (2965)..(2967): n is a, c, g, or t
  misc_feature (2969)..(2975): n is a, c, g, or t
  misc_feature (2978)..(2979): n is a, c, g, or t
  misc_feature (2981)..(2981): n is a, c, g, or t
  misc_feature (2983)..(2983): n is a, c, g, or t
  misc_feature (2985)..(2985): n is a, c, g, or t
  misc_feature (2988)..(2988): n is a, c, g, or t
  misc_feature (2990)..(2990): n is a, c, g, or t
  misc_feature (2992)..(2992): n is a, c, g, or t
  misc_feature (2994)..(2996): n is a, c, g, or t
  misc_feature (2998)..(3000): n is a, c, g, or t
  misc_feature (3002)..(3004): n is a, c, g, or t
  misc_feature (3009)..(3010): n is a, c, g, or t
  misc_feature (3012)..(3015): n is a, c, g, or t
  misc_feature (3017)..(3017): n is a, c, g, or t
  misc_feature (3020)..(3022): n is a, c, g, or t
  misc_feature (3025)..(3028): n is a, c, g, or t
  misc_feature (3030)..(3030): n is a, c, g, or t
  misc_feature (3033)..(3033): n is a, c, g, or t
  misc_feature (3035)..(3036): n is a, c, g, or t
  misc_feature (3038)..(3038): n is a, c, g, or t
  misc_feature (3041)..(3041): n is a, c, g, or t
  misc_feature (3043)..(3044): n is a, c, g, or t
  misc_feature (3046)..(3048): n is a, c, g, or t
  misc_feature (3051)..(3051): n is a, c, g, or t
  misc_feature (3062)..(3062): n is a, c, g, or t
  misc_feature (3064)..(3068): n is a, c, g, or t
  misc_feature (3070)..(3075): n is a, c, g, or t
  misc_feature (3078)..(3079): n is a, c, g, or t
  misc_feature (3081)..(3081): n is a, c, g, or t
  misc_feature (3083)..(3084): n is a, c, g, or t
  misc_feature (3086)..(3087): n is a, c, g, or t
  misc_feature (3093)..(3095): n is a, c, g, or t
  misc_feature (3098)..(3102): n is a, c, g, or t
  misc_feature (3106)..(3106): n is a, c, g, or t
  misc_feature (3109)..(3109): n is a, c, g, or t
  misc_feature (3111)..(3111): n is a, c, g, or t
  misc_feature (3114)..(3114): n is a, c, g, or t
  misc_feature (3121)..(3121): n is a, c, g, or t
  misc_feature (3123)..(3124): n is a, c, g, or t
  misc_feature (3126)..(3129): n is a, c, g, or t
  misc_feature (3131)..(3131): n is a, c, g, or t
  misc_feature (3133)..(3133): n is a, c, g, or t
  misc_feature (3137)..(3138): n is a, c, g, or t
  misc_feature (3142)..(3142): n is a, c, g, or t
  misc_feature (3145)..(3148): n is a, c, g, or t
  misc_feature (3152)..(3153): n is a, c, g, or t
  misc_feature (3155)..(3158): n is a, c, g, or t
  misc_feature (3160)..(3161): n is a, c, g, or t
  misc_feature (3163)..(3164): n is a, c, g, or t
  misc_feature (3167)..(3167): n is a, c, g, or t
  misc_feature (3171)..(3173): n is a, c, g, or t
  misc_feature (3181)..(3182): n is a, c, g, or t
  misc_feature (3184)..(3184): n is a, c, g, or t
  misc_feature (3189)..(3189): n is a, c, g, or t
  misc_feature (3193)..(3193): n is a, c, g, or t
  misc_feature (3196)..(3196): n is a, c, g, or t
  misc_feature (3199)..(3199): n is a, c, g, or t
  misc_feature (3201)..(3201): n is a, c, g, or t
  misc_feature (3203)..(3203): n is a, c, g, or t
  misc_feature (3206)..(3207): n is a, c, g, or t
  misc_feature (3209)..(3209): n is a, c, g, or t
  misc_feature (3213)..(3213): n is a, c, g, or t
  misc_feature (3215)..(3215): n is a, c, g, or t
  misc_feature (3217)..(3218): n is a, c, g, or t
  misc_feature (3220)..(3220): n is a, c, g, or t
  misc_feature (3226)..(3227): n is a, c, g, or t
  misc_feature (3229)..(3229): n is a, c, g, or t
  misc_feature (3231)..(3234): n is a, c, g, or t
  misc_feature (3237)..(3241): n is a, c, g, or t
  misc_feature (3243)..(3243): n is a, c, g, or t
  misc_feature (3247)..(3248): n is a, c, g, or t
  misc_feature (3251)..(3252): n is a, c, g, or t
  misc_feature (3254)..(3254): n is a, c, g, or t
  misc_feature (3258)..(3259): n is a, c, g, or t
  misc_feature (3261)..(3261): n is a, c, g, or t
  misc_feature (3272)..(3272): n is a, c, g, or t
  misc_feature (3275)..(3277): n is a, c, g, or t
  misc_feature (3279)..(3279): n is a, c, g, or t
  misc_feature (3282)..(3283): n is a, c, g, or t
  misc_feature (3286)..(3286): n is a, c, g, or t
  misc_feature (3290)..(3292): n is a, c, g, or t
  misc_feature (3294)..(3295): n is a, c, g, or t
  misc_feature (3297)..(3298): n is a, c, g, or t
  misc_feature (3301)..(3301): n is a, c, g, or t
  misc_feature (3303)..(3306): n is a, c, g, or t
  misc_feature (3309)..(3309): n is a, c, g, or t
  misc_feature (3311)..(3313): n is a, c, g, or t
  misc_feature (3315)..(3318): n is a, c, g, or t
  misc_feature (3321)..(3321): n is a, c, g, or t
  misc_feature (3324)..(3325): n is a, c, g, or t
  misc_feature (3335)..(3337): n is a, c, g, or t
  misc_feature (3341)..(3341): n is a, c, g, or t
  misc_feature (3343)..(3345): n is a, c, g, or t
  misc_feature (3347)..(3348): n is a, c, g, or t
  misc_feature (3352)..(3361): n is a, c, g, or t
  misc_feature (3363)..(3366): n is a, c, g, or t
  misc_feature (3370)..(3370): n is a, c, g, or t
  misc_feature (3372)..(3379): n is a, c, g, or t
  misc_feature (3382)..(3383): n is a, c, g, or t
  misc_feature (3385)..(3385): n is a, c, g, or t
  misc_feature (3389)..(3389): n is a, c, g, or t
  misc_feature (3392)..(3393): n is a, c, g, or t
  misc_feature (3396)..(3396): n is a, c, g, or t
  misc_feature (3400)..(3402): n is a, c, g, or t
  misc_feature (3405)..(3405): n is a, c, g, or t
  misc_feature (3408)..(3408): n is a, c, g, or t
  misc_feature (3410)..(3410): n is a, c, g, or t
  misc_feature (3412)..(3412): n is a, c, g, or t
  misc_feature (3414)..(3415): n is a, c, g, or t
  misc_feature (3420)..(3421): n is a, c, g, or t
  misc_feature (3425)..(3425): n is a, c, g, or t
  misc_feature (3431)..(3431): n is a, c, g, or t
  misc_feature (3433)..(3433): n is a, c, g, or t
  misc_feature (3438)..(3438): n is a, c, g, or t
  misc_feature (3442)..(3444): n is a, c, g, or t
  misc_feature (3449)..(3450): n is a, c, g, or t
  misc_feature (3452)..(3453): n is a, c, g, or t
  misc_feature (3457)..(3457): n is a, c, g, or t
  misc_feature (3459)..(3461): n is a, c, g, or t
  misc_feature (3479)..(3479): n is a, c, g, or t
  misc_feature (3481)..(3482): n is a, c, g, or t
  misc_feature (3484)..(3486): n is a, c, g, or t
  misc_feature (3494)..(3494): n is a, c, g, or t
  misc_feature (3502)..(3502): n is a, c, g, or t
  misc_feature (3504)..(3504): n is a, c, g, or t
  misc_feature (3507)..(3507): n is a, c, g, or t
  misc_feature (3510)..(3510): n is a, c, g, or t
  misc_feature (3514)..(3514): n is a, c, g, or t
  misc_feature (3516)..(3517): n is a, c, g, or t
  misc_feature (3520)..(3520): n is a, c, g, or t
  misc_feature (3522)..(3524): n is a, c, g, or t
  misc_feature (3526)..(3526): n is a, c, g, or t
  misc_feature (3529)..(3529): n is a, c, g, or t
  misc_feature (3535)..(3535): n is a, c, g, or t
  misc_feature (3538)..(3538): n is a, c, g, or t
  misc_feature (3541)..(3542): n is a, c, g, or t
  misc_feature (3544)..(3547): n is a, c, g, or t
  misc_feature (3549)..(3549): n is a, c, g, or t
  misc_feature (3552)..(3552): n is a, c, g, or t
  misc_feature (3554)..(3558): n is a, c, g, or t
  misc_feature (3561)..(3562): n is a, c, g, or t
  misc_feature (3573)..(3573): n is a, c, g, or t
  misc_feature (3577)..(3577): n is a, c, g, or t
  misc_feature (3579)..(3580): n is a, c, g, or t
  misc_feature (3583)..(3583): n is a, c, g, or t
  misc_feature (3587)..(3588): n is a, c, g, or t
  misc_feature (3593)..(3593): n is a, c, g, or t
  misc_feature (3596)..(3597): n is a, c, g, or t
  misc_feature (3600)..(3602): n is a, c, g, or t
  misc_feature (3607)..(3607): n is a, c, g, or t
  misc_feature (3609)..(3609): n is a, c, g, or t
  misc_feature (3611)..(3612): n is a, c, g, or t
  misc_feature (3615)..(3615): n is a, c, g, or t
  misc_feature (3621)..(3621): n is a, c, g, or t
  misc_feature (3623)..(3624): n is a, c, g, or t
  misc_feature (3626)..(3627): n is a, c, g, or t
  misc_feature (3629)..(3630): n is a, c, g, or t
  misc_feature (3634)..(3635): n is a, c, g, or t
  misc_feature (3638)..(3638): n is a, c, g, or t
  misc_feature (3642)..(3642): n is a, c, g, or t
  misc_feature (3644)..(3644): n is a, c, g, or t
  misc_feature (3647)..(3647): n is a, c, g, or t
  misc_feature (3649)..(3652): n is a, c, g, or t
  misc_feature (3654)..(3654): n is a, c, g, or t
  misc_feature (3667)..(3667): n is a, c, g, or t
  misc_feature (3670)..(3670): n is a, c, g, or t
  misc_feature (3674)..(3674): n is a, c, g, or t
  misc_feature (3678)..(3679): n is a, c, g, or t
  misc_feature (3681)..(3683): n is a, c, g, or t
  misc_feature (3685)..(3685): n is a, c, g, or t
  misc_feature (3688)..(3689): n is a, c, g, or t
  misc_feature (3691)..(3691): n is a, c, g, or t
  misc_feature (3693)..(3693): n is a, c, g, or t
  misc_feature (3698)..(3698): n is a, c, g, or t
  misc_feature (3703)..(3709): n is a, c, g, or t
  misc_feature (3713)..(3716): n is a, c, g, or t
  misc_feature (3718)..(3718): n is a, c, g, or t
  misc_feature (3720)..(3721): n is a, c, g, or t
  misc_feature (3724)..(3725): n is a, c, g, or t
  misc_feature (3729)..(3729): n is a, c, g, or t
  misc_feature (3731)..(3731): n is a, c, g, or t
  misc_feature (3733)..(3733): n is a, c, g, or t
  misc_feature (3738)..(3738): n is a, c, g, or t
  misc_feature (3740)..(3740): n is a, c, g, or t
  misc_feature (3745)..(3745): n is a, c, g, or t
  misc_feature (3747)..(3747): n is a, c, g, or t
  misc_feature (3751)..(3751): n is a, c, g, or t
  misc_feature (3754)..(3754): n is a, c, g, or t
  misc_feature (3756)..(3757): n is a, c, g, or t
  misc_feature (3759)..(3762): n is a, c, g, or t
  misc_feature (3767)..(3772): n is a, c, g, or t
  misc_feature (3774)..(3774): n is a, c, g, or t
  misc_feature (3777)..(3777): n is a, c, g, or t
  misc_feature (3779)..(3780): n is a, c, g, or t
  misc_feature (3782)..(3783): n is a, c, g, or t
  misc_feature (3786)..(3786): n is a, c, g, or t
  misc_feature (3792)..(3792): n is a, c, g, or t
  misc_feature (3794)..(3796): n is a, c, g, or t
  misc_feature (3802)..(3802): n is a, c, g, or t
  misc_feature (3804)..(3804): n is a, c, g, or t
  misc_feature (3806)..(3807): n is a, c, g, or t
  misc_feature (3809)..(3809): n is a, c, g, or t
  misc_feature (3812)..(3812): n is a, c, g, or t
  misc_feature (3822)..(3822): n is a, c, g, or t
  misc_feature (3825)..(3826): n is a, c, g, or t
  misc_feature (3828)..(3830): n is a, c, g, or t
  misc_feature (3834)..(3834): n is a, c, g, or t
  misc_feature (3836)..(3836): n is a, c, g, or t
  misc_feature (3844)..(3844): n is a, c, g, or t
  misc_feature (3847)..(3847): n is a, c, g, or t
  misc_feature (3849)..(3849): n is a, c, g, or t
  misc_feature (3851)..(3853): n is a, c, g, or t
  misc_feature (3859)..(3860): n is a, c, g, or t
  misc_feature (3863)..(3863): n is a, c, g, or t
  misc_feature (3865)..(3865): n is a, c, g, or t
  misc_feature (3867)..(3870): n is a, c, g, or t
  misc_feature (3872)..(3872): n is a, c, g, or t
  misc_feature (3874)..(3876): n is a, c, g, or t
  misc_feature (3878)..(3878): n is a, c, g, or t
  misc_feature (3882)..(3882): n is a, c, g, or t
  misc_feature (3884)..(3884): n is a, c, g, or t
  misc_feature (3886)..(3886): n is a, c, g, or t
  misc_feature (3891)..(3894): n is a, c, g, or t
  misc_feature (3901)..(3901): n is a, c, g, or t
  misc_feature (3909)..(3916): n is a, c, g, or t
  misc_feature (3919)..(3920): n is a, c, g, or t
  misc_feature (3924)..(3925): n is a, c, g, or t
  misc_feature (3927)..(3928): n is a, c, g, or t
  misc_feature (3931)..(3932): n is a, c, g, or t
  misc_feature (3934)..(3934): n is a, c, g, or t
  misc_feature (3942)..(3942): n is a, c, g, or t
  misc_feature (3944)..(3944): n is a, c, g, or t
  misc_feature (3946)..(3947): n is a, c, g, or t
  misc_feature (3949)..(3949): n is a, c, g, or t
  misc_feature (3951)..(3951): n is a, c, g, or t
  misc_feature (3954)..(3954): n is a, c, g, or t
  misc_feature (3956)..(3957): n is a, c, g, or t
  misc_feature (3964)..(3964): n is a, c, g, or t
  misc_feature (3966)..(3966): n is a, c, g, or t
  misc_feature (3970)..(3970): n is a, c, g, or t
  misc_feature (3976)..(3976): n is a, c, g, or t
  misc_feature (3978)..(3981): n is a, c, g, or t
  misc_feature (3984)..(3984): n is a, c, g, or t
  misc_feature (3989)..(3992): n is a, c, g, or t
  misc_feature (3995)..(3995): n is a, c, g, or t
  misc_feature (3998)..(3998): n is a, c, g, or t
aaattacgccgttctgtattctttcaagcgcgcgcgtgtgagcatcgctgaccatcacacgtgcgccgaatcctttgcgcagtggtacgcggatgagatgaaagatcgcggctacgcgcctggaaattggaagtggatcgtaccccccaccgcggcttcgacgtcttcgatttatctcggcttgaacaagatgacggagtatacgctgaaaccggcgctcgtcggcggtatgagtctgaatcaactcgtgattcgcgcgcggcgcgccaacttcttcaccgcttctgggctgtctcaagcggcgatgcacgtcgccgtcgcggcggcgaagtggcgcaagcgcatggtgcgagtaaagggancgcttattctgtacgcttcggacggaggccgcacgcaagcacgcgcgtcatggctgtggttgttcttgaggcaaagatttccgatgattcggccaatcaacgtcgcgaatcctgacctgcgaagtgacgaccttttgaaagcgctcgagcgcgttgaattcgtaatcgtgctcgcgtcgaccacggggtcgggggcagttccgacggggtcggaaaggttcatcgagtggtgccgtagtgacggagcgcgcgaggcgttgaaagacaaaaatttcgcgttgtgcgcgttcggctcgcgcgcctatccaaagttttgcggcggtggcaagcagttcgcgatggcactccgcgaagccgacgcgaaagagatgtttcctatggtttgcgccgatcagctcgagggtgaagacgccagcgtgcacgagttcacgaagagtctgttcaattggttccacaaacacgagcgcattaccgcgtcgctgcgcgatcttttgaccaatcagcttgtaagcggggcgcggcttcaaccgtcgtttgtcttgaacgtgcgtcgccgtgacgtgcacggacgagaccacacggctgaccatcgagcaggcgtgccggcgacgttaaccgatcgagtcgtgctcggcgacggtagtagattgaacactgtcgccgtgacactcaccttaccgcgcgggcatcgagacaccgagttttacaaacccggcgatcatgtttcagtgtaccctcgaacgagcgaagcgcgcgcgcgctatttcgtcgcgcactttggcatcgactttgacgatcaaatcgaactagttcctctggacgaatcagaaatctttgagaattcactcgactcgagcattccgaacccagtcggtgccggttatcttttcactacggtgctggatatcaacaaagagccatcggcggagttgctgcaagccctcgcgcattacgtcgacgacgaaacgtgcaaagcacaaatggaaaacttggcgctcgatgaagacgcgcggcgagagtggatttcgcagactggcgcgcggatatctacactcttcgatcaatttccgacgttgagcgcgacgcatcgccgtgacaaggcggtgggcatcgaaatgctgcgagacattcttctcaagataccaaaacttcgcgcgcgttattactccgtctcgagctcgccgcgcgccgtcggaaataacgtgttttctttaaccgtcggacgtgtgacgtacaggaatggcgacggcgtgaattcgcacatgcatctcggcttctgttctgatttcttggcgacgttgcccttgcgcacaaacgtcatggtcgagatgctcccggcgccggcgtttcgattgccgcggtctccgaaggtgccgattctgatgatcgctggcgggactgggatagcgccctttaaggggttcgtcgatcatcgcgcgtgcatggcgcctgaacaaaggagcgacgcatggcttattgtgggatgtcgaacgcgaggaaatcagttgtatcgcgacgagatggaaatcgccgccgaaaatggcgcgttgacagcgtacctcgtcgggtattctcgcgagccagacttgccgaaaatgtacgtcgacgccgtgatgcgcgagaacggcgncgggattcgcgatttgattaaangaggcggacacgtgtacgtatgcggggacgtgcgaatcgagacgtccgtgcgtggcgcgctcgatgacatactcggtcgagccgaagtggagtcgctcgaaaaatcgggtagataccatcttgatatattcggcgccttcgacgtgcagacgtcgctgaatcaacaactcaaatcggcgcgaaggtcgctttcgtgtagaaagaaatgagttgtaaagttgataggagatccaatcggcgcgtgnnnannnnnncnnngtgannncnntnnntcntncnnnncnncatnncnncntttgtnnnacnnnnnnnngnngcngtnaanatntangcncgnntnnngnngtntgtnncncgncgngnnnnncngcggcgtngntgncgnngaannngngctngncgnnnngntcntcgactgngnannngcccnngnnnancnctgcgngngcnncnngctggnnnnncggnncccngtnatcgtnnngtgnntacaccgcgnnnnngcgcccgttatccncncctcggcgancnngcgcgnnctnnnnnnnnngnnnngtcnattnngcgnnctcgnnccgcncnnnnnntnnnnnattnannngnnnntgcnnncnnngcnntnnnnnngnnntgnncgcgnnggnnntntccnnggnttntgnnanngtatnnnncaacnnnnncnatnnnacgncnggngcgnnnaancgtnacgcgtnnnnanntcgtncnanngcgtnnnnnangnnnnatantngnntcnnnnancnnannctngattnnanngtgntnnnngtnttnnngtnnnnannnnnnntnnancccancacnncncnnnncntnnnnnatccnagcnnagncnncgngnnnngcgcnangtganctcnnnnanngtgncnnnnnacnnnnangggcnctnnnccntcgtngncnnannnncgntnnanntnnncnnnnnnntgnntntntngcncntncnnngnnnannnctcgnnannnncncgnnnttnnnncncgntnngnccnanntnnncgncgacgtcgacncnnnnngnnnnnnacnngncnnanngcgttnnngcnnnnntcgngtnanacnacgcgcnanngnnnntncntggnnccangannnngcgnngnnnntnncnntcngcgnnncgcgcgcnnangattncgtnctnacncncngtnngngtgnangnngncgtcgnngncnnnncgnnnnncncggnncgnncncganngntgtcgcgcganacnnngntgnnacnttcnnnanncnntanannnngcnannncnnnntcntcnncgcgcgtccnnnacgncnnntnngacnnnnnnnnnncnnnnacancnnnnnnnntcnngngtgnganngcncgcnnncgngangncncnnaaccnngcgncgcggngngcggngacnnncgcgnngnnaacncnnntcgcgcgcgcgaaatcgngnngnnnattttcanagaacccncnggnggncttngnntcnannntntcnacgtcnacncanngnnnntngcncnnnnnacnntagatttttancccntnngtntgcnngacgncgnngannnactcngngnncancttttncnncnnanntccnnacncgcntntcncnnnncncgtcgacgcgagngtncctntcanntnnncntcnngngngtcgncgaannnnnnnttgnnnnanannatnntcgncnantcgancncggtngngctngtncnngnnnntatgnnnnnngntcncnngnncgnggcatngnnnatcgcngngnngntgnggccgcgcgnggnntnnncgananagatgaantcncnannntgcgtnncgncncnnnnantnnngngcgncncncccgnnnncgcggangcgaaaannnnnnnngtnnccanngnntgnncnccctccgngngnncntntgngnnatacacnanaaanaagcgngnnnngancgccnnnncgncgnac

SEQ ID NO: 900 - DNA, 4000 bp, Escherichia coli
  misc_feature (1)..(4): n is a, c, g, or t
  misc_feature (6)..(12): n is a, c, g, or t
  misc_feature (14)..(22): n is a, c, g, or t
  misc_feature (24)..(24): n is a, c, g, or t
  misc_feature (26)..(32): n is a, c, g, or t
  misc_feature (34)..(35): n is a, c, g, or t
  misc_feature (37)..(37): n is a, c, g, or t
  misc_feature (43)..(44): n is a, c, g, or t
  misc_feature (46)..(49): n is a, c, g, or t
  misc_feature (51)..(56): n is a, c, g, or t
  misc_feature (59)..(60): n is a, c, g, or t
  misc_feature (63)..(68): n is a, c, g, or t
  misc_feature (70)..(72): n is a, c, g, or t
  misc_feature (74)..(75): n is a, c, g, or t
  misc_feature (78)..(82): n is a, c, g, or t
  misc_feature (84)..(84): n is a, c, g, or t
  misc_feature (86)..(86): n is a, c, g, or t
  misc_feature (88)..(90): n is a, c, g, or t
  misc_feature (92)..(94): n is a, c, g, or t
  misc_feature (96)..(99): n is a, c, g, or t
  misc_feature (101)..(105): n is a, c, g, or t
  misc_feature (107)..(110): n is a, c, g, or t
  misc_feature (112)..(114): n is a, c, g, or t
  misc_feature (116)..(118): n is a, c, g, or t
  misc_feature (120)..(122): n is a, c, g, or t
  misc_feature (125)..(132): n is a, c, g, or t
  misc_feature (134)..(134): n is a, c, g, or t
  misc_feature (136)..(136): n is a, c, g, or t
  misc_feature (139)..(141): n is a, c, g, or t
  misc_feature (143)..(143): n is a, c, g, or t
  misc_feature (145)..(145): n is a, c, g, or t
  misc_feature (147)..(149): n is a, c, g, or t
  misc_feature (151)..(158): n is a, c, g, or t
  misc_feature (162)..(170): n is a, c, g, or t
  misc_feature (174)..(174): n is a, c, g, or t
  misc_feature (178)..(179): n is a, c, g, or t
  misc_feature (181)..(186): n is a, c, g, or t
  misc_feature (189)..(190): n is a, c, g, or t
  misc_feature (193)..(193): n is a, c, g, or t
  misc_feature (195)..(200): n is a, c, g, or t
  misc_feature (203)..(203): n is a, c, g, or t
  misc_feature (205)..(207): n is a, c, g, or t
  misc_feature (209)..(218): n is a, c, g, or t
  misc_feature (220)..(222): n is a, c, g, or t
  misc_feature (224)..(226): n is a, c, g, or t
  misc_feature (229)..(234): n is a, c, g, or t
  misc_feature (236)..(244): n is a, c, g, or t
  misc_feature (246)..(249): n is a, c, g, or t
  misc_feature (253)..(257): n is a, c, g, or t
  misc_feature (259)..(262): n is a, c, g, or t
  misc_feature (264)..(264): n is a, c, g, or t
  misc_feature (267)..(268): n is a, c, g, or t
  misc_feature (270)..(275): n is a, c, g, or t
  misc_feature (277)..(279): n is a, c, g, or t
  misc_feature (281)..(291): n is a, c, g, or t
  misc_feature (293)..(302): n is a, c, g, or t
  misc_feature (304)..(305): n is a, c, g, or t
  misc_feature (307)..(307): n is a, c, g, or t
  misc_feature (346)..(346): n is a, c, g, or t
  misc_feature (355)..(355): n is a, c, g, or t
  misc_feature (1137)..(1137): n is a, c, g, or t
  misc_feature (1142)..(1142): n is a, c, g, or t
  misc_feature (1144)..(1144): n is a, c, g, or t
  misc_feature (1986)..(1986): n is a, c, g, or t
  misc_feature (2964)..(2964): n is a, c, g, or t
nnnntnnnnnnntnnnnnnnnncnannnnnnnannantttttnnannnncnnnnnnttnnaannnnnnannntnnttnnnnntncnannncnnntnnnncnnnnntnnnngnnncnnngnnnttnnnnnnnntngnttnnnantncnnnannnnnnnnaaannnnnnnnntttnaaanntnnnnnnttnnccnannnnnnaantnnngnnnnnnnnnnannntnnnttnnnnnncnnnnnnnnngnnnnaaannnnntnnnnanttnnannnnnntnnngnnnnnnnnnnntnnnnnnnnnnannantttttttaaaaatttattttaaaatctttatttagtgcntttttggcnggtgtatgttgaaaattagtttgttagcagtactgctagtctttgtagtaggtactggtgttatatttgcagttccagatgcagcaggtgacgttgtagctggaaaaggcgaatttaggcttggtgaggttttagatgaatcagtaggctggtttatcgttgtaggtttaggaatgatatttgcaggtgttatttctgtagagattaagcttgaggaaaaatatttaggtcatacacaaaactccgagtggtttaacactgctggcagaattatcaagacaggtctaactgcagcagcaatcgtatctgcctggacttgggctgcgacactgctacaatcttcgacagtagcgtatctctatggtattagcggacctttctggtatgcttctggcgcaacaattcaggttcttttgttcggaatattagcaatcgaactaaaacgaaaagcaccaaacgctcacactttcttagaaattatcagagcaagatttggtaacggtactcacaaaattttcttaggttttgcattaacatgtaacatgattgtaactggaatgctcctacttggaggtgcagcagttgtaaacggtctaacaggaatggacattacccttgcagcatttttgattcctgtaggtgttatgatctatacgctggtaggcggtctaaaggctacatttgtggcagactatatgcatactgtaattatctttactgtaattctcacatttgtttcaatggtattcttcatcagtccaattacgggcggaattgaaggnatgtncnacaaactggcagaagctgcagtgttaaaaccagttctattgcctactttcgtagaaggaacaccaggcaatgctatgggcgcttaccttacaatggcttctgctggcggtttgatctttggagttatcaacatagtgggtaactttggaactgtatttgtcgaccaggcatattggcaacgagcaatcgctgcacaaccaagttcaactgtaagaggtttcttacttggtggaatgtgttggttctcaattccatttacactagcaactacgatggggcttactgcggtggcgcttcaagtatcgcttacgccagagcaggtgcagctcggacttacggttcctgctgcagcaacagtactaatgggtccagtaggcgcaatcatggttttggtaatgttatttatggcggtaacttcggcaggatctgctgaactaatcgcggtatcttctttgattacttatgatgtgtacagaacatacaagaatccaaatgctacaggtaagcaactactcaaagtgagccggacggttatagtcatatttggtcttggaatgggagctctggctgcaatattattaggcatgggattaagcttaggatttgtatacttggcgatgggcatcttgattggctctgctgtaattccgattgcattaacaatcgcttggagtagaactacaagggctggtgcagtttctggtgcccttattggtgttatgttatcattaatcacatggacaggtgttgcttctgcagagtctggtggcgttgttgacattgcatcacttggtggtgcgttcccaatgctttatggtaacgttgtagcaatcttatcatcnggattgatttgtgtagtaatcagtttggctcagaggaaggtctatgattggaagttgatgaatcctcaaatgaaaattgtccaggctgacatgtctgagaacatgaaagcggaaatagcagcacgagcacaagacgaagagacattaaagaaagcatacaagttcagcctaaagggaggcggaattttgactttgatttgtgtagtattttggccattgcctttgtacttctctggatatgtatttgatttgggattctacaccttctgggtttggattgccattgtttgggtatccgttgcatcattcaccattatctgcatgccaatatacgaagccagagggggcttcgccaaagtatttcgtggtcaaaaagcagacgtaaaataatactctgagagagagcaaaatggagtcatagatcttcttgatcatgcattcctctcaaaatttaacaattctttttaatgatgtattgatggttttgttatgacatcatgtaccggttgtggtcttgtacttggttttaaaaagtacaagttcaataagctttggcgagttccaggtaagttctgcaagccttgtatgatgttgattggaaaagattgggacgatcatggaaagatcaccttaccacaacgtcgatgtgacttgtgccaaacggaattttattttcttcaagttgcatggcaggggcagaagcaaaaacacttttgcgatgtatgccacaaggttgcaattagcggagtgttgcctgataaaagcaggaaggaaatgacaaacaaatttccaatacccatgctgataattggaggtcttggagctgtgctaatggttctaggcgcgttattcacattgataggaacgacatcaggcgatgccaacttggttaacatcttatttggtgcatttactactgcagcaggattcatgttggttcgacgtactataaacaacagaaagctgcttttaggaaangtctagaacaaacagtacaatcttgaaagagatacatcttttgctggatccactgtagcaatcttcccgttcactttgacctcgtacgtttctgggtcgatttcaatttttggtgtagcatcattgtacatcatgtccttttttccaatattgcggcagttctttactgggagcaattttttttcaattttgagtttttcttccaagccgttgtccagtgcgagttgcgatgtaaacgtaacagacgttgtcttctttgcctttccgagtgcgccaaacataggtctgtagtagactggctcagttgtaggaattgatgcatttgggtcgcccatcagcgagtatgcgatgaatccacccttgataatcagtttcggcttgattccaaaaaactgtggggtccatactacaatgtctgcaatctttccaggttcaagcgagccaacatactccgagattccatgcgttattgcagggttaattgtgatctttgagatataccgtttgattctgtaattgtcattttctgcactatcttcaggaagactacctttcatctttttcatcttgtctgcagtttgccaatttcttgtagtcacttcaccaactcttcccattgcttggctgtctgatgacatcatactgattgccccgatatcatgcaagacatcttcagcagcaattgtctcagcgcggattctagactctgcaaacgagatgtcttctggaacagacggattcaagtgatggcaaaccatcatcatgtccaaatgttcctctagcgtattgattgtaaatggtcttgtaggattggtagacgatggcaaaatgtttggctcgcctgcaattttcattatatctggagcatggcctccacctgcaccttcagtgtggtatgtgtggattaccctgccatttatggcatttatggtatcatctacatatccacattcgtttagtgtgtctgtatgaattgcaacttgcgtatcagtcttgtctgcaacatttagggcagaattaattgtagctggagttg

SEQ ID NO: 901 - DNA, 4000 bp, Escherichia coli
  misc_feature (1)..(1): n is a, c, g, or t
  misc_feature (3)..(6): n is a, c, g, or t
  misc_feature (8)..(8): n is a, c, g, or t
  misc_feature (11)..(16): n is a, c, g, or t
  misc_feature (18)..(28): n is a, c, g, or t
  misc_feature (30)..(34): n is a, c, g, or t
  misc_feature (36)..(39): n is a, c, g, or t
  misc_feature (41)..(41): n is a, c, g, or t
  misc_feature (43)..(43): n is a, c, g, or t
  misc_feature (49)..(49): n is a, c, g, or t
  misc_feature (52)..(52): n is a, c, g, or t
  misc_feature (59)..(60): n is a, c, g, or t
  misc_feature (67)..(68): n is a, c, g, or t
  misc_feature (70)..(81): n is a, c, g, or t
  misc_feature (83)..(91): n is a, c, g, or t
  misc_feature (95)..(95): n is a, c, g, or t
  misc_feature (97)..(98): n is a, c, g, or t
  misc_feature (100)..(107): n is a, c, g, or t
  misc_feature (109)..(118): n is a, c, g, or t
  misc_feature (120)..(124): n is a, c, g, or t
  misc_feature (126)..(143): n is a, c, g, or t
  misc_feature (147)..(147): n is a, c, g, or t
  misc_feature (150)..(150): n is a, c, g, or t
  misc_feature (152)..(152): n is a, c, g, or t
  misc_feature (155)..(155): n is a, c, g, or t
  misc_feature (162)..(183): n is a, c, g, or t
  misc_feature (185)..(186): n is a, c, g, or t
  misc_feature (188)..(191): n is a, c, g, or t
  misc_feature (193)..(206): n is a, c, g, or t
  misc_feature (211)..(211): n is a, c, g, or t
  misc_feature (213)..(213): n is a, c, g, or t
  misc_feature (215)..(215): n is a, c, g, or t
  misc_feature (218)..(218): n is a, c, g, or t
  misc_feature (221)..(224): n is a, c, g, or t
  misc_feature (226)..(228): n is a, c, g, or t
  misc_feature (230)..(238): n is a, c, g, or t
  misc_feature (241)..(242): n is a, c, g, or t
  misc_feature (244)..(245): n is a, c, g, or t
  misc_feature (247)..(247): n is a, c, g, or t
  misc_feature (250)..(250): n is a, c, g, or t
  misc_feature (252)..(253): n is a, c, g, or t
  misc_feature (256)..(256): n is a, c, g, or t
  misc_feature (261)..(261): n is a, c, g, or t
  misc_feature (264)..(264): n is a, c, g, or t
  misc_feature (266)..(266): n is a, c, g, or t
  misc_feature (271)..(273): n is a, c, g, or t
  misc_feature (278)..(280): n is a, c, g, or t
  misc_feature (283)..(284): n is a, c, g, or t
  misc_feature (286)..(291): n is a, c, g, or t
  misc_feature (293)..(295): n is a, c, g, or t
  misc_feature (302)..(303): n is a, c, g, or t
  misc_feature (306)..(306): n is a, c, g, or t
  misc_feature (311)..(318): n is a, c, g, or t
  misc_feature (320)..(323): n is a, c, g, or t
  misc_feature (325)..(340): n is a, c, g, or t
  misc_feature (342)..(343): n is a, c, g, or t
  misc_feature (345)..(349): n is a, c, g, or t
  misc_feature (351)..(354): n is a, c, g, or t
  misc_feature (357)..(357): n is a, c, g, or t
  misc_feature (362)..(363): n is a, c, g, or t
  misc_feature (367)..(367): n is a, c, g, or t
  misc_feature (427)..(427): n is a, c, g, or t
  misc_feature (2196)..(2196): n is a, c, g, or t
  misc_feature (2472)..(2472): n is a, c, g, or t
  misc_feature (2490)..(2490): n is a, c, g, or t
  misc_feature (2492)..(2492): n is a, c, g, or t
  misc_feature (2494)..(2494): n is a, c, g, or t
  misc_feature (2499)..(2499): n is a, c, g, or t
  misc_feature (2503)..(2503): n is a, c, g, or t
  misc_feature (2513)..(2515): n is a, c, g, or t
  misc_feature (2518)..(2518): n is a, c, g, or t
  misc_feature (2521)..(2521): n is a, c, g, or t
  misc_feature (2527)..(2528): n is a, c, g, or t
  misc_feature (2539)..(2540): n is a, c, g, or t
  misc_feature (2542)..(2542): n is a, c, g, or t
  misc_feature (2547)..(2548): n is a, c, g, or t
  misc_feature (2550)..(2550): n is a, c, g, or t
  misc_feature (2557)..(2557): n is a, c, g, or t
  misc_feature (2589)..(2589): n is a, c, g, or t
  misc_feature (2591)..(2614): n is a, c, g, or t
  misc_feature (2616)..(2616): n is a, c, g, or t
  misc_feature (2618)..(2618): n is a, c, g, or t
  misc_feature (2620)..(2637): n is a, c, g, or t
  misc_feature (2639)..(2646): n is a, c, g, or t
  misc_feature (2648)..(2649): n is a, c, g, or t
  misc_feature (2651)..(2653): n is a, c, g, or t
  misc_feature (2655)..(2655): n is a, c, g, or t
  misc_feature (2657)..(2657): n is a, c, g, or t
  misc_feature (2659)..(2674): n is a, c, g, or t
  misc_feature (2676)..(2690): n is a, c, g, or t
  misc_feature (2692)..(2692): n is a, c, g, or t
  misc_feature (2694)..(2694): n is a, c, g, or t
  misc_feature (2698)..(2698): n is a, c, g, or t
  misc_feature (2700)..(2702): n is a, c, g, or t
  misc_feature (2704)..(2713): n is a, c, g, or t
  misc_feature (2715)..(2715): n is a, c, g, or t
  misc_feature (2717)..(2721): n is a, c, g, or t
  misc_feature (2723)..(2740): n is a, c, g, or t
  misc_feature (2742)..(2744): n is a, c, g, or t
  misc_feature (2746)..(2746): n is a, c, g, or t
  misc_feature (2748)..(2748): n is a, c, g, or t
  misc_feature (2750)..(2750): n is a, c, g, or t
  misc_feature (2753)..(2754): n is a, c, g, or t
  misc_feature (2756)..(2757): n is a, c, g, or t
  misc_feature (2759)..(2763): n is a, c, g, or t
  misc_feature (2765)..(2767): n is a, c, g, or t
  misc_feature (2769)..(2769): n is a, c, g, or t
  misc_feature (2773)..(2773): n is a, c, g, or t
  misc_feature (2777)..(2777): n is a, c, g, or t
  misc_feature (2779)..(2779): n is a, c, g, or t
  misc_feature (2783)..(2784): n is a, c, g, or t
  misc_feature (2786)..(2786): n is a, c, g, or t
  misc_feature (2788)..(2810): n is a, c, g, or t
  misc_feature (2812)..(2824): n is a, c, g, or t
  misc_feature (2826)..(2827): n is a, c, g, or t
  misc_feature (2829)..(2829): n is a, c, g, or t
  misc_feature (2831)..(2840): n is a, c, g, or t
  misc_feature (2843)..(2858): n is a, c, g, or t
  misc_feature (2861)..(2861): n is a, c, g, or t
  misc_feature (2866)..(2870): n is a, c, g, or t
  misc_feature (2873)..(2873): n is a, c, g, or t
  misc_feature (2875)..(2903): n is a, c, g, or t
  misc_feature (2905)..(2905): n is a, c, g, or t
  misc_feature (2907)..(2910): n is a, c, g, or t
  misc_feature (2912)..(2912): n is a, c, g, or t
  misc_feature (2914)..(2914): n is a, c, g, or t
  misc_feature (2916)..(2947): n is a, c, g, or t
  misc_feature (2949)..(2950): n is a, c, g, or t
  misc_feature (2952)..(2952): n is a, c, g, or t
  misc_feature (2954)..(2954): n is a, c, g, or t
  misc_feature (2956)..(2956): n is a, c, g, or t
  misc_feature (2958)..(2958): n is a, c, g, or t
  misc_feature (2961)..(2968): n is a, c, g, or t
  misc_feature (2970)..(2981): n is a, c, g, or t
  misc_feature (2986)..(3017): n is a, c, g, or t
  misc_feature (3019)..(3038): n is a, c, g, or t
  misc_feature (3040)..(3040): n is a, c, g, or t
  misc_feature (3042)..(3046): n is a, c, g, or t
  misc_feature (3049)..(3056): n is a, c, g, or t
  misc_feature (3058)..(3058): n is a, c, g, or t
  misc_feature (3060)..(3061): n is a, c, g, or t
  misc_feature (3063)..(3067): n is a, c, g, or t
  misc_feature (3069)..(3070): n is a, c, g, or t
  misc_feature (3072)..(3090): n is a, c, g, or t
  misc_feature (3092)..(3101): n is a, c, g, or t
  misc_feature (3103)..(3104): n is a, c, g, or t
  misc_feature (3106)..(3120): n is a, c, g, or t
  misc_feature (3122)..(3123): n is a, c, g, or t
  misc_feature (3125)..(3131): n is a, c, g, or t
  misc_feature (3133)..(3135): n is a, c, g, or t
  misc_feature (3139)..(3152): n is a, c, g, or t
  misc_feature (3154)..(3172): n is a, c, g, or t
  misc_feature (3174)..(3177): n is a, c, g, or t
  misc_feature (3179)..(3182): n is a, c, g, or t
  misc_feature (3184)..(3184): n is a, c, g, or t
  misc_feature (3186)..(3186): n is a, c, g, or t
  misc_feature (3188)..(3189): n is a, c, g, or t
  misc_feature (3191)..(3195): n is a, c, g, or t
  misc_feature (3197)..(3197): n is a, c, g, or t
  misc_feature (3199)..(3199): n is a, c, g, or t
  misc_feature (3201)..(3208): n is a, c, g, or t
  misc_feature (3210)..(3263): n is a, c, g, or t
  misc_feature (3265)..(3275): n is a, c, g, or t
  misc_feature (3277)..(3301): n is a, c, g, or t
  misc_feature (3303)..(3303): n is a, c, g, or t
  misc_feature (3305)..(3308): n is a, c, g, or t
  misc_feature (3310)..(3310): n is a, c, g, or t
  misc_feature (3312)..(3319): n is a, c, g, or t
  misc_feature (3321)..(3321): n is a, c, g, or t
  misc_feature (3325)..(3325): n is a, c, g, or t
  misc_feature (3327)..(3334): n is a, c, g, or t
  misc_feature (3336)..(3336): n is a, c, g, or t
  misc_feature (3338)..(3339): n is a, c, g, or t
  misc_feature (3341)..(3341): n is a, c, g, or t
  misc_feature (3343)..(3343): n is a, c, g, or t
  misc_feature (3345)..(3348): n is a, c, g, or t
  misc_feature (3350)..(3350): n is a, c, g, or t
  misc_feature (3352)..(3371): n is a, c, g, or t
  misc_feature (3373)..(3385): n is a, c, g, or t
  misc_feature (3387)..(3387): n is a, c, g, or t
  misc_feature (3389)..(3389): n is a, c, g, or t
  misc_feature (3391)..(3394): n is a, c, g, or t
  misc_feature (3396)..(3396): n is a, c, g, or t
  misc_feature (3398)..(3415): n is a, c, g, or t
  misc_feature (3417)..(3417): n is a, c, g, or t
  misc_feature (3419)..(3429): n is a, c, g, or t
  misc_feature (3431)..(3431): n is a, c, g, or t
  misc_feature (3433)..(3463): n is a, c, g, or t
  misc_feature (3465)..(3465): n is a, c, g, or t
  misc_feature (3467)..(3467): n is a, c, g, or t
  misc_feature (3469)..(3469): n is a, c, g, or t
  misc_feature (3471)..(3474): n is a, c, g, or t
  misc_feature (3476)..(3501): n is a, c, g, or t
  misc_feature (3503)..(3503): n is a, c, g, or t
  misc_feature (3505)..(3505): n is a, c, g, or t
  misc_feature (3507)..(3533): n is a, c, g, or t
  misc_feature (3535)..(3535): n is a, c, g, or t
  misc_feature (3537)..(3537): n is a, c, g, or t
  misc_feature (3539)..(3547): n is a, c, g, or t
  misc_feature (3549)..(3549): n is a, c, g, or t
  misc_feature (3551)..(3555): n is a, c, g, or t
  misc_feature (3558)..(3558): n is a, c, g, or t
  misc_feature (3560)..(3560): n is a, c, g, or t
  misc_feature (3562)..(3562): n is a, c, g, or t
  misc_feature (3564)..(3570): n is a, c, g, or t
  misc_feature (3572)..(3616): n is a, c, g, or t
  misc_feature (3618)..(3618): n is a, c, g, or t
  misc_feature (3620)..(3623): n is a, c, g, or t
  misc_feature (3625)..(3626): n is a, c, g, or t
  misc_feature (3628)..(3630): n is a, c, g, or t
  misc_feature (3632)..(3635): n is a, c, g, or t
  misc_feature (3637)..(3640): n is a, c, g, or t
  misc_feature (3642)..(3652): n is a, c, g, or t
  misc_feature (3654)..(3658): n is a, c, g, or t
  misc_feature (3660)..(3664): n is a, c, g, or t
  misc_feature (3666)..(3696): n is a, c, g, or t
  misc_feature (3698)..(3698): n is a, c, g, or t
  misc_feature (3700)..(3700): n is a, c, g, or t
  misc_feature (3702)..(3706): n is a, c, g, or t
  misc_feature (3708)..(3718): n is a, c, g, or t
  misc_feature (3720)..(3721): n is a, c, g, or t
  misc_feature (3723)..(3728): n is a, c, g, or t
  misc_feature (3730)..(3753): n is a, c, g, or t
  misc_feature (3755)..(3755): n is a, c, g, or t
  misc_feature (3757)..(3757): n is a, c, g, or t
  misc_feature (3759)..(3770): n is a, c, g, or t
  misc_feature (3772)..(3772): n is a, c, g, or t
  misc_feature (3774)..(3774): n is a, c, g, or t
  misc_feature (3776)..(3794): n is a, c, g, or t
  misc_feature (3796)..(3796): n is a, c, g, or t
  misc_feature (3800)..(3817): n is a, c, g, or t
  misc_feature (3819)..(3826): n is a, c, g, or t
  misc_feature (3828)..(3829): n is a, c, g, or t
  misc_feature (3831)..(3836): n is a, c, g, or t
  misc_feature (3838)..(3839): n is a, c, g, or t
  misc_feature (3841)..(3842): n is a, c, g, or t
  misc_feature (3844)..(3844): n is a, c, g, or t
  misc_feature (3846)..(3846): n is a, c, g, or t
  misc_feature (3848)..(3855): n is a, c, g, or t
  misc_feature (3857)..(3860): n is a, c, g, or t
  misc_feature (3862)..(3862): n is a, c, g, or t
  misc_feature (3864)..(3869): n is a, c, g, or t
  misc_feature (3871)..(3871): n is a, c, g, or t
  misc_feature (3873)..(3873): n is a, c, g, or t
  misc_feature (3875)..(3880): n is a, c, g, or t
  misc_feature (3882)..(3882): n is a, c, g, or t
  misc_feature (3884)..(3893): n is a, c, g, or t
  misc_feature (3895)..(3902): n is a, c, g, or t
  misc_feature (3904)..(3916): n is a, c, g, or t
  misc_feature (3918)..(3918): n is a, c, g, or t
  misc_feature (3920)..(3936): n is a, c, g, or t
  misc_feature (3938)..(3942): n is a, c, g, or t
  misc_feature (3944)..(3952): n is a, c, g, or t
  misc_feature (3954)..(3954): n is a, c, g, or t
  misc_feature (3956)..(3956): n is a, c, g, or t
  misc_feature (3958)..(3961): n is a, c, g, or t
  misc_feature (3963)..(3963): n is a, c, g, or t
  misc_feature (3965)..(3965): n is a, c, g, or t
  misc_feature (3969)..(3974): n is a, c, g, or t
  misc_feature (3976)..(4000): n is a, c, g, or t
ntnnnngngtnnnnnnannnnnnnnnnnannnnngnnnnananaagaanaanaagagannaaaagannannnnnnnnnnnnannnnnnnnnaaanannannnnnnnnannnnnnnnnntnnnnnannnnnnnnnnnnnnnnnntttnttntnttnttttttnnnnnnnnnnnnnnnnnnnnnntnntnnnnannnnnnnnnnnnnnaaaanananatngannnntnnntnnnnnnnnnganngnnangangnngangaggnggnanaggannnagaannngannannnnnnannncagcagnnacnacgannnnnnnngnnnntnnnnnnnnnnnnnnnngnngnnnnngnnnntantaatnntaanaataataataataataataataataataaggatgatgatgatgaaaatgcgagcgaactngaagaacgtcttctcgatgttacaattcaatggaagagaagacggttggtcgtgcacgagtggaggacggtgagagatagaagcggagctcgattagaagaagaagaagaagataaactcgtgggtgtcggtggcggaaaagagggcaagctgtattttgatatccttttgtcgtttttagggacgtctggggacgagtctcttctgttgagaaagatgtggacgcgagtcgttcgtcacgagaaaaggctcgacgtatttttgaaagacgactttggaggcgacgacgggaggaaaaggaggagcaggaacgcgatgatgattacggcgaaggacgcggacgtgttgatgtcggcaccgtgccggtttccgtttttgaaagacgagagcgagagttgcgacggtaaatacagttacgataaaagacacgagagagagaaaaaggacgacttgagagaaaacttccgagcgaacgggtatttgattgctgacggtggtaccgctgcgaaaggaacgagcagttgtcgagtgtcaaaaacgctcgttgattcgtttcgaatgaaaacgcacgagagaatcgaggtaattttaagcgccctgcgagagaatcattcgcacgtttctgttggaaccgacgcgtttgcttataaagaaatcgggagtcgagggaagtatcgattcgacgcgttattcgataaagaaaaggaggaggaagatgcactttttaagttcgctaaatcagacgcgccgtgggtggaaccggtgaaggatattttacggaacgcagaagatatagacattaacatatccatcgtttggacggaaccgaactgttcagaccaagagtggcattgcgacggcgcgcacagaggcgaccaggaaacgtacgacgaacaaacgggcgctttagtcaaaacgcacggtccaccgtacgccgtgtgtgtattcatgaccctcctcgatttggacgatacggttggatacacagaattttggccaacttcgcataaaaatgccggtttactcgggttcggagcagccgcgcacgctttaggtggcgtgcaatcgaacaaaaacgctaaagcgggagattgggtcgtgtacgattatcgattgatgcacagaggcatcggaaacgaaagtaaagacacgcggcgaccgatattgcagtttatgtatgccgtggacgggtataaagaacggaaaaattacggccagaagagtgtgtttagtccctgttgaaggtgtcgtcgtttgcgacgacacgtgtatttttattagtgctgctactgcatctgtgcgctacgtgctactactaccaccactcccacttgtgcgactcctactttcctctaagctctccgacatccgtctcctcttctccctcgcttttctcctcgcctcctccgccgtgacatttttaggtaaaccaacgctctcaaagttcccaacttcctctcgtaacccctcgtgtacaatcttcacgtccccacctcctgagctcgtcacgttcgccatcctctcgtacgcgatgccgtagttttcgcacatgtaaattctcgtgcgagcgtaatcaatcgctttttgcacgtgcgcgtggtctttcaagaatcggttttctctgaatcgattcttgcactccgaggtgatgtattccgcctctttaaggctatcgcgtttcatttttctcgccaagcgaaacatgtgccggaaaagcgagaacacttccgccctttgaagaagcgaagaagacggagaagacatgagtnttacgaacgagtttttgtgcgcgcgcgtaatgatgtgtgacgaattcgtggaagtacttctcttcggggattttcaaatctattttactcttcgtcttcgctctcgtcctctaagttcgccgcggcgtacatctgtttcgtaaacaccggcctcgtcgatcgactggctcgtccaccggcgatgatgtttgactggtcgacttcgtcgccggataaatcgtcgatgacgtctgagttttccgaatccgaatcatcttgtttcttcttcttcttctncttcttcttcttcgtgtntntnttttncttnttttgcttcnnntcnccntcgtcnnccgtgctctcnncntcctnntnataaatnttatgcgcacagagagagagagagagagaganannnnnnnnnnnnnnnnnnnnnnnngngngnnnnnnnnnnnnnnnnnncnnnnnnnncnncnnnananannnnnnnnnnnnnnnnannnnnnnnnnnnnnnananacanannncnnnnnnnnnnanannnnnannnnnnnnnnnnnnnnnncnnnanananaannannannnnnannnanaaanaaananaaannanannnnnnnnnnnnnnnnnnnnnnncnnnnnnnnnnnnntnngngnnnnnnnnnntcnnnnnnnnnnnnnnnnctntctcnnnnnccncnnnnnnnnnnnnnnnnnnnnnnnnnnnnntntnnnntntntnnnnnnnnnnnnnnnnnnnnnnnnnnnnnnnnannananananacnnnnnnnnannnnnnnnnnnnaaaannnnnnnnnnnnnnnnnnnnnnnnnnnnnnnnannnnnnnnnnnnnnnnnnnntntnnnnnatnnnnnnnntntnntnnnnncnntnnnnnnnnnnnnnnnnnnnannnnnnnnnnannannnnnnnnnnnnnnngnngnnnnnnngnnngagnnnnnnnnnnnnnncnnnnnnnnnnnnnnnnnnntnnnngnnnnanananncnnnnnananannnnnnnngnnnnnnnnnnnnnnnnnnnnnnnnnnnnnnnnnnnnnnnnnnnnnnnnnnnnnntnnnnnnnnnnntnnnnnnnnnnnnnnnnnnnnnnnnntntnnnntntnnnnnnnngngtgngnnnnnnnntntnntntntnnnntntnnnnnnnnnnnnnnnnnnnnannnnnnnnnnnnngngngnnnnanannnnnnnnnnnnnnnnnngngnnnnnnnnnnntntnnnnnnnnnnnnnnnnnnnnnnnnnnnnnnntntntntnnnntnnnnnnnnnnnnnnnnnnnnnnnnnncncncnnnnnnnnnnnnnnnnnnnnnnnnnnntntntnnnnnnnnncncnnnnnttntntntnnnnnnncnnnnnnnnnnnnnnnnnnnnnnnnnnnnnnnnnnnnnnnnnnnnnanannnntnnannnannnntnnnntnnnnnnnnnnngnnnnngnnnnngnnnnnnnnnnnnnnnnnnnnnnnnnnnnnnntntntnnnnntnnnnnnnnnnngnntnnnnnnannnnnnnnnnnnnnnnnnnnnnnngngngnnnnnnnnnnnntntntnnnnnnnnnnnnnnnnnnntntttnnnnnnnnnnnnnnnnnngnnnnnnnngnnannnnnnannannananannnnnnnngnnnngngnnnnnngngngnnnnnngngnnnnnnnnnngnnnnnnnntnnnnnnnnnnnnngngnnnnnnnnnnnnnnnnntnnnnntnnnnnnnnnananannnnananagannnnnnannnnnnnnnnnnnnnnnnnnnnnnn

SEQ ID NO: 902 - DNA, 4000 bp, Escherichia coli
  misc_feature (339)..(339): n is a, c, g, or t
  misc_feature (355)..(355): n is a, c, g, or t
  misc_feature (611)..(611): n is a, c, g, or t
  misc_feature (671)..(671): n is a, c, g, or t
  misc_feature (749)..(749): n is a, c, g, or t
  misc_feature (1985)..(1985): n is a, c, g, or t
  misc_feature (2024)..(2024): n is a, c, g, or t
ttaccaattacactaattttttctttatagaaaatccctgaaggaattaaatgtaatttatacgttacgccgtcgaatttaatggtatgtccggcgttatctccgccttggtaacgagcgatcacttctgcgttttcacttagaaagtctgtaatttttcctttaccttcgtcgccccattgcgttccaacaactactactgatgacattcgaacacctcgttcataatttttttgtcctgaatcattgtaccagtaaaaccagtccctttcaagggtaaaaatcgaatattctttcacaatcaaaagcgtttctgtcaaaaatacgaacatttttagntatgtttttgtaaaanaataaaatatacgaatattgttcgtgttttactctctgattttaatcccttaataagcaaaaaaacgaactcaaaaaatgagttcgttttttaaaattctgtcctcggcgaaagcgaagaaaatttattatattctttaatgaaaagtaattcgaccgttccacgcgcaccactacggtttttctcaatgatgacttctacaacattgtcaacttctggtggctcatgatcgccgtcttctccttcaccacgatcntagtaatcatcacgataaagaaaggcaacgatatcggcatcttgctcaatggaacctgantcacgaatatcacttaacacaggacgtttatcttgacgttgttccacgccacgagaaagctgtgacaaagcgataacngggacttttaattctttcgctaatttttttaattgacgtgaaatatcagaaacctcctgttggcggttctcttttccagttccttcaatcaattgtaggtagtcgatcaaaattagacctaagttgcctttttcttgtgctaatttacgacatttcgcacgaatttcggtaattttaatccctggtgtgtcatcaatatagatattcgcacgggacaaactacccatcgcaataattaagttttgccattcttcttcagataattgccctgttcttaaatggctggcctcaatggatccttctgcacaaagcatccggttcactaatgattctgcccccatttctaaactaaaaatagcgacagctttatctgttttggtgccgacattttgggcaatatttaatgcaaaagcggttttccctaccgctggacgggccgctaaaataattagctcttccgcttgcaagccggcagtcattttatccaatgcttgatagcctgtaggtaaaccagtaatctcttcatcattttggtataattggtcaatattcgcaatagttgtatttagaacatctgaaattgataaaaagccactacgattccgcttttcggagacttctaaaatgcttcgttctgcatcatccaaaatagattcaacatcttcaccttgctcaaagcctttagttacaatctctgtagcggtttggattaagttgcgcagcaacgatttttgttcaacaatttttgcataataaatgacattggcagctgtcggcacagctaaagctaaatctgacagataacttagtccaccaacatcttctaacaaattctcttgttctaggcgatctttgattgttaccacatcaatcgcttcatttcggtcgcttaaggtcatcatcgtttggaaaatcaactgatgactacgacgatagaaatctttaggttccacatattccatcgcttctattagcacatctgcatctaagaaaatagaacctaaaacggcttgttccgcttcaatattttgtggcggtaccctatcttgcaataattcattcattttgttctctcccacgatgtcttactttctggttcatttagtctatccattttaacacaatttcattaaaaaaagtacattttttctctgctgatttctctatttttagttcactttccaattttaaaaaatatacaattaataaaaatataatacttttgttaatttaaantgttgtatatttgatttttaaatattataaaaataattngagtaatttattttgtataaaaaagaagccggagaaatcggcttcttttttatcgattgtattattccgctacgacatgaaccttaattttcgctgtaacttcatgatgtagtttgactggtacgttagtgtaacctagagaacgaattgggttggctaattcgattttgcgtttatccaattttacattgtattgtttgtttaaggcttctgcaatttgttttgaaggaattgagccaaataaacggctgtcttctccagcttttgccttgatctctacaacagtcttttcatcttctaaaaaggcttgcatttcttttgcttgtgctaaaacttctgcttcatgtttttcttgggctttcttttgacccgctaacgcactcatgctccctttattggcttctttcgcataaccatttttaattaaaaagttttgggcgtaaccagttggcacttcttttacgtcccctttttttccttttcctttaacgtcttgtaaaaaaatgactttcatttccttcactcctgttcatacatttcattaatattttgacgaattacatcaagtagttgctcttttacttctgctactgttacgtttgataattgtactgccgcattagtaaagtgaccgccaccacctaaattttccataataatttggacattaattgaaccattactccgagcactaatgccaatctgttgatccgtccgcttggtaatgacaaatgctgcattaatccctgccatagaaagtaatgtgtccgctgttttggcagctgtgacactatcatattctttgtcttcactcccggcaacaacgacggtatcttttgtgacatattcgcttttagagattaagttgttcatttccagatagcttgtaagatcagaacttaatagatattgtactaaagatgagtctgctccacaagttcgtaaataactagccacatcaaatgttcgcgccgtcgttcgtgtattgaaacttttcgtatcaaccacaattcccgccaacatcatggttgcttcaaaggcctgcagtttatttgcgctattactttggtattcgatcaattctgtgactaattctgaagcagaagaggcagaagattcaatataagaaagcaagggttttgctggaaattcgtctcctcgtcgatggtgatcaatgattaccactttatcaaaacgctcatagagctcttgtgagatcgatagagacggtttatggtaatctaccataactaataagctactttctttcttgcgcttcatggcctctttaggactaataatgcgctcttctaattctgggtactctttaatcgcctctaacactcttttgacatcgggaatgatttcattttcatctaaaacaatccacgcttttcgattattaaacgaggctaaacgagcaacaccaaatgctgaacctaacgcatccatatctggataacgatggcccataatatagatgtcagcagattccgcaataattcccttaattgccatgctcattgcgcgagaacgtacttgggaacgtttcgtcgttactgccgtttttccaccaaaaaataacggcttcgcttcatctttggcttcttttacaaccacttgatcgccgccacgtactaaagctgtatctaggtttgtttgagccgtggtcccggtttgatctaaggttggccccccataagcaatccccatacttaacgtaatggctacttcatggttagctgattccttacggatcgtatccaaaatagaaaatttttcgtccatcattttttgaatatcttcccattgggcaatgaaaaaataacgttctgcgttgattcgcttataaaaaactttgtattggtccatccaatcagaaaccatcgtcgtaatgaaactattcaaataagaaatttctttctcatccattgtatcggtgacatcatcataattatcgacagacacaatgccaa

SEQ ID NO: 903 - DNA, 4000 bp, Escherichia coli
  misc_feature (1992)..(1992): n is a, c, g, or t
ggctgagcgggcacgacgcacgatggcgttcaggtcgtcgtcggcgcttggcacttcgcctcggccgtagccgtcgacgccgaggacgaattcgccaccgacaccggtgaccgtgatcgtctggatctcagcgattggggctgtgcggccttgacgctcggtgtcgatcttgacgaaggccgagttgtctgggttcggtgtcaggttcgagccagcttcgttccaaacgatctgttcccagttgtaaccggcttgggagcgcaagaaggtaacggtgtagcggacgtcggtcgaggtgcgttctgcggtgacgtcgatgccttcgattccgaacaggtaacgcaggcgttcttcgaacccttcagcgtcgaggccgtactcgaagcggcgggtccgctcgatgccatcgatatcgatgccagtcagttcgtagtcgcccttgtttgcctggactaaaatcgtctggatctcaggaaccgatggcatgtcaattccagaaaccgtgttctgggtgacggtgagtttgttgtcgttgtcgtcgccagagtcatcgatggtgacgatgtcgccgagacggccgatcgaagagatctcgtaggtcgatgtgttgtcgagcgccacgccaaaggcttggtcgatctcgaaggtcgtagcggtgttaccgacgatgagtgcttgctgtccagcaccggtgccgccagtgatcgtgatggtcgagccgctcaggtccaccacatacttggtgcggttgactttcaggcttttgtcatcgctgtacaggttgcccgaccattcgcggttcactaggtcgtcggtgtcgatgctcacgacgtagcgggcacagacgccgtcgatgtcgcacaggcggtagttgaagacgaaaacatcgaagtcatcgaagttgtcgttggcgatgaaggtgacgttgccggttggatcggcgaatggggcagtgtctgcatttgcgatggccacatcgacgatgagcgtgccgatgtcggtttgggtgcggacatcaacggtcgtgcggcgacgatccactgcattgccgatgtcaactgggttctgtgcgttggtgtctgtgattgtcttggtgtcagcgtcgtagccattgactgggcctgcacctgtgccgctgtctgggccaagcacgctgccaacgatgcggtcgctgccgccgttgatagtcaggatcgcactgatcgaatcggcgtagtgagcgaagtctggggccttgaccacgtcgacgccgtcgttgatgtcggcggcaaagttgacgccggtacccacgttgacggtgtcgttgtttgcgccagtgttgatctcggtgtgaccaccgatgctgcgcacattgaaggtgtcataaccagcaccgctggtgatgatggtcgcaccttcgtgggtcgagtcgatcgtgaatcggttgttgccctgacccagctcgatgtcgagttcttccacgtcgaagtaggtcactcccccatcaaggcgcaggccagcaataacggcgtcgccacccaaaccaaggccggtgagacggtcctcagtcaggtaaccaacatcgtcggcggggctgttcttatggaagatattaagcgtgtcgacctggtcggcttcgaggacacgttcattcggattgagcggcgtgatcgaataatcgattccagcggctggtacatcgccacccggccaagcactcgtgaaggtaaccgtcgtacccgacacgacaggagcgagattcccttgattcccgcggatctgacgggcgaattcgttggtcagatcttcgatactgcggatgttgttggtagcgccattgacgtcgtaggtcttgccgcccacaacaatctgccaggcgccggtgtagtcgccgctgaagaagaagccggccttgttccatttgacgcccgctgcagtcgaggtaaccggcgtaccgctgacaatcacggcgccatcggtagtgacggaatcaccgttgcgatcatgaccggnaacaacattgatgcctgcgccgctgttgcccagggtgaacggcgtcgttgattggatgacgatccggacgttcccgaggagtccaatggcgatgttggcggtgtagttgctgcgctcattgatgtcagccaccaggagcttggcggcaccaacgagggatgcatcatcggcgctgaggcggccgctggtgtaggtcgtggtgccaatgacgagcttccactcttcgccaaattcatcgttgtcgtcggtgatggttgggtcatcggtgaagccgtggaccttcgaggcagtgagttcgagggtggcctgcgtccattcgatcgtgtcggacagatcgccctggtcgggagttccctggaaggtgagttcgccgtcgcctgcagtgaacgaggtgacatcgaaggaattctcgacgtcgacgagcgacaagatgtcggcggaaacaccgtcggggttgacgtcaagttctgtttcttggaatgtgaccgggtcgatgaaggtgacgacgtagctgaagtcgtccatacgagggtcaaagccaggacgttcgcctgtggttgcgttgacatgatctgcgagtgggtcgaccagcacgccgtcacccgcgttgagagcacccagatcgaccgtcgttgcacccacgccgaagtcactgtcactgatgaaaccttcagggcgcagcaggttggtttctgttggcagaccgaacgggtcgttgatctgttgttcggagccctcagggataccaccctggatagtcagtggaccacggatggcattgactcgttcttcgaacgctgggaacacgagtgcgtcgccgccgtcgatgaagtcgtcatcgacagccatgacccagacggtttggcgcttattccaggcgttgtcagcgccgccatcagcaacaaactcgaggaacgattggaccgttgcggttgtagatggatcgacgttcgagttcacgcttgcggtgacgtccgcgatccggacaccatccttgcgggcgatggtcagaactcgaccggtcaccagcacgtcgtagctaccggacgctgcaatggctgcggcgatcgcagcagcggcaacgtcggggccttcacggaaacgagcggtataggtgtaggtgtcagcagccgccgggccgagtttcagtgtccagatttcgccgacctgggtgaagccgccgaactcgatggcgagtcggtccgtgattggcagtgtcttgaacggaggctcaatgacaccgttctcacaacgtcggtcctcgagctcgcctgagtcgcagcgatcgatggtgatggtgccgcgaccctgtgtaaatgcggtagagacgctgatgtcggtcgagacgaagaacttgccggtcaggccagtcgcagtgaccggtacaccggtcaggctgatgatcgaaccggccaccgtggcgctaacgccggttgttgctgtccgcaggttgacctccgcacccaaggtttgggccgcagatgcagccgatgttgcgccggttatcgaaacgatttcaggtgtgacgacagggcggccatcggaatcgaccgggcgcaggaccacagtccagatctgcgaggcctcgacgacgccgtcgatctcgattgttgccttggtcgtcgctaccgcgacctggacttcttctttctggccgaaaccggcgcgagcgtcaaacaccaagtcggagtcaaacgtgcgggtcggacgtgggctgacattcacggtgacgagactgtccggggcgccggtcagcacgacgtcatagctgtcggtgagcgggctgttgtcgccgaacgtgtcctgggtggtcccgtcggtgtacgggtcagtggtgatctcgaacgtgtcctcggctttgacattatcgctgatcgaaccttcaaggatgtaggtctggtattcggcgttgtagccagcgatcacgccggcctcgcccttgccgtcgccgtctatgaaggtgacgaccttgccgacgaggtctatttgtgacttgtttgcttcatgg

SEQ ID NO: 904 - DNA, 4000 bp, Escherichia coli
  misc_feature (6)..(6): n is a, c, g, or t
  misc_feature (12)..(12): n is a, c, g, or t
  misc_feature (18)..(18): n is a, c, g, or t
  misc_feature (21)..(21): n is a, c, g, or t
  misc_feature (72)..(72): n is a, c, g, or t
  misc_feature (75)..(75): n is a, c, g, or t
  misc_feature (87)..(87): n is a, c, g, or t
  misc_feature (93)..(93): n is a, c, g, or t
  misc_feature (120)..(120): n is a, c, g, or t
  misc_feature (129)..(129): n is a, c, g, or t
  misc_feature (149)..(149): n is a, c, g, or t
  misc_feature (165)..(165): n is a, c, g, or t
  misc_feature (168)..(168): n is a, c, g, or t
  misc_feature (174)..(174): n is a, c, g, or t
  misc_feature (177)..(177): n is a, c, g, or t
  misc_feature (204)..(204): n is a, c, g, or t
  misc_feature (228)..(228): n is a, c, g, or t
  misc_feature (252)..(252): n is a, c, g, or t
  misc_feature (273)..(273): n is a, c, g, or t
  misc_feature (315)..(315): n is a, c, g, or t
  misc_feature (318)..(318): n is a, c, g, or t
  misc_feature (369)..(369): n is a, c, g, or t
  misc_feature (375)..(375): n is a, c, g, or t
  misc_feature (387)..(387): n is a, c, g, or t
  misc_feature (402)..(402): n is a, c, g, or t
  misc_feature (405)..(405): n is a, c, g, or t
  misc_feature (411)..(411): n is a, c, g, or t
  misc_feature (435)..(435): n is a, c, g, or t
  misc_feature (441)..(441): n is a, c, g, or t
  misc_feature (450)..(450): n is a, c, g, or t
  misc_feature (462)..(462): n is a, c, g, or t
  misc_feature (465)..(465): n is a, c, g, or t
  misc_feature (468)..(468): n is a, c, g, or t
  misc_feature (474)..(474): n is a, c, g, or t
  misc_feature (477)..(477): n is a, c, g, or t
  misc_feature (483)..(483): n is a, c, g, or t
  misc_feature (488)..(488): n is a, c, g, or t
  misc_feature (498)..(498): n is a, c, g, or t
  misc_feature (512)..(513): n is a, c, g, or t
  misc_feature (534)..(534): n is a, c, g, or t
  misc_feature (573)..(573): n is a, c, g, or t
  misc_feature (582)..(582): n is a, c, g, or t
  misc_feature (645)..(645): n is a, c, g, or t
  misc_feature (665)..(666): n is a, c, g, or t
  misc_feature (672)..(672): n is a, c, g, or t
  misc_feature (724)..(724): n is a, c, g, or t
  misc_feature (793)..(793): n is a, c, g, or t
  misc_feature (797)..(797): n is a, c, g, or t
  misc_feature (800)..(802): n is a, c, g, or t
  misc_feature (806)..(806): n is a, c, g, or t
  misc_feature (968)..(968): n is a, c, g, or t
  misc_feature (1142)..(1142): n is a, c, g, or t
  misc_feature (1241)..(1241): n is a, c, g, or t
  misc_feature (1409)..(1409): n is a, c, g, or t
  misc_feature (1508)..(1508): n is a, c, g, or t
  misc_feature (1806)..(1806): n is a, c, g, or t
  misc_feature (1986)..(1986): n is a, c, g, or t
  misc_feature (2729)..(2729): n is a, c, g, or t
  misc_feature (2828)..(2828): n is a, c, g, or t
  misc_feature (2909)..(2909): n is a, c, g, or t
  misc_feature (2966)..(2966): n is a, c, g, or t
  misc_feature (3150)..(3150): n is a, c, g, or t
  misc_feature (3290)..(3290): n is a, c, g, or t
  misc_feature (3512)..(3512): n is a, c, g, or t
  misc_feature (3524)..(3524): n is a, c, g, or t
  misc_feature (3579)..(3579): n is a, c, g, or t
  misc_feature (3686)..(3686): n is a, c, g, or t
  misc_feature (3869)..(3869): n is a, c, g, or t
  misc_feature (3895)..(3895): n is a, c, g, or t
  misc_feature (3991)..(3991): n is a, c, g, or t
ttgccnaaaccncatttnggncaatggaacttgccgatatgtgaatactgataatagtcatagacaagctcngtntcgcagaaaggncagaanttgccctcgcccacctcataaggcttntccgttgcnccctgatatctgtcaacgcngaaatagtggatattnttnttattnggnttagcaagtccaagtcttgccacgttngggtcatcggcattgagaacaacnttgccctcaaatgtttcaaggaantttttcactttgagaatgagngtttccacctcgccgtttctgtcaagctggtcacggaagaanttnagcagaacaagggtctgcaaattgagctttgaatagaccacaggaacgtgngactcntcagtttcaagnacaagataatcggcntgnactctncccctcatatcgcagtgattgagnagaagngagcatatncccgtatcaagnttnttnccctcnggntttgtnattancttctttccnccgcttgcaaaaanntggctgagatagtttgtaacngaggtcttgccgttggtgcctgtgacggcaacgataggncaatccacnttgaaagccttaaggcagtctttatttatagtccacagcacaagcccgggaaagttgcctgcntccctgccaagcaggtgcanngttttnaccataagcttgccgaaaataatggtgaaagcgttttttaaactcatttatntatctcctattaaaataaagtcgtataaaataataatagaccataacgcccataatgtcaagcattttngacnttnnnaaanaaaaaaacaccgcacaaagacgataggcgccccttgtgcggtgttggcttctatataatttttgagagaaaatctttcaaacgctgattttcagggtgtgcaaagaactctgacggcttgttctgctcgagtatttttccgtctgccataaacagaactctngaagcaacttcccttgcaaagcccatttcgtgggtaacgacaaccattgtcattccgtcgtttgcaagctgtttcataagctccagcacctcgcccaccatttcagggtcaagtgcagaagtaggctcgtcaaaaagcattacttcagggttcatcgccagtgaacgtgcgatngctattctctgcttctgaccgcctgagagccttgaaggatactcgtcagccttatcaggcagaccaactctttccaaaagctcctccgcctttttgtcngcttcatcggctgtcataaggccaagcttcacaggggcaagagtgatattcttttttattgtaagatgtgggaagaggttgaaatgctgaaaaaccatgcccattctctgtctgagcttgttcatttcatgctcgttcgcctgagtgatgttctcgccctcgaagaanatatcacctgaggtcggcttttccataaggttaagacagcggagaaaggtggattttcctgagcctgacggaccaacgataacgaccttttcgcccttntcgatagtttcgtttatatctttcagcacttcgacctcgccgaaagacttgctgagatgtttaacgtctatcactttgcgacagcctcctttcaagctttcctaccagatgagtaagcacaactaccattataaggtaaataagtgcaactgttataagcggcatgaatgccgagaacgtctgagaacggattatatctccgccctttgtaaggtcctgaattgcgatatatcctgcaacagaggtttctttaagcaaaactatgcactcgtttgcaagggcaggcagaacagttttnaaagcctgcggaagaactattgatatcattgtctgacgatagctaaggccaaggcttcttcctgcttcaaactgaccgttgtcaactgacatgatacctgaacggactatctcagccacatatgcgcctgagttcacgccgaatgcaagcacagccacaagagtcttgtctatgttcacncttccaaaaataacaaaatatgttataaggagctgaactaccataggagttcctcttatcactgtaagatacactctgcaaagggcgttgagtatcttcattttgcctgtcttatcatgagtagagcggactatagccacaagaaatcccaacacaaagccaagtatgaccgcaaagaaggttatgataagtgttgttttaagaccattggtaagataatgccaacggctctcgtccaaaaaattttgctggaaatcgtcgatcaatttgttcaattcagcacttcctgttctttatcaaaataatttcggctgccgctctacgacagccgaagtgtgaaaaattatttctttcttacgattattacctgacttgatgatgtgtaagtgtcagagaaaagaacgtttttctctctgtcaggtgtaactgtcatacctgcaacgccaacgtctgccttgcctgactgaacggctgagatgatagaatcaaatgccatatcgtctatcttaagctcataaccaagcttgtcgcaaactgcctgcatcatatcagcgtcgataccaacgaccttatcgttctctttgctctcgtatggagggaactcagcgtttgttgccattacaagcgtacccttatctctgctaacattatcaggggacttgtatgggttcttgccagcgttctcgccaacgtagtttgccttgatagcgtcaagtgttccgtcagccttaagctccttgagngcaccgttgacagctgtctgaagctcagtgttgtcaagcttcatagcgatagcgtattcttcctcagcaaaaggctcgtcaagtatttcaagatcgtcnttcttctcaacgaataccttagcaggctcagcgtcgattataacagcgtctatcttgccctgcttcagagcctgaacagcntcagcgcccttgttgtatttttctaccttagcgtccttaacgtcctcggcatagatntcgcctgttgttccaagctgaacaccgatagtcttgccctccagatcgtcaacgctgtgaactgtattagcaggcactccgcagcctgcaagcattgtaacgctcattgccactgcaataagtcctgctgcaaatttcttcataacatacattcctttcaaaaattgatagcgacagccctccnataccgactgtgcataaacctatatcatatattataactgaacacacggctttttgcaatagcttttatcagtgatttaatatataaattatgaattttttgttttgccaaaccattttagtaaacaaaaaaggtatccncccaatggggacacctctttgtgaaaatcagcttagaaattcattgtgaactgaactctgtggttgccgtctgcgtcatcatctatcatttcagcctttacgatagtgataggcgtaacaggctttgactgtgcgttgtctgaacctgttgttctctcaactttaagaaagtcatcaacaacgtccatgccctctgttaccatgccgaaagccgcatactgnccgtcaaggaangtatccttatcgctgtagcagataaagaactggcttgaagcactgtccatatcgnttgctcttgccattgaaacaacgcctcttgtatggctcaggctgttttcaacgccatttgctgagaactcgcccttgatagtttccttgcttccgcctgtgccgtcnccgttagggtcaccgccctgtgccataaagccgtctacaactctatggaaagtaagtccgtcatagaacttttcctttaccagcttctcgaagttctcgcaggtgataggtgcgtcattggcataaagcgtgataacgaacttcttgtcagtgtcagccgcagaggtctgtgatgagctgtcncccttatctccgcaggctgtaagaantgcgcaggcaagcacgcctgctgtgcaaagagccaatgctctgaatagctttttaagtttcatttttatcgtcctttcgatcattattaatggcanttctgcctt

SEQ ID NO: 905 - DNA, 4000 bp, Escherichia coli
  misc_feature (5)..(5): n is a, c, g, or t
  misc_feature (8)..(10): n is a, c, g, or t
  misc_feature (13)..(14): n is a, c, g, or t
  misc_feature (16)..(16): n is a, c, g, or t
  misc_feature (18)..(18): n is a, c, g, or t
  misc_feature (26)..(27): n is a, c, g, or t
  misc_feature (29)..(31): n is a, c, g, or t
  misc_feature (34)..(34): n is a, c, g, or t
  misc_feature (39)..(39): n is a, c, g, or t
  misc_feature (42)..(42): n is a, c, g, or t
  misc_feature (44)..(44): n is a, c, g, or t
  misc_feature (48)..(48): n is a, c, g, or t
  misc_feature (52)..(52): n is a, c, g, or t
  misc_feature (54)..(56): n is a, c, g, or t
  misc_feature (61)..(61): n is a, c, g, or t
  misc_feature (65)..(69): n is a, c, g, or t
  misc_feature (72)..(72): n is a, c, g, or t
  misc_feature (75)..(75): n is a, c, g, or t
  misc_feature (77)..(79): n is a, c, g, or t
  misc_feature (82)..(82): n is a, c, g, or t
  misc_feature (85)..(85): n is a, c, g, or t
  misc_feature (93)..(94): n is a, c, g, or t
  misc_feature (96)..(98): n is a, c, g, or t
  misc_feature (104)..(104): n is a, c, g, or t
  misc_feature (107)..(107): n is a, c, g, or t
  misc_feature (109)..(110): n is a, c, g, or t
  misc_feature (114)..(115): n is a, c, g, or t
  misc_feature (118)..(118): n is a, c, g, or t
  misc_feature (121)..(122): n is a, c, g, or t
  misc_feature (124)..(125): n is a, c, g, or t
  misc_feature (130)..(131): n is a, c, g, or t
  misc_feature (137)..(138): n is a, c, g, or t
  misc_feature (140)..(140): n is a, c, g, or t
  misc_feature (146)..(146): n is a, c, g, or t
  misc_feature (152)..(153): n is a, c, g, or t
  misc_feature (157)..(158): n is a, c, g, or t
  misc_feature (161)..(161): n is a, c, g, or t
  misc_feature (169)..(169): n is a, c, g, or t
  misc_feature (171)..(171): n is a, c, g, or t
  misc_feature (179)..(179): n is a, c, g, or t
  misc_feature (182)..(184): n is a, c, g, or t
  misc_feature (189)..(190): n is a, c, g, or t
  misc_feature (195)..(195): n is a, c, g, or t
  misc_feature (203)..(205): n is a, c, g, or t
  misc_feature (207)..(207): n is a, c, g, or t
  misc_feature (219)..(219): n is a, c, g, or t
  misc_feature (221)..(221): n is a, c, g, or t
  misc_feature (223)..(223): n is a, c, g, or t
  misc_feature (225)..(228): n is a, c, g, or t
  misc_feature (233)..(233): n is a, c, g, or t
  misc_feature (237)..(237): n is a, c, g, or t
  misc_feature (239)..(239): n is a, c, g, or t
  misc_feature (242)..(242): n is a, c, g, or t
  misc_feature (253)..(253): n is a, c, g, or t
  misc_feature (256)..(258): n is a, c, g, or t
  misc_feature (261)..(261): n is a, c, g, or t
  misc_feature (263)..(263): n is a, c, g, or t
  misc_feature (267)..(268): n is a, c, g, or t
  misc_feature (271)..(271): n is a, c, g, or t
  misc_feature (275)..(277): n is a, c, g, or t
  misc_feature (285)..(285): n is a, c, g, or t
  misc_feature (289)..(290): n is a, c, g, or t
  misc_feature (294)..(294): n is a, c, g, or t
  misc_feature (297)..(297): n is a, c, g, or t
  misc_feature (302)..(302): n is a, c, g, or t
  misc_feature (306)..(307): n is a, c, g, or t
  misc_feature (310)..(312): n is a, c, g, or t
  misc_feature (315)..(315): n is a, c, g, or t
  misc_feature (321)..(321): n is a, c, g, or t
  misc_feature (325)..(325): n is a, c, g, or t
  misc_feature (327)..(327): n is a, c, g, or t
  misc_feature (331)..(331): n is a, c, g, or t
  misc_feature (334)..(334): n is a, c, g, or t
  misc_feature (338)..(339): n is a, c, g, or t
  misc_feature (343)..(343): n is a, c, g, or t
  misc_feature (354)..(354): n is a, c, g, or t
  misc_feature (360)..(360): n is a, c, g, or t
  misc_feature (365)..(367): n is a, c, g, or t
  misc_feature (371)..(371): n is a, c, g, or t
  misc_feature (376)..(376): n is a, c, g, or t
  misc_feature (388)..(388): n is a, c, g, or t
  misc_feature (395)..(395): n is a, c, g, or t
  misc_feature (399)..(399): n is a, c, g, or t
  misc_feature (404)..(404): n is a, c, g, or t
  misc_feature (478)..(478): n is a, c, g, or t
  misc_feature (888)..(888): n is a, c, g, or t
  misc_feature (1277)..(1277): n is a, c, g, or t
  misc_feature (1985)..(1985): n is a, c, g, or t
  misc_feature (1995)..(1995): n is a, c, g, or t
  misc_feature (2142)..(2142): n is a, c, g, or t
  misc_feature (3023)..(3023): n is a, c, g, or t
  misc_feature (3341)..(3341): n is a, c, g, or t
  misc_feature (3660)..(3660): n is a, c, g, or t
  misc_feature (3750)..(3750): n is a, c, g, or t
tttanttnnnaannananacaacaanngnnncanttttntcncntatntcantnnntactncctnnnnntantanannnacnatngttggggnncnnnaaacanaanannaatnncanatnntnnttcannaacctnntnaattgnatatannttannatntaataaantntacggagnacnnnacacnnttatntatacttnnncnttggcaaaaagnanangnnnntgggntgtntntgntgaattatttngannnaantntaannaanaatnnncaaatagntatnncttnggnttaanttannttnnnaangaaaanattnantttnatntttnnttgngaaagggattnaataanaaaannnattnttttnctttgggtgtangttgganttangattnaaataaataagtaaatcaatcacagtcacagcttccgtttccacagcccttttctggtttttgaaaaaagaatnttttagataaatatccaattgagattagaactgccaaaatggtaagtattatttgaatcatcgtttacgaaataatttgataaacaaataatgcacaaaaatatgctattagcgtcattattattaattgtagtataggccatttccaactgttggtttcctttttaacaatagctaatgtactcatacattgcattgcaaaagcataaaaaatcattaatgatattccagaagctaatccaaataccggctgtccatcttcacgaacttcattagccattctttcttttatggtttcttcttgatctccttgaacactatatattgttgccaaagttccaacaaaaacttccctggctgcaaaagatgtaactatagctattccaattttccagtcatatccaagtggncttataagaggctctatacttttgcccattgccccaagtaatgaatgttctaatttgtgtgaacttaatttgttttcaaattcgtcaacagaactatagttttcgacgactatgattttttcagcattattaaattgatctccaacaccaacagacgcaagcccccaaagtaatattgaaatagccataataattttacctgcctcaaaaacaaatgactttgttttttcaaaaactgtaaaaaaaacatttcttaaaagaggaaacttataatttggcatttcaacaacaaaaaatgttttagatctaattttaagaatattatttaaaatttttgctgaaaaaattgcagcaaaaaatcctaataagtatagccccatgagagttantccttgagcatttacacctaaaaatctttcatcgggaataactaatgaaatcaaaatcaagtatactggcagtctagctgagcatgtagtaaaaggagttactagaattgtaataagtctttctttccagttttcaatatttcgagttgccataatagctggaattgcacaagctgttccagaaattagaggaactatacttttaccgcttaaaccatattttctcataactctatccataagaaaaacaacacgactcatgtatccagtttcttcaagaattgaaataaataaaaataagaacgcgatttgaggaatgaaaattacaatgccgccaaccccaggaataattccttcagaaagtaagcttgtaaagactccctcaggtaaagtgttttttaccatcgaacttaacttgctaaaagcactatcaatagcatccattggataactgctccaatcaaaaatagcttgaaaaatggttaataatattataaaaaatatagcgtagccccaaaatttgtgaattaaaattttatctaatttagagccaaaatcactagctaatttaggatcatgaacgtaagactctttcaaaacattattaataaactgatatcttttaatagtttctttttgctgtaatctctttaaataagaaacagattttgtttgaaaagtagatgaatcatttaccacttctctatncaaattcccnaaatttacatcttgagtaataactaaccaaagtttataaattgattgatcaggaaaagttttttttaagctcttaaaatattcttcatcaatattaattatatctaaacactgattagtttctagttttttataattagttattatnttttttagatcattcaatccctttttttctcttgaactgtatagaataactttagtaccaagatgtttttctaaaacagaaatatcaatagaaattccttttcttttcataacatctgacatgttaataacaaggattgaaggaatgtttaaatctttaatttgagtaaatagtaagagatttcttttcaaattttcaacatcagatattacaactgcaacatcaggaaaatctttatcatttttatttaataatagttctattacaacactttcatctagtgaagatgcatttaagctataagttccaggaagatctagtatgtgtgctttaactcccctttccaacttacaaataccttcctttttttcaactgttattccaggataatttcccactttttgatttaagccggttaaatcattaaaaactgatgattttcctgtatttggatttccaataagagcaacagttagtcttttactcattactggattttttaataataatataatttgcggtttctcttctgatcgctaatctagttccatttacatctaagtacatgggatctttaaatggagcaaattgtaataatttaatagtattacctggaagacatcccatttcaattaatttcaatggaatataatctgtgattatatcttcaataatacctgattcccccttttttaaatcgtttaaagtcaatgttctttatttagaatgattttaaagaagcaaaagtaaactattttttattttataaattattaatttaatctaaatatgaattctgtaggatcttcacatcttttaataatttgttcatttcaacttcattagttccatcataaaatccgcggattctattttctttntcaattagaacaaaattttcggtatgaatcatatcatattttccaccatctccatcattttttgctactaaaaaagattttctagcaagctcgtaaatatcttttttgcttccagtaaacaaattccatttagaatcgtcaactccctttaagtcagcataagctcttaaaacactaactgaatcaatattaggagttaccgaaaacgaaactaacaaaacatcagtttgattttttaactcattttgcaaatagcccatattctctgtcatttttgggcaaatgtcagggcatgtagtaaagaaaaagtctgctatntatattttattttgataaaattcttgattaataagctctccattttgattagttagtgaaaaattactgatgctatgatatttcttaacatatctaatatcttcttcaactagttcttcagaaaccattgaaggactgtaaataggcaaacttacttttggttgtaatataaaataaaaagaagttattacaacaattgaaaaaaaactcattataaaaataacaggtccatatcttttaaaaaactttttgtaactggctgatatattcaaaataaacggtttaagagttcattaaatcttcaatttcctcaacttcnattggaatatttttcatgagattgattggttctgaattttcttgaacaacaacatcatcttcaagtcttatgccaaaattttctttaggnagataaatccctggctctacagtaaaaaccatgtttttagtaataggatagcttaagtctccatagtcatgagtgtctaatcctaaattatgagaaactccatgtgtaaaatattttttaaaagcaggattttctttagtttgattttgaatatcactttttgataaaagacctaatttcaataattcagaactcattattttaccgacttcattgtaatgatctttccaaataactcctggttttaata

SEQ ID NO: 906 - DNA, 4000 bp, Escherichia coli
  misc_feature (1612)..(1612): n is a, c, g, or t
  misc_feature (1988)..(1988): n is a, c, g, or t
  misc_feature (1992)..(1992): n is a, c, g, or t
  misc_feature (2016)..(2016): n is a, c, g, or t
  misc_feature (2423)..(2423): n is a, c, g, or t
actaaaaaatgggaaatgactgatgtctggagtagttgctggaaatgactccgatcttgccctttctcaacaggcactcaaaaacttgggttccaaacgcaagatcaaaggctttacgcaaccattttcgccacaaactcagtttttattaggagtacgaaattctatctatatatttctatccatttattcaactccatgagaattatcacaaaatattcacaatctgcctctatctttagaaaaaattggttaatcattggggttcctgtgagcgatcaagggtgcaacattttttccaggcatgtttagccgatcgtggcacgttggatagcggatgtagaacgcaggttgcccgtcgccgctccccttgtacagaaaccatcagctaacgatcgctgacgtacatgccatcgtacacaagtgaaacctacatctatggagtaacaactactatgaccctggcacacaatccacccgccccaaccaaacttggcttacccatagttagtgaaatttgccctgttggcagtttgggccgatcgtgcggcagcctgctcagtaatagcattgcctcccacctcaaaatggggagccaagccatcctcatcgacctgaaagaggttcccttcatcgacagcagtggcttagggggattggttaaagcgctaaaactgctaaggaagcaccaagtcagactgagtttatgttccctcaatggtcagattcggatgcttttagaactgactcaactacaccagttgtttgaaatccttgatagtaagcaggaattctacagcaagtacaccaactatgctctgttgactgagaaagatggctacattgtgcggcaacttcatgccagctagcaaatgccctataacgcttatgaagaatagtttatgggtaactactcagcctaccctcaccctaaatccctctccctagggagagggacttcaatccggctccccttctcccatgggagaaggggctgggggatgagggcggctcgacactgagttagtggactgagtaattacgtttatggaataaatcatctcttcgcggtgtaaatatcttaacctgggtgtagcaattattaagtacaaattaataagtcagtgtatagggtaccttaatgccctgacgtttacccccatacaggttaaagtagctgtagcgaaattatcaggtatctgggaacttaagcacaatggcactgaaggcgttgctccgtcagctatccccctctcccacaaactccccacgtcagactaagcctcagccatctaatctcttcagccggatgcctctgcgcctcattttgattgtgccctttgtgctacaagtctctgcggctgtaggattagtaggctttttgtcgtttaggaatgggcagaaagccgtcagcagcctggcgaatcaactcatgaatgaggtgagcctgcgggttgatcaacatttgacaggctatctgagttcggctcagcaagtcaacttcattaatcggagtgcagtccaggcagggttgctcaactttcaaaatgctgagaggacgggcaaatacttctggaaacaactacaagtttatgatttcgcctacatcaanctaggacatgtggaaactaatgaatttattggggctggctatgtgaatggcaagatggaaattgctgagtcgtttaagcctcagaaagggacgctctatgcctatgctcccgatgcttgggggaatcgcatttacccacctgccaatatttacaaagatacgaacccgaatctagaagcctggtataccaatgcagttgcggctggtaagctgacctggagtgcaatttatgcttgggaaggtgtggaaaccaccctggcaatttcagccagttcccccgtttacgatacgtctgggaagttggttgctgtgactggggttgacctgagtattgccaagatcgatgagtttttgagcaagttagaagttgccaaangggnaaaaatcttcattgtggaacgttngggggcattggtagctcagtctggtcgtcaatcgtaccagatttggcaaggacaggccacacgattgaacgccagggacagtagcgatcgagtaacgcaaaatacgatgcagtacttgagtcagcaatttcctgatttgaacgcaattcaggttccgcagcaacgtgtctctgagattgaggggcaacggcggtttgtgcaagtcacgccctaccgcgatcggtttgggctggattggctgattgttgtggtcattccagaatccaactttatgcagcaagtggatgaaaataatcgcacaacagtgttgctctgtttcctggctttagtcgccacggtagtgttaggtattatcacctcccgctggatttctgggccgattcttcagttaagcctggcttcagagncgatcgcccaaggcgcacgcaacgccaatgctaatggagaattaaaccaggagattccggtgaggggagccaaggagctaagaaccttggcggggtcttttaaccatatggctcgccagttaaaagcgtcttttaatgaactggaagaatataatgctgaactagagcagcgggtagaccagagaaccagggaactcagattgtctgaaacccaattgcaggtgcaagcccagcacttggagcagacgctctatgaactccagcagacgcaagtgcaaatggtgcaaagtgaaaaaatgtctagcctggggcaaatggtggctggagttgcccacgagattaataatccggttaactttatttatggcaacttggtctatgcggatgaatatgtcaaggaattactagacctagtgaaactctatcaacagcactatccccaccccccagccgccttacaagcaaaattgcaggcgatcgaccctgagttcttgcaagaggatctgattaagttatttcgctctatgaacataggcacaacccggattcgtgagattgtcaaatccctacgcaacttttcgcggctggatgaatcggagatgaagccagttgatattcatgaaggcattgacagtacgttaattattcttcatcatcgctttaagtctcctaagttgcagtcctcagaaatttcagttgtgaaaacgtatgggactttgccactggtggagtgctatccggggccgctcaatcaagtgttcatgaaccttttaagcaatgcgatcgatgccttggaagaggagatgaggcagggcagtgtcctttcgccgacgatcaccattaccacgaccactgagaaccattgggtgacgattcggattgctgataatggagccggaattgatgcagccgtgcaatctaagctgtttgacccctttttcaccacaaagcccgtagggcagggaaccggtttgggactatccattagctaccaaattattgtagagaagcatgggggcagaatcagttgtcaatcggcacctatccacggcgcagagtttgtgattgaaattccgatcgagcaagaggcttcccagttcgcaaaaaatgtaacgactactgcttgaatcgcttgcttgaattgctgatgccttaaattgatacagaatgagcagactaatcacagcgatcgatagatatggctgttcagaaagggaggtagtgggaaacggctgaaaatggattacactcaagctggactttctctacgatcgccctttacttatccccccctaccatgaacgtcaaccgccgtcgatttcttgccctcctcagcgttagtggcttaggtatagctgctttttggaagttattgcggagtcaggcggctcaacgccaagtctccaccttggtgcccccatcaacccaagccgctgtagccagtaccccaaagaatcgttcagaagctagccccagcgctgccaaagatacgccactgttgcgcttcatcgcggttgctgacacaggcactgggggagaaggacagtatgctgtcgccaaggcgatgacccactacc

SEQ ID NO: 907 - DNA, 4000 bp, Escherichia coli
  misc_feature (338)..(338): n is a, c, g, or t
  misc_feature (538)..(538): n is a, c, g, or t
  misc_feature (616)..(616): n is a, c, g, or t
  misc_feature (619)..(623): n is a, c, g, or t
  misc_feature (625)..(626): n is a, c, g, or t
  misc_feature (628)..(629): n is a, c, g, or t
  misc_feature (634)..(634): n is a, c, g, or t
  misc_feature (637)..(637): n is a, c, g, or t
  misc_feature (646)..(646): n is a, c, g, or t
  misc_feature (650)..(652): n is a, c, g, or t
  misc_feature (661)..(661): n is a, c, g, or t
  misc_feature (685)..(685): n is a, c, g, or t
  misc_feature (692)..(692): n is a, c, g, or t
  misc_feature (694)..(694): n is a, c, g, or t
  misc_feature (886)..(886): n is a, c, g, or t
  misc_feature (892)..(892): n is a, c, g, or t
  misc_feature (898)..(898): n is a, c, g, or t
  misc_feature (908)..(908): n is a, c, g, or t
  misc_feature (925)..(925): n is a, c, g, or t
  misc_feature (928)..(930): n is a, c, g, or t
  misc_feature (942)..(942): n is a, c, g, or t
  misc_feature (950)..(951): n is a, c, g, or t
  misc_feature (964)..(964): n is a, c, g, or t
  misc_feature (966)..(966): n is a, c, g, or t
  misc_feature (1060)..(1060): n is a, c, g, or t
  misc_feature (1063)..(1064): n is a, c, g, or t
  misc_feature (1072)..(1072): n is a, c, g, or t
  misc_feature (1075)..(1075): n is a, c, g, or t
  misc_feature (1117)..(1117): n is a, c, g, or t
  misc_feature (1123)..(1123): n is a, c, g, or t
  misc_feature (1129)..(1129): n is a, c, g, or t
  misc_feature (1240)..(1240): n is a, c, g, or t
  misc_feature (1246)..(1246): n is a, c, g, or t
  misc_feature (1249)..(1249): n is a, c, g, or t
  misc_feature (1727)..(1727): n is a, c, g, or t
  misc_feature (1844)..(1844): n is a, c, g, or t
  misc_feature (1873)..(1873): n is a, c, g, or t
  misc_feature (1925)..(1925): n is a, c, g, or t
  misc_feature (1975)..(1976): n is a, c, g, or t
  misc_feature (1978)..(1986): n is a, c, g, or t
  misc_feature (1988)..(1993): n is a, c, g, or t
  misc_feature (1995)..(1996): n is a, c, g, or t
  misc_feature (1998)..(2001): n is a, c, g, or t
  misc_feature (2050)..(2053): n is a, c, g, or t
  misc_feature (2057)..(2064): n is a, c, g, or t
  misc_feature (2066)..(2068): n is a, c, g, or t
  misc_feature (2070)..(2071): n is a, c, g, or t
  misc_feature (2073)..(2075): n is a, c, g, or t
  misc_feature (2077)..(2078): n is a, c, g, or t
  misc_feature (2127)..(2127): n is a, c, g, or t
  misc_feature (2130)..(2131): n is a, c, g, or t
  misc_feature (2133)..(2136): n is a, c, g, or t
  misc_feature (2138)..(2142): n is a, c, g, or t
  misc_feature (2145)..(2146): n is a, c, g, or t
  misc_feature (2148)..(2152): n is a, c, g, or t
  misc_feature (2155)..(2155): n is a, c, g, or t
  misc_feature (2205)..(2206): n is a, c, g, or t
  misc_feature (2208)..(2211): n is a, c, g, or t
  misc_feature (2213)..(2214): n is a, c, g, or t
  misc_feature (2216)..(2220): n is a, c, g, or t
  misc_feature (2222)..(2232): n is a, c, g, or t
  misc_feature (2280)..(2280): n is a, c, g, or t
  misc_feature (2282)..(2282): n is a, c, g, or t
  misc_feature (2284)..(2287): n is a, c, g, or t
  misc_feature (2289)..(2297): n is a, c, g, or t
  misc_feature (2300)..(2303): n is a, c, g, or t
  misc_feature (2305)..(2309): n is a, c, g, or t
  misc_feature (2352)..(2352): n is a, c, g, or t
  misc_feature (2356)..(2360): n is a, c, g, or t
  misc_feature (2362)..(2370): n is a, c, g, or t
  misc_feature (2372)..(2382): n is a, c, g, or t
  misc_feature (2385)..(2386): n is a, c, g, or t
  misc_feature (2388)..(2388): n is a, c, g, or t
  misc_feature (2390)..(2390): n is a, c, g, or t
  misc_feature (2396)..(2397): n is a, c, g, or t
  misc_feature (2400)..(2400): n is a, c, g, or t
  misc_feature (2402)..(2403): n is a, c, g, or t
  misc_feature (2407)..(2407): n is a, c, g, or t
  misc_feature (2409)..(2409): n is a, c, g, or t
  misc_feature (2411)..(2413): n is a, c, g, or t
  misc_feature (2422)..(2423): n is a, c, g, or t
  misc_feature (2427)..(2427): n is a, c, g, or t
  misc_feature (2433)..(2444): n is a, c, g, or t
  misc_feature (2446)..(2446): n is a, c, g, or t
  misc_feature (2448)..(2453): n is a, c, g, or t
  misc_feature (2455)..(2465): n is a, c, g, or t
  misc_feature (2467)..(2467): n is a, c, g, or t
  misc_feature (2469)..(2469): n is a, c, g, or t
  misc_feature (2471)..(2474): n is a, c, g, or t
  misc_feature (2476)..(2481): n is a, c, g, or t
  misc_feature (2484)..(2484): n is a, c, g, or t
  misc_feature (2486)..(2490): n is a, c, g, or t
  misc_feature (2492)..(2492): n is a, c, g, or t
  misc_feature (2496)..(2496): n is a, c, g, or t
  misc_feature (2499)..(2501): n is a, c, g, or t
  misc_feature (2504)..(2508): n is a, c, g, or t
  misc_feature (2510)..(2526): n is a, c, g, or t
  misc_feature (2528)..(2529): n is a, c, g, or t
  misc_feature (2531)..(2542): n is a, c, g, or t
  misc_feature (2544)..(2551): n is a, c, g, or t
  misc_feature (2553)..(2558): n is a, c, g, or t
  misc_feature (2561)..(2567): n is a, c, g, or t
  misc_feature (2569)..(2569): n is a, c, g, or t
  misc_feature (2573)..(2573): n is a, c, g, or t
  misc_feature (2576)..(2578): n is a, c, g, or t
  misc_feature (2581)..(2585): n is a, c, g, or t
  misc_feature (2587)..(2590): n is a, c, g, or t
  misc_feature (2592)..(2592): n is a, c, g, or t
  misc_feature (2594)..(2600): n is a, c, g, or t
  misc_feature (2603)..(2609): n is a, c, g, or t
  misc_feature (2611)..(2615): n is a, c, g, or t
  misc_feature (2617)..(2617): n is a, c, g, or t
  misc_feature (2621)..(2627): n is a, c, g, or t
  misc_feature (2630)..(2634): n is a, c, g, or t
  misc_feature (2638)..(2639): n is a, c, g, or t
  misc_feature (2642)..(2642): n is a, c, g, or t
  misc_feature (2653)..(2654): n is a, c, g, or t
  misc_feature (2658)..(2659): n is a, c, g, or t
  misc_feature (2664)..(2669): n is a, c, g, or t
  misc_feature (2671)..(2681): n is a, c, g, or t
  misc_feature (2683)..(2684): n is a, c, g, or t
  misc_feature (2686)..(2694): n is a, c, g, or t
  misc_feature (2698)..(2704): n is a, c, g, or t
  misc_feature (2707)..(2711): n is a, c, g, or t
  misc_feature (2715)..(2716): n is a, c, g, or t
  misc_feature (2719)..(2719): n is a, c, g, or t
  misc_feature (2730)..(2731): n is a, c, g, or t
  misc_feature (2735)..(2736): n is a, c, g, or t
  misc_feature (2742)..(2751): n is a, c, g, or t
  misc_feature (2753)..(2764): n is a, c, g, or t
  misc_feature (2766)..(2768): n is a, c, g, or t
  misc_feature (2770)..(2772): n is a, c, g, or t
  misc_feature (2774)..(2774): n is a, c, g, or t
  misc_feature (2776)..(2776): n is a, c, g, or t
  misc_feature (2778)..(2781): n is a, c, g, or t
  misc_feature (2783)..(2788): n is a, c, g, or t
  misc_feature (2791)..(2791): n is a, c, g, or t
  misc_feature (2793)..(2797): n is a, c, g, or t
  misc_feature (2799)..(2799): n is a, c, g, or t
  misc_feature (2803)..(2803): n is a, c, g, or t
  misc_feature (2807)..(2808): n is a, c, g, or t
  misc_feature (2812)..(2815): n is a, c, g, or t
  misc_feature (2817)..(2834): n is a, c, g, or t
  misc_feature (2836)..(2847): n is a, c, g, or t
  misc_feature (2849)..(2850): n is a, c, g, or t
  misc_feature (2852)..(2866): n is a, c, g, or t
  misc_feature (2869)..(2872): n is a, c, g, or t
  misc_feature (2874)..(2874): n is a, c, g, or t
  misc_feature (2876)..(2876): n is a, c, g, or t
  misc_feature (2880)..(2881): n is a, c, g, or t
  misc_feature (2885)..(2886): n is a, c, g, or t
  misc_feature (2889)..(2891): n is a, c, g, or t
  misc_feature (2894)..(2896): n is a, c, g, or t
  misc_feature (2898)..(2905): n is a, c, g, or t
  misc_feature (2907)..(2912): n is a, c, g, or t
  misc_feature (2914)..(2927): n is a, c, g, or t
  misc_feature (2929)..(2929): n is a, c, g, or t
  misc_feature (2931)..(2942): n is a, c, g, or t
  misc_feature (2946)..(2953): n is a, c, g, or t
  misc_feature (2957)..(2957): n is a, c, g, or t
  misc_feature (2961)..(2962): n is a, c, g, or t
  misc_feature (2965)..(2968): n is a, c, g, or t
  misc_feature (2970)..(2982): n is a, c, g, or t
  misc_feature (2984)..(2986): n is a, c, g, or t
  misc_feature (2988)..(3003): n is a, c, g, or t
  misc_feature (3006)..(3006): n is a, c, g, or t
  misc_feature (3010)..(3010): n is a, c, g, or t
  misc_feature (3012)..(3012): n is a, c, g, or t
  misc_feature (3014)..(3014): n is a, c, g, or t
  misc_feature (3017)..(3019): n is a, c, g, or t
  misc_feature (3023)..(3023): n is a, c, g, or t
  misc_feature (3025)..(3025): n is a, c, g, or t
  misc_feature (3027)..(3027): n is a, c, g, or t
  misc_feature (3030)..(3030): n is a, c, g, or t
  misc_feature (3034)..(3034): n is a, c, g, or t
  misc_feature (3038)..(3039): n is a, c, g, or t
  misc_feature (3042)..(3043): n is a, c, g, or t
  misc_feature (3046)..(3046): n is a, c, g, or t
  misc_feature (3050)..(3058): n is a, c, g, or t
  misc_feature (3060)..(3065): n is a, c, g, or t
  misc_feature (3067)..(3069): n is a, c, g, or t
  misc_feature (3071)..(3073): n is a, c, g, or t
  misc_feature (3075)..(3080): n is a, c, g, or t
  misc_feature (3082)..(3082): n is a, c, g, or t
  misc_feature (3084)..(3097): n is a, c, g, or t
  misc_feature (3099)..(3104): n is a, c, g, or t
  misc_feature (3106)..(3107): n is a, c, g, or t
  misc_feature (3111)..(3111): n is a, c, g, or t
  misc_feature (3115)..(3116): n is a, c, g, or t
  misc_feature (3120)..(3121): n is a, c, g, or t
  misc_feature (3123)..(3127): n is a, c, g, or t
  misc_feature (3129)..(3138): n is a, c, g, or t
  misc_feature (3140)..(3156): n is a, c, g, or t
  misc_feature (3159)..(3173): n is a, c, g, or t
  misc_feature (3176)..(3177): n is a, c, g, or t
  misc_feature (3181)..(3181): n is a, c, g, or t
  misc_feature (3183)..(3184): n is a, c, g, or t
  misc_feature (3187)..(3188): n is a, c, g, or t
  misc_feature (3192)..(3193): n is a, c, g, or t
  misc_feature (3195)..(3195): n is a, c, g, or t
  misc_feature (3197)..(3197): n is a, c, g, or t
  misc_feature (3201)..(3205): n is a, c, g, or t
  misc_feature (3207)..(3207): n is a, c, g, or t
  misc_feature (3209)..(3211): n is a, c, g, or t
  misc_feature (3213)..(3226): n is a, c, g, or t
  misc_feature (3229)..(3235): n is a, c, g, or t
  misc_feature (3237)..(3250): n is a, c, g, or t
  misc_feature (3254)..(3255): n is a, c, g, or t
  misc_feature (3257)..(3262): n is a, c, g, or t
  misc_feature (3264)..(3265): n is a, c, g, or t
  misc_feature (3269)..(3270): n is a, c, g, or t
  misc_feature (3273)..(3276): n is a, c, g, or t
  misc_feature (3278)..(3284): n is a, c, g, or t
  misc_feature (3286)..(3299): n is a, c, g, or t
  misc_feature (3301)..(3301): n is a, c, g, or t
  misc_feature (3303)..(3327): n is a, c, g, or t
  misc_feature (3330)..(3332): n is a, c, g, or t
  misc_feature (3334)..(3335): n is a, c, g, or t
  misc_feature (3337)..(3337): n is a, c, g, or t
  misc_feature (3339)..(3343): n is a, c, g, or t
  misc_feature (3346)..(3348): n is a, c, g, or t
  misc_feature (3350)..(3357): n is a, c, g, or t
  misc_feature (3359)..(3361): n is a, c, g, or t
  misc_feature (3364)..(3368): n is a, c, g, or t
  misc_feature (3371)..(3377): n is a, c, g, or t
  misc_feature (3379)..(3382): n is a, c, g, or t
  misc_feature (3384)..(3384): n is a, c, g, or t
  misc_feature (3386)..(3386): n is a, c, g, or t
  misc_feature (3388)..(3388): n is a, c, g, or t
  misc_feature (3390)..(3390): n is a, c, g, or t
  misc_feature (3392)..(3394): n is a, c, g, or t
  misc_feature (3396)..(3396): n is a, c, g, or t
  misc_feature (3399)..(3399): n is a, c, g, or t
  misc_feature (3401)..(3401): n is a, c, g, or t
  misc_feature (3403)..(3403): n is a, c, g, or t
  misc_feature (3405)..(3405): n is a, c, g, or t
  misc_feature (3407)..(3409): n is a, c, g, or t
  misc_feature (3412)..(3413): n is a, c, g, or t
  misc_feature (3415)..(3420): n is a, c, g, or t
  misc_feature (3423)..(3426): n is a, c, g, or t
  misc_feature (3428)..(3429): n is a, c, g, or t
  misc_feature (3431)..(3433): n is a, c, g, or t
  misc_feature (3435)..(3437): n is a, c, g, or t
  misc_feature (3440)..(3446): n is a, c, g, or t
  misc_feature (3448)..(3456): n is a, c, g, or t
  misc_feature (3458)..(3465): n is a, c, g, or t
  misc_feature (3467)..(3467): n is a, c, g, or t
  misc_feature (3469)..(3471): n is a, c, g, or t
  misc_feature (3473)..(3475): n is a, c, g, or t
  misc_feature (3478)..(3480): n is a, c, g, or t
  misc_feature (3482)..(3482): n is a, c, g, or t
  misc_feature (3484)..(3486): n is a, c, g, or t
  misc_feature (3488)..(3491): n is a, c, g, or t
  misc_feature (3493)..(3496): n is a, c, g, or t
  misc_feature (3500)..(3501): n is a, c, g, or t
  misc_feature (3503)..(3503): n is a, c, g, or t
  misc_feature (3505)..(3516): n is a, c, g, or t
  misc_feature (3518)..(3521): n is a, c, g, or t
  misc_feature (3523)..(3524): n is a, c, g, or t
  misc_feature (3526)..(3536): n is a, c, g, or t
  misc_feature (3539)..(3540): n is a, c, g, or t
  misc_feature (3542)..(3542): n is a, c, g, or t
  misc_feature (3544)..(3544): n is a, c, g, or t
  misc_feature (3546)..(3548): n is a, c, g, or t
  misc_feature (3550)..(3550): n is a, c, g, or t
  misc_feature (3552)..(3557): n is a, c, g, or t
  misc_feature (3559)..(3559): n is a, c, g, or t
  misc_feature (3561)..(3563): n is a, c, g, or t
  misc_feature (3565)..(3567): n is a, c, g, or t
  misc_feature (3569)..(3573): n is a, c, g, or t
  misc_feature (3577)..(3578): n is a, c, g, or t
  misc_feature (3580)..(3592): n is a, c, g, or t
  misc_feature (3594)..(3605): n is a, c, g, or t
  misc_feature (3607)..(3614): n is a, c, g, or t
  misc_feature (3616)..(3617): n is a, c, g, or t
  misc_feature (3619)..(3619): n is a, c, g, or t
  misc_feature (3621)..(3621): n is a, c, g, or t
  misc_feature (3623)..(3625): n is a, c, g, or t
  misc_feature (3627)..(3627): n is a, c, g, or t
  misc_feature (3629)..(3630): n is a, c, g, or t
  misc_feature (3632)..(3634): n is a, c, g, or t
  misc_feature (3636)..(3636): n is a, c, g, or t
  misc_feature (3638)..(3640): n is a, c, g, or t
  misc_feature (3643)..(3644): n is a, c, g, or t
  misc_feature (3646)..(3650): n is a, c, g, or t
  misc_feature (3654)..(3655): n is a, c, g, or t
  misc_feature (3657)..(3658): n is a, c, g, or t
  misc_feature (3660)..(3680): n is a, c, g, or t
  misc_feature (3683)..(3685): n is a, c, g, or t
  misc_feature (3687)..(3688): n is a, c, g, or t
  misc_feature (3690)..(3691): n is a, c, g, or t
  misc_feature (3694)..(3707): n is a, c, g, or t
  misc_feature (3709)..(3713): n is a, c, g, or t
  misc_feature (3715)..(3715): n is a, c, g, or t
  misc_feature (3717)..(3718): n is a, c, g, or t
  misc_feature (3720)..(3726): n is a, c, g, or t
  misc_feature (3730)..(3731): n is a, c, g, or t
  misc_feature (3733)..(3737): n is a, c, g, or t
  misc_feature (3739)..(3745): n is a, c, g, or t
  misc_feature (3748)..(3752): n is a, c, g, or t
  misc_feature (3754)..(3754): n is a, c, g, or t
  misc_feature (3756)..(3760): n is a, c, g, or t
  misc_feature (3762)..(3773): n is a, c, g, or t
  misc_feature (3775)..(3779): n is a, c, g, or t
  misc_feature (3781)..(3784): n is a, c, g, or t
  misc_feature (3786)..(3788): n is a, c, g, or t
  misc_feature (3790)..(3792): n is a, c, g, or t
  misc_feature (3796)..(3796): n is a, c, g, or t
  misc_feature (3798)..(3798): n is a, c, g, or t
  misc_feature (3800)..(3803): n is a, c, g, or t
  misc_feature (3807)..(3809): n is a, c, g, or t
  misc_feature (3812)..(3831): n is a, c, g, or t
  misc_feature (3833)..(3843): n is a, c, g, or t
  misc_feature (3845)..(3846): n is a, c, g, or t
  misc_feature (3848)..(3850): n is a, c, g, or t
  misc_feature (3853)..(3854): n is a, c, g, or t
  misc_feature (3856)..(3856): n is a, c, g, or t
  misc_feature (3859)..(3861): n is a, c, g, or t
  misc_feature (3863)..(3865): n is a, c, g, or t
  misc_feature (3868)..(3870): n is a, c, g, or t
  misc_feature (3872)..(3873): n is a, c, g, or t
  misc_feature (3875)..(3875): n is a, c, g, or t
  misc_feature (3877)..(3879): n is a, c, g, or t
  misc_feature (3881)..(3881): n is a, c, g, or t
  misc_feature (3884)..(3886): n is a, c, g, or t
  misc_feature (3889)..(3905): n is a, c, g, or t
  misc_feature (3908)..(3927): n is a, c, g, or t
  misc_feature (3929)..(3931): n is a, c, g, or t
  misc_feature (3937)..(3938): n is a, c, g, or t
  misc_feature (3940)..(3942): n is a, c, g, or t
  misc_feature (3944)..(3944): n is a, c, g, or t
  misc_feature (3946)..(3946): n is a, c, g, or t
  misc_feature (3949)..(3950): n is a, c, g, or t
  misc_feature (3954)..(3958): n is a, c, g, or t
  misc_feature (3960)..(3963): n is a, c, g, or t
  misc_feature (3966)..(3970): n is a, c, g, or t
  misc_feature (3972)..(3983): n is a, c, g, or t
  misc_feature (3987)..(3993): n is a, c, g, or t
  misc_feature (3995)..(3998): n is a, c, g, or t
  misc_feature (4000)..(4000): n is a, c, g, or t
agatggaaaacctgtattaggtaattatgtacaaacaagtaacaatcatcatatagctttctataccgatgaaaaaggaaacttgcaagacaaagcagtatctttctttgaagctgccgaacgtaaatcgcaaggtcttcctatcgttgataaaaactataatcacgataagggttggcgtttcttatttactatgaagcaaaacgaatactttgtgttccctaatgaagctacagggtttattcctacggaagtgaatttaatggacgaagccaattatgatatgataagtccaaatctatacagagttcaaaaggtgtcaagaatcgagaaaggancgtctacttcaagggattactggtttagacatcacttagaaactattctgaatgatgattcaaggcttaagaactctgcgttcaaacgaataaattcattaaagcctttagaaggtatcattaaagtgcgtattaactctattggtaagatagttgcagtaggtgaatacgattaatatagatagcttatgataaagaanacattatgttttagcaatcctgcctatttaagtttacagaatgcacagttagcaattcgtttgcccgaagtagaaacntgnnnnnanntnnctganagntttaaaaancaannngagcgtacnattccaatagaagatattggagtngtactgntngataacaaaagaataaccattacttcgtctctattagaagctttaatagaaaacaactgtgcagttataacttgcgacaataagagtatgcccattggtcttctgcttcctttatgtggcaataaaacacaaagcgaacgcttccgagcgcagatagaggcatcgctaccactaaaaaagcaactatggcancaaacnattaancagaaaatangcaatcaagccaaactnttnnncagatatactanggttgatnntggttgtatgtangnttgggcagacaaagttagaagtggcgaccctgataattttgaagcaagagcagctgcatattattggaaaaatatcttttctgatattcctaanttnntaagaggncgngaaggagaacctcctaataatcttttaaattatggttatgcnatattncgtgcngtagtagcacggtctttagttgccagcggattgcttccaactttaggcattcaccaccataataagtataatgcttattgtcttgccgatgatgtaatggaaccttatcgnccttangtngatggattagtcttagacataatggaatcaacctacgattatagcgaacttacgaaggaaattaaaatgaaacttcttgctattcctgtgctcgatacaaccattggaaataagaagagcccattgatgatagctacacaacaaacaacttcttcgctttacaagtgctttagcggagagcaaagaagaatggtttatccagaattataaatactatttggtggaaacttatagatttagtcaatacagaactatgtggttaatggtattctttgatttacccacagatacaaagaaggaaagaaaggctgctgctgtctttcgtcagaacttaataaaagatgggttcactatgtttcaattttccatctacatacgccattgtggtagtaaagagaatatggaagtacacataaaacgaatatcttcttttattcctgcatacggaaaggttggaattatgggcataacagataancaattcgcagaaataaaactcttctatggacagaaaccacaacttcctaaggctccaggtgcgcagttagaactcttttagtctctctttgaaacaaataaagttccattcgtttanaatggaactttattttgcttgcatttttntatctctcgaaatgctcataatacattaatactaaatgttttaagccaaatnagttgtatatgcctatgcaaagatactaattttaaagcaaatcacaactnntnnnnnnnnnannnnnntnnannnntgttgtatatgcctatgcaaagatactaattttaaagcaaatcacaacnnnnatannnnnnnntnnnanngnnncnnagttgtatatgcctatgcaaagatactaattttaaagcaaatcacaacnaannannnntnnnnnatnntnnnnntanagttgtatatgcctatgcaaagatactaattttaaagcaaatcacaactnnannnnanntnnnnnannnnnnnnnnngttgtatatgcctatgcaaagatactaattttaaagcaaatcacaacnanannnnannnnnnnnntannnntnnnnngttgtatatgcctatgcaaagatactaattttaaagcaaatcncaannnnntnnnnnnnnnannnnnnnnnnnatnngntntatatnnctntnnaaananannnattttaaannaaancacaannnnnnnnnnnngntnnnnnnannnnnnnnnnntntntnnnncnnnnnnaanannnnnantttnaannnaannnnnannnnnnnnnnnnnnnnntnncnnnnnnnnnnnntnnnnnnnncnnnnnnaannnnnnnantttnaannnaannnnnannnnantnnnnnnnttnnnnnnntnnnnntngttnnnnnnnccnnnnnaaanntantaattttaaannaaannacaannnnnnannnnnnnnnnntnntnnnnnnnnngttnnnnnnnccnnnnnaaanntantaattttaaannaaannacaacnnnnnnnnnnannnnnnnnnnnnannntnnntntntnnnncnnnnnnaanannnnnantttnaaannaaannnnannnnnnnnnnnnnnnnnntnnnnnnnnnnnntnntnnnnnnnnnnnnnnnaannnnantntttnnaaannaannnacnnnannnnnnnntnnnnnnannnnnnnnnnnnnntntnnnnnnnnnnnnaaannnnnnnntttnaaannaannnnannnnnnnnnnnnntnnntnnnnnnnnnnnnnnnnttntatntncntannnaaananantantttnaaannaanncanaacnnnnnnnnntnnnnnnannnannntnnnnnntntnnnnnnnnnnnnnnannnnnntnntttnaaannaaannannnnnannnnnnnnnnannnnnnnnnnnnnnnnngtnnnnnnnnnnnnnnnaannatantnnttnnaaannanancacnnnnntntnnntnnnnnnnnnnnnnnagnnnnnnntnnnnnnnnnnnnnnaaannannnnnntnnaaannaannnnannnnnnntnnnnnnnnnnnnnntntnnnnnnnnnnnnnnnnnnnnnnnnnaannnanntntnnnnnaannnannnnnnnntnnnatnnnnntannnnnnntnnnngntntntntnnntntgnanananannnatnntnnnnnnaannnnanncnnnannnttnnnnnnntnnnnnnnnntnnnnnnnntntnnntnnncannnanannnannnnannnnaaannanannnnnnnnnnnntnnnntnntnnnnnnnnnnngtnntntntnnntntnnnnnnanannnannntnnnnnaaannannnnnnnnnnnnntnnnnnnnnnnnnannnnnnnntnntntntnnntntnnannnanannnatnntnnnnnaaannannannnnnnnnnnnnnnnnnnnnnttnnnanngnntgnnnnnnnnnnnnnnannnnnananntnnnnnnnaaannannnnncnnnnnnnttnnnnnantnnnnnannnnnnnnnnnntnnnnntnnnnannnannnatantnannnnaaannnaannnnnnnnnnnnnnnnnnnntnnnnnnnnnnntnntnnntgnntntgnnnannnaannntnntnannntnaannnaannnnnnnnnnnnnnnnnttnnnnnnnnnnnnnnnnnnnntnnntatgcnnannnananatnntaannnnnannnnaannnnnannnnnnnnnnnntaannnnnnntnnnngn

SEQ ID NO: 908 - DNA, 4000 bp, Escherichia coli
  misc_feature (930)..(930): n is a, c, g, or t
  misc_feature (1988)..(1988): n is a, c, g, or t
  misc_feature (2146)..(2146): n is a, c, g, or t
  misc_feature (2149)..(2156): n is a, c, g, or t
  misc_feature (2158)..(2158): n is a, c, g, or t
  misc_feature (2160)..(2160): n is a, c, g, or t
  misc_feature (2162)..(2162): n is a, c, g, or t
  misc_feature (2167)..(2167): n is a, c, g, or t
  misc_feature (2169)..(2172): n is a, c, g, or t
  misc_feature (2174)..(2174): n is a, c, g, or t
  misc_feature (2177)..(2177): n is a, c, g, or t
  misc_feature (2179)..(2179): n is a, c, g, or t
  misc_feature (2181)..(2182): n is a, c, g, or t
  misc_feature (2186)..(2187): n is a, c, g, or t
  misc_feature (2191)..(2192): n is a, c, g, or t
  misc_feature (2194)..(2194): n is a, c, g, or t
  misc_feature (2197)..(2197): n is a, c, g, or t
  misc_feature (2199)..(2200): n is a, c, g, or t
  misc_feature (2202)..(2203): n is a, c, g, or t
  misc_feature (2208)..(2209): n is a, c, g, or t
  misc_feature (2213)..(2215): n is a, c, g, or t
  misc_feature (2218)..(2218): n is a, c, g, or t
  misc_feature (2220)..(2220): n is a, c, g, or t
  misc_feature (2222)..(2222): n is a, c, g, or t
  misc_feature (2224)..(2224): n is a, c, g, or t
  misc_feature (2226)..(2231): n is a, c, g, or t
  misc_feature (2233)..(2234): n is a, c, g, or t
  misc_feature (2237)..(2237): n is a, c, g, or t
  misc_feature (2240)..(2242): n is a, c, g, or t
  misc_feature (2245)..(2245): n is a, c, g, or t
  misc_feature (2247)..(2247): n is a, c, g, or t
  misc_feature (2250)..(2250): n is a, c, g, or t
  misc_feature (2252)..(2253): n is a, c, g, or t
  misc_feature (2256)..(2256): n is a, c, g, or t
  misc_feature (2258)..(2260): n is a, c, g, or t
  misc_feature (2263)..(2263): n is a, c, g, or t
  misc_feature (2265)..(2266): n is a, c, g, or t
  misc_feature (2269)..(2269): n is a, c, g, or t
  misc_feature (2271)..(2271): n is a, c, g, or t
  misc_feature (2273)..(2273): n is a, c, g, or t
  misc_feature (2275)..(2276): n is a, c, g, or t
  misc_feature (2278)..(2278): n is a, c, g, or t
  misc_feature (2282)..(2285): n is a, c, g, or t
  misc_feature (2287)..(2296): n is a, c, g, or t
  misc_feature (2298)..(2304): n is a, c, g, or t
  misc_feature (2308)..(2310): n is a, c, g, or t
  misc_feature (2314)..(2315): n is a, c, g, or t
  misc_feature (2319)..(2320): n is a, c, g, or t
  misc_feature (2322)..(2322): n is a, c, g, or t
  misc_feature (2324)..(2325): n is a, c, g, or t
  misc_feature (2332)..(2336): n is a, c, g, or t
  misc_feature (2338)..(2339): n is a, c, g, or t
  misc_feature (2341)..(2341): n is a, c, g, or t
  misc_feature (2343)..(2344): n is a, c, g, or t
  misc_feature (2347)..(2348): n is a, c, g, or t
  misc_feature (2351)..(2352): n is a, c, g, or t
  misc_feature (2356)..(2358): n is a, c, g, or t
  misc_feature (2360)..(2361): n is a, c, g, or t
  misc_feature (2364)..(2364): n is a, c, g, or t
  misc_feature (2369)..(2375): n is a, c, g, or t
  misc_feature (2378)..(2379): n is a, c, g, or t
  misc_feature (2387)..(2389): n is a, c, g, or t
  misc_feature (2391)..(2400): n is a, c, g, or t
  misc_feature (2402)..(2403): n is a, c, g, or t
  misc_feature (2405)..(2405): n is a, c, g, or t
  misc_feature (2407)..(2409): n is a, c, g, or t
  misc_feature (2411)..(2411): n is a, c, g, or t
  misc_feature (2414)..(2415): n is a, c, g, or t
  misc_feature (2417)..(2419): n is a, c, g, or t
  misc_feature (2422)..(2423): n is a, c, g, or t
  misc_feature (2425)..(2425): n is a, c, g, or t
  misc_feature (2427)..(2427): n is a, c, g, or t
  misc_feature (2430)..(2430): n is a, c, g, or t
  misc_feature (2435)..(2435): n is a, c, g, or t
  misc_feature (2437)..(2439): n is a, c, g, or t
  misc_feature (2441)..(2442): n is a, c, g, or t
  misc_feature (2444)..(2444): n is a, c, g, or t
  misc_feature (2450)..(2452): n is a, c, g, or t
  misc_feature (2454)..(2454): n is a, c, g, or t
  misc_feature (2456)..(2456): n is a, c, g, or t
  misc_feature (2458)..(2459): n is a, c, g, or t
  misc_feature (2463)..(2465): n is a, c, g, or t
  misc_feature (2467)..(2472): n is a, c, g, or t
  misc_feature (2474)..(2476): n is a, c, g, or t
  misc_feature (2479)..(2481): n is a, c, g, or t
  misc_feature (2484)..(2486): n is a, c, g, or t
  misc_feature (2489)..(2490): n is a, c, g, or t
  misc_feature (2492)..(2495): n is a, c, g, or t
  misc_feature (2498)..(2499): n is a, c, g, or t
  misc_feature (2501)..(2501): n is a, c, g, or t
  misc_feature (2503)..(2503): n is a, c, g, or t
  misc_feature (2505)..(2509): n is a, c, g, or t
  misc_feature (2511)..(2511): n is a, c, g, or t
  misc_feature (2514)..(2514): n is a, c, g, or t
  misc_feature (2517)..(2518): n is a, c, g, or t
  misc_feature (2520)..(2521): n is a, c, g, or t
  misc_feature (2523)..(2524): n is a, c, g, or t
  misc_feature (2526)..(2528): n is a, c, g, or t
  misc_feature (2530)..(2530): n is a, c, g, or t
  misc_feature (2532)..(2538): n is a, c, g, or t
  misc_feature (2541)..(2543): n is a, c, g, or t
  misc_feature (2547)..(2547): n is a, c, g, or t
  misc_feature (2549)..(2550): n is a, c, g, or t
  misc_feature (2552)..(2558): n is a, c, g, or t
  misc_feature (2560)..(2561): n is a, c, g, or t
  misc_feature (2563)..(2567): n is a, c, g, or t
  misc_feature (2570)..(2570): n is a, c, g, or t
  misc_feature (2572)..(2572): n is a, c, g, or t
  misc_feature (2574)..(2576): n is a, c, g, or t
  misc_feature (2579)..(2580): n is a, c, g, or t
  misc_feature (2583)..(2584): n is a, c, g, or t
  misc_feature (2587)..(2589): n is a, c, g, or t
  misc_feature (2594)..(2596): n is a, c, g, or t
  misc_feature (2600)..(2600): n is a, c, g, or t
  misc_feature (2602)..(2604): n is a, c, g, or t
  misc_feature (2608)..(2608): n is a, c, g, or t
  misc_feature (2613)..(2614): n is a, c, g, or t
  misc_feature (2616)..(2616): n is a, c, g, or t
  misc_feature (2618)..(2619): n is a, c, g, or t
  misc_feature (2621)..(2621): n is a, c, g, or t
  misc_feature (2623)..(2624): n is a, c, g, or t
  misc_feature (2627)..(2628): n is a, c, g, or t
  misc_feature (2630)..(2630): n is a, c, g, or t
  misc_feature (2632)..(2634): n is a, c, g, or t
  misc_feature (2636)..(2636): n is a, c, g, or t
  misc_feature (2638)..(2641): n is a, c, g, or t
  misc_feature (2644)..(2645): n is a, c, g, or t
  misc_feature (2648)..(2648): n is a, c, g, or t
  misc_feature (2650)..(2650): n is a, c, g, or t
  misc_feature (2654)..(2657): n is a, c, g, or t
  misc_feature (2659)..(2660): n is a, c, g, or t
  misc_feature (2663)..(2663): n is a, c, g, or t
  misc_feature (2665)..(2668): n is a, c, g, or t
  misc_feature (2672)..(2672): n is a, c, g, or t
  misc_feature (2674)..(2674): n is a, c, g, or t
  misc_feature (2676)..(2676): n is a, c, g, or t
  misc_feature (2678)..(2679): n is a, c, g, or t
  misc_feature (2682)..(2683): n is a, c, g, or t
  misc_feature (2689)..(2689): n is a, c, g, or t
  misc_feature (2691)..(2693): n is a, c, g, or t
  misc_feature (2696)..(2696): n is a, c, g, or t
  misc_feature (2701)..(2702): n is a, c, g, or t
  misc_feature (2709)..(2709): n is a, c, g, or t
  misc_feature (2711)..(2711): n is a, c, g, or t
  misc_feature (2713)..(2715): n is a, c, g, or t
  misc_feature (2717)..(2718): n is a, c, g, or t
  misc_feature (2720)..(2720): n is a, c, g, or t
  misc_feature (2722)..(2723): n is a, c, g, or t
  misc_feature (2725)..(2726): n is a, c, g, or t
  misc_feature (2729)..(2730): n is a, c, g, or t
  misc_feature (2732)..(2732): n is a, c, g, or t
  misc_feature (2734)..(2740): n is a, c, g, or t
  misc_feature (2746)..(2749): n is a, c, g, or t
  misc_feature (2751)..(2752): n is a, c, g, or t
  misc_feature (2756)..(2757): n is a, c, g, or t
  misc_feature (2763)..(2764): n is a, c, g, or t
  misc_feature (2766)..(2766): n is a, c, g, or t
  misc_feature (2768)..(2770): n is a, c, g, or t
  misc_feature (2772)..(2774): n is a, c, g, or t
  misc_feature (2776)..(2777): n is a, c, g, or t
  misc_feature (2779)..(2779): n is a, c, g, or t
  misc_feature (2782)..(2782): n is a, c, g, or t
  misc_feature (2784)..(2784): n is a, c, g, or t
  misc_feature (2788)..(2789): n is a, c, g, or t
  misc_feature (2793)..(2794): n is a, c, g, or t
  misc_feature (2797)..(2800): n is a, c, g, or t
  misc_feature (2802)..(2803): n is a, c, g, or t
  misc_feature (2805)..(2805): n is a, c, g, or t
  misc_feature (2807)..(2807): n is a, c, g, or t
  misc_feature (2809)..(2815): n is a, c, g, or t
  misc_feature (2817)..(2817): n is a, c, g, or t
  misc_feature (2821)..(2822): n is a, c, g, or t
  misc_feature (2825)..(2825): n is a, c, g, or t
  misc_feature (2827)..(2827): n is a, c, g, or t
  misc_feature (2829)..(2831): n is a, c, g, or t
  misc_feature (2834)..(2835): n is a, c, g, or t
  misc_feature (2837)..(2839): n is a, c, g, or t
  misc_feature (2848)..(2849): n is a, c, g, or t
  misc_feature (2852)..(2852): n is a, c, g, or t
  misc_feature (2855)..(2855): n is a, c, g, or t
  misc_feature (2857)..(2857): n is a, c, g, or t
  misc_feature (2863)..(2865): n is a, c, g, or t
  misc_feature (2867)..(2868): n is a, c, g, or t
  misc_feature (2870)..(2870): n is a, c, g, or t
  misc_feature (2872)..(2872): n is a, c, g, or t
  misc_feature (2874)..(2874): n is a, c, g, or t
  misc_feature (2879)..(2879): n is a, c, g, or t
  misc_feature (2881)..(2881): n is a, c, g, or t
  misc_feature (2883)..(2883): n is a, c, g, or t
  misc_feature (2886)..(2890): n is a, c, g, or t
  misc_feature (2893)..(2894): n is a, c, g, or t
  misc_feature (2897)..(2901): n is a, c, g, or t
  misc_feature (2903)..(2903): n is a, c, g, or t
  misc_feature (2905)..(2906): n is a, c, g, or t
  misc_feature (2908)..(2910): n is a, c, g, or t
  misc_feature (2912)..(2912): n is a, c, g, or t
  misc_feature (2915)..(2916): n is a, c, g, or t
  misc_feature (2920)..(2920): n is a, c, g, or t
  misc_feature (2924)..(2925): n is a, c, g, or t
  misc_feature (2928)..(2929): n is a, c, g, or t
  misc_feature (2931)..(2931): n is a, c, g, or t
  misc_feature (2933)..(2933): n is a, c, g, or t
  misc_feature (2935)..(2936): n is a, c, g, or t
  misc_feature (2938)..(2938): n is a, c, g, or t
  misc_feature (2940)..(2943): n is a, c, g, or t
  misc_feature (2946)..(2948): n is a, c, g, or t
  misc_feature (2952)..(2953): n is a, c, g, or t
  misc_feature (2958)..(2958): n is a, c, g, or t
  misc_feature (2960)..(2960): n is a, c, g, or t
  misc_feature (2962)..(2962): n is a, c, g, or t
  misc_feature (2964)..(2964): n is a, c, g, or t
  misc_feature (2966)..(2966): n is a, c, g, or t
  misc_feature (2968)..(2969): n is a, c, g, or t
  misc_feature (2971)..(2972): n is a, c, g, or t
  misc_feature (2975)..(2975): n is a, c, g, or t
  misc_feature (2977)..(2978): n is a, c, g, or t
  misc_feature (2980)..(2980): n is a, c, g, or t
  misc_feature (2982)..(2983): n is a, c, g, or t
  misc_feature (2986)..(2987): n is a, c, g, or t
  misc_feature (2989)..(2991): n is a, c, g, or t
  misc_feature (2993)..(2994): n is a, c, g, or t
  misc_feature (2999)..(2999): n is a, c, g, or t
  misc_feature (3003)..(3004): n is a, c, g, or t
  misc_feature (3007)..(3007): n is a, c, g, or t
  misc_feature (3017)..(3019): n is a, c, g, or t
  misc_feature (3021)..(3022): n is a, c, g, or t
  misc_feature (3026)..(3030): n is a, c, g, or t
  misc_feature (3037)..(3039): n is a, c, g, or t
  misc_feature (3041)..(3042): n is a, c, g, or t
  misc_feature (3046)..(3047): n is a, c, g, or t
  misc_feature (3053)..(3055): n is a, c, g, or t
  misc_feature (3057)..(3058): n is a, c, g, or t
  misc_feature (3060)..(3061): n is a, c, g, or t
  misc_feature (3064)..(3065): n is a, c, g, or t
  misc_feature (3067)..(3067): n is a, c, g, or t
  misc_feature (3070)..(3072): n is a, c, g, or t
  misc_feature (3075)..(3076): n is a, c, g, or t
  misc_feature (3078)..(3082): n is a, c, g, or t
  misc_feature (3084)..(3084): n is a, c, g, or t
  misc_feature (3086)..(3086): n is a, c, g, or t
  misc_feature (3092)..(3092): n is a, c, g, or t
  misc_feature (3094)..(3094): n is a, c, g, or t
  misc_feature (3096)..(3097): n is a, c, g, or t
  misc_feature (3099)..(3099): n is a, c, g, or t
  misc_feature (3101)..(3101): n is a, c, g, or t
  misc_feature (3108)..(3108): n is a, c, g, or t
  misc_feature (3110)..(3114): n is a, c, g, or t
  misc_feature (3116)..(3117): n is a, c, g, or t
  misc_feature (3122)..(3123): n is a, c, g, or t
  misc_feature (3125)..(3126): n is a, c, g, or t
  misc_feature (3128)..(3129): n is a, c, g, or t
  misc_feature (3134)..(3134): n is a, c, g, or t
  misc_feature (3137)..(3138): n is a, c, g, or t
  misc_feature (3141)..(3142): n is a, c, g, or t
  misc_feature (3144)..(3145): n is a, c, g, or t
  misc_feature (3148)..(3148): n is a, c, g, or t
  misc_feature (3150)..(3154): n is a, c, g, or t
  misc_feature (3156)..(3156): n is a, c, g, or t
  misc_feature (3158)..(3158): n is a, c, g, or t
  misc_feature (3160)..(3160): n is a, c, g, or t
  misc_feature (3163)..(3168): n is a, c, g, or t
  misc_feature (3172)..(3172): n is a, c, g, or t
  misc_feature (3174)..(3178): n is a, c, g, or t
  misc_feature (3187)..(3187): n is a, c, g, or t
  misc_feature (3193)..(3194): n is a, c, g, or t
  misc_feature (3196)..(3201): n is a, c, g, or t
  misc_feature (3204)..(3204): n is a, c, g, or t
  misc_feature (3206)..(3206): n is a, c, g, or t
  misc_feature (3209)..(3209): n is a, c, g, or t
  misc_feature (3211)..(3211): n is a, c, g, or t
  misc_feature (3214)..(3214): n is a, c, g, or t
  misc_feature (3216)..(3216): n is a, c, g, or t
  misc_feature (3218)..(3219): n is a, c, g, or t
  misc_feature (3222)..(3222): n is a, c, g, or t
  misc_feature (3225)..(3225): n is a, c, g, or t
  misc_feature (3230)..(3232): n is a, c, g, or t
  misc_feature (3234)..(3236): n is a, c, g, or t
  misc_feature (3238)..(3239): n is a, c, g, or t
  misc_feature (3241)..(3248): n is a, c, g, or t
  misc_feature (3252)..(3253): n is a, c, g, or t
  misc_feature (3257)..(3261): n is a, c, g, or t
  misc_feature (3265)..(3265): n is a, c, g, or t
  misc_feature (3270)..(3271): n is a, c, g, or t
  misc_feature (3274)..(3274): n is a, c, g, or t
  misc_feature (3276)..(3276): n is a, c, g, or t
  misc_feature (3278)..(3279): n is a, c, g, or t
  misc_feature (3281)..(3288): n is a, c, g, or t
  misc_feature (3290)..(3290): n is a, c, g, or t
  misc_feature (3296)..(3296): n is a, c, g, or t
  misc_feature (3299)..(3301): n is a, c, g, or t
  misc_feature (3305)..(3307): n is a, c, g, or t
  misc_feature (3309)..(3310): n is a, c, g, or t
  misc_feature (3312)..(3313): n is a, c, g, or t
  misc_feature (3317)..(3321): n is a, c, g, or t
  misc_feature (3323)..(3323): n is a, c, g, or t
  misc_feature (3326)..(3326): n is a, c, g, or t
  misc_feature (3329)..(3329): n is a, c, g, or t
  misc_feature (3331)..(3331): n is a, c, g, or t
  misc_feature (3333)..(3333): n is a, c, g, or t
  misc_feature (3335)..(3338): n is a, c, g, or t
  misc_feature (3340)..(3340): n is a, c, g, or t
  misc_feature (3343)..(3343): n is a, c, g, or t
  misc_feature (3347)..(3347): n is a, c, g, or t
  misc_feature (3349)..(3353): n is a, c, g, or t
  misc_feature (3355)..(3355): n is a, c, g, or t
  misc_feature (3360)..(3361): n is a, c, g, or t
  misc_feature (3364)..(3366): n is a, c, g, or t
  misc_feature (3368)..(3368): n is a, c, g, or t
  misc_feature (3372)..(3372): n is a, c, g, or t
  misc_feature (3376)..(3377): n is a, c, g, or t
  misc_feature (3379)..(3379): n is a, c, g, or t
  misc_feature (3382)..(3382): n is a, c, g, or t
  misc_feature (3386)..(3386): n is a, c, g, or t
  misc_feature (3388)..(3391): n is a, c, g, or t
  misc_feature (3394)..(3394): n is a, c, g, or t
  misc_feature (3397)..(3397): n is a, c, g, or t
  misc_feature (3400)..(3400): n is a, c, g, or t
  misc_feature (3402)..(3402): n is a, c, g, or t
  misc_feature (3405)..(3406): n is a, c, g, or t
  misc_feature (3408)..(3410): n is a, c, g, or t
  misc_feature (3412)..(3415): n is a, c, g, or t
  misc_feature (3421)..(3422): n is a, c, g, or t
  misc_feature (3425)..(3425): n is a, c, g, or t
  misc_feature (3428)..(3432): n is a, c, g, or t
  misc_feature (3435)..(3438): n is a, c, g, or t
  misc_feature (3440)..(3443): n is a, c, g, or t
  misc_feature (3447)..(3448): n is a, c, g, or t
  misc_feature (3450)..(3451): n is a, c, g, or t
  misc_feature (3455)..(3456): n is a, c, g, or t
  misc_feature (3459)..(3462): n is a, c, g, or t
  misc_feature (3464)..(3464): n is a, c, g, or t
  misc_feature (3469)..(3471): n is a, c, g, or t
  misc_feature (3475)..(3477): n is a, c, g, or t
  misc_feature (3480)..(3481): n is a, c, g, or t
  misc_feature (3483)..(3486): n is a, c, g, or t
  misc_feature (3490)..(3490): n is a, c, g, or t
  misc_feature (3492)..(3492): n is a, c, g, or t
  misc_feature (3500)..(3503): n is a, c, g, or t
  misc_feature (3508)..(3509): n is a, c, g, or t
  misc_feature (3511)..(3512): n is a, c, g, or t
  misc_feature (3516)..(3516): n is a, c, g, or t
  misc_feature (3518)..(3519): n is a, c, g, or t
  misc_feature (3521)..(3521): n is a, c, g, or t
  misc_feature (3523)..(3523): n is a, c, g, or t
  misc_feature (3526)..(3527): n is a, c, g, or t
  misc_feature (3529)..(3529): n is a, c, g, or t
  misc_feature (3532)..(3532): n is a, c, g, or t
  misc_feature (3534)..(3535): n is a, c, g, or t
  misc_feature (3538)..(3538): n is a, c, g, or t
  misc_feature (3543)..(3547): n is a, c, g, or t
  misc_feature (3549)..(3551): n is a, c, g, or t
  misc_feature (3553)..(3553): n is a, c, g, or t
  misc_feature (3556)..(3558): n is a, c, g, or t
  misc_feature (3564)..(3565): n is a, c, g, or t
  misc_feature (3568)..(3568): n is a, c, g, or t
  misc_feature (3570)..(3572): n is a, c, g, or t
  misc_feature (3577)..(3578): n is a, c, g, or t
  misc_feature (3580)..(3580): n is a, c, g, or t
  misc_feature (3585)..(3585): n is a, c, g, or t
  misc_feature (3588)..(3592): n is a, c, g, or t
  misc_feature (3595)..(3602): n is a, c, g, or t
  misc_feature (3605)..(3606): n is a, c, g, or t
  misc_feature (3609)..(3609): n is a, c, g, or t
  misc_feature (3611)..(3613): n is a, c, g, or t
  misc_feature (3616)..(3618): n is a, c, g, or t
  misc_feature (3622)..(3622): n is a, c, g, or t
  misc_feature (3625)..(3632): n is a, c, g, or t
  misc_feature (3634)..(3635): n is a, c, g, or t
  misc_feature (3638)..(3640): n is a, c, g, or t
  misc_feature (3642)..(3643): n is a, c, g, or t
  misc_feature (3646)..(3646): n is a, c, g, or t
  misc_feature (3648)..(3648): n is a, c, g, or t
  misc_feature (3650)..(3652): n is a, c, g, or t
  misc_feature (3654)..(3654): n is a, c, g, or t
  misc_feature (3656)..(3656): n is a, c, g, or t
  misc_feature (3659)..(3662): n is a, c, g, or t
  misc_feature (3665)..(3666): n is a, c, g, or t
  misc_feature (3668)..(3668): n is a, c, g, or t
  misc_feature (3670)..(3671): n is a, c, g, or t
  misc_feature (3673)..(3673): n is a, c, g, or t
  misc_feature (3675)..(3679): n is a, c, g, or t
  misc_feature (3685)..(3686): n is a, c, g, or t
  misc_feature (3688)..(3694): n is a, c, g, or t
  misc_feature (3696)..(3696): n is a, c, g, or t
  misc_feature (3698)..(3699): n is a, c, g, or t
  misc_feature (3701)..(3702): n is a, c, g, or t
  misc_feature (3706)..(3710): n is a, c, g, or t
  misc_feature (3712)..(3713): n is a, c, g, or t
  misc_feature (3716)..(3716): n is a, c, g, or t
  misc_feature (3718)..(3719): n is a, c, g, or t
  misc_feature (3721)..(3722): n is a, c, g, or t
  misc_feature (3724)..(3724): n is a, c, g, or t
  misc_feature (3728)..(3728): n is a, c, g, or t
  misc_feature (3730)..(3732): n is a, c, g, or t
  misc_feature (3736)..(3736): n is a, c, g, or t
  misc_feature (3738)..(3739): n is a, c, g, or t
  misc_feature (3744)..(3745): n is a, c, g, or t
  misc_feature (3748)..(3751): n is a, c, g, or t
  misc_feature (3753)..(3753): n is a, c, g, or t
  misc_feature (3755)..(3756): n is a, c, g, or t
  misc_feature (3760)..(3760): n is a, c, g, or t
  misc_feature (3767)..(3770): n is a, c, g, or t
  misc_feature (3772)..(3775): n is a, c, g, or t
  misc_feature (3778)..(3778): n is a, c, g, or t
  misc_feature (3781)..(3781): n is a, c, g, or t
  misc_feature (3783)..(3784): n is a, c, g, or t
  misc_feature (3788)..(3788): n is a, c, g, or t
  misc_feature (3792)..(3793): n is a, c, g, or t
  misc_feature (3795)..(3797): n is a, c, g, or t
  misc_feature (3801)..(3804): n is a, c, g, or t
  misc_feature (3806)..(3808): n is a, c, g, or t
  misc_feature (3810)..(3810): n is a, c, g, or t
  misc_feature (3812)..(3812): n is a, c, g, or t
  misc_feature (3814)..(3814): n is a, c, g, or t
  misc_feature (3816)..(3817): n is a, c, g, or t
  misc_feature (3821)..(3821): n is a, c, g, or t
  misc_feature (3823)..(3826): n is a, c, g, or t
  misc_feature (3829)..(3829): n is a, c, g, or t
  misc_feature (3832)..(3832): n is a, c, g, or t
  misc_feature (3835)..(3838): n is a, c, g, or t
  misc_feature (3841)..(3842): n is a, c, g, or t
  misc_feature (3844)..(3844): n is a, c, g, or t
  misc_feature (3847)..(3851): n is a, c, g, or t
  misc_feature (3853)..(3854): n is a, c, g, or t
  misc_feature (3856)..(3859): n is a, c, g, or t
  misc_feature (3861)..(3861): n is a, c, g, or t
  misc_feature (3864)..(3865): n is a, c, g, or t
  misc_feature (3867)..(3867): n is a, c, g, or t
  misc_feature (3869)..(3870): n is a, c, g, or t
  misc_feature (3872)..(3873): n is a, c, g, or t
  misc_feature (3875)..(3878): n is a, c, g, or t
  misc_feature (3880)..(3882): n is a, c, g, or t
  misc_feature (3884)..(3884): n is a, c, g, or t
  misc_feature (3886)..(3887): n is a, c, g, or t
  misc_feature (3890)..(3891): n is a, c, g, or t
  misc_feature (3893)..(3893): n is a, c, g, or t
  misc_feature (3895)..(3895): n is a, c, g, or t
  misc_feature (3897)..(3897): n is a, c, g, or t
  misc_feature (3903)..(3904): n is a, c, g, or t
  misc_feature (3906)..(3907): n is a, c, g, or t
  misc_feature (3910)..(3912): n is a, c, g, or t
  misc_feature (3914)..(3917): n is a, c, g, or t
  misc_feature (3919)..(3920): n is a, c, g, or t
  misc_feature (3922)..(3923): n is a, c, g, or t
  misc_feature (3925)..(3927): n is a, c, g, or t
  misc_feature (3929)..(3929): n is a, c, g, or t
  misc_feature (3932)..(3932): n is a, c, g, or t
  misc_feature (3935)..(3937): n is a, c, g, or t
  misc_feature (3943)..(3944): n is a, c, g, or t
  misc_feature (3947)..(3949): n is a, c, g, or t
  misc_feature (3951)..(3954): n is a, c, g, or t
  misc_feature (3956)..(3959): n is a, c, g, or t
  misc_feature (3961)..(3961): n is a, c, g, or t
  misc_feature (3966)..(3969): n is a, c, g, or t
  misc_feature (3972)..(3972): n is a, c, g, or t
  misc_feature (3975)..(3975): n is a, c, g, or t
  misc_feature (3978)..(3981): n is a, c, g, or t
  misc_feature (3983)..(3983): n is a, c, g, or t
  misc_feature (3986)..(3986): n is a, c, g, or t
  misc_feature (3992)..(3992): n is a, c, g, or t
  misc_feature (3994)..(3996): n is a, c, g, or t
  misc_feature (3998)..(3998): n is a, c, g, or t
ggcgtggttgatgaagctagtgagagcctcaacagagaacacaacatcgtcagacttcaggacgtcgtacgtgttcagctgatcggcgaccaggatatggacgtcgggcaggttgcgggcactcttccaagcggtcttgtcctcacgtcccaggacgaggaggacagacttgcggtcagtcaggcgctcaatgaaggcgcgggcagccttggtggacggattctggccggggaccagttcttccaccacgtgaatgcggctgtggcgtgcgcggtcagtaagggcaccacgcagtgcagcagctttcatcttcttgggggtgcgctggctgtagtcacggggcttcggtccgtgcgagatgccaccaccggtgaagtggggtgcgcggatggagccctggcgtgcacggccagtgcctttctggcggaacggcttgcggccaccgccggagacttcaccacgagtcttggtgctgtgggtgccttgacgctttgcagcaagctgagcattaacaacctggtgcatcagcgcaatgctggcctcacggtcgaagatgtcagcaggcagctcaacctggccgttggtgccaccatcagcggtgtgtacgtcgagcttcagattggtcatgctcgttcaccgcccttcactgcggttttcacggttacgaggccgccgcgagcaccagggatggcacccttgatgatcagcaggttagcctcagtgtcaatcttttgaatcttcagattctgggtagtaacgcggtcgctacccatgcgtccggccatgcgggtgcccttgaagacgcgacccggggttgcacaggcaccgatgccaccgacgcggcggtgtgctgcctggttaccgtgggatgcgccctggccggaaaagccgtggcgtttcataccaccggcgaagcccttacccttggangtaccggtgacgtccacgaagtcaatgccttcgaaaatgtcgacggtgacgtcctgtccaacctcgtaaccagagacgtcgtccatgcgaatctcggccatgtggcggcggggggtaacgccagctttcttgaagtgacctgcctgcggcttcttagccttgcgggggtcaatctcgccataggcgatctggatggcgttgtagccatcgttttctacggtgcgaatctgggtaaccacacacggcccagcttcgacgacggtaaccggaacaacgcggttggattcgtcgaagatctgagtcatgccgagcttggtgcccagaatgcccttgatctcagtttcactcattagttattctccgctgccaaaaattccgtcgatcactgaatattcacatcgacgctggccggaagatcgatgcgcatcagggcatcaaccgtcttcggcgtcgggtcgaggatgtcgatcaagcgcttgtgagtgcgcatctcgaagtgttcgcgagaatccttgtacttgtggggagaacgaataactgcgtacacgttcttctctgtgggcaacggcactgggccaacgacacgggcacccgtacgggtaaccgtctcgacgatcttgcgtgcagacgcatcaatcgcctcgtggtcgtaggctttgagcctaatgcggatcttttgtcccgccacgcttatcctcttcctacgctgtcccacatcgcaatgattggtgggaatcgctgttgtctctataacgttgtccggcttcaggccacggctcaacgccagttttctcgtgcatgctggtatttccctcaaacaactgcggatgtgagcgtggcataaacacacgccattgatccgcagacgtcagggtcatgctttaccccttgccggaaataccaaccgcaaggttcaaacacgaaaccatatgtcacgtcggaagaggccccgccgaagcgatgctcttacctactgccgctgtttatttgccatgccccttcttcaccagtcccccacgcacaaacgcggggcaccaactctgtgcgataccctgatnaagcaggcgagtcgacactagaaggtggttcatgtttgccacaccaccacacaccctcaaaggcatgccgtgttgaagcaaccctgacatttaaccacacgtttcccaccaacacaagttatctttcccacgcttatcgacgcccgcccctaccgcanccnnnnnnnnanancncaccncnnnncntcncnannaccnncacnnancananntnnatcgnngcgnnnccngngngnannnnnngnnccngcnnnaancncgncnntancnnnccntnntgngncntnncnctgnnnntnnnnnnnnnngnnnnnnnccannncccnnccgnntnanntgacagnnnnngnntnanngcnnccnncatnnncnntgncaacnnnnnnncanncccccacnnngnnnnnnnnnncnncngnnnanccnncnnnaannangnggncgtcnannngnngnccaacnnnangnanntaannngnnnnnncnnnagnnntannncgnnannnntgnncnanannnnncnccntgnngnnannannnancnnnnnnnccnnnccancnngnnnnnnncnnannnnntgncnannnccnnacnngannncaacnnnatcncnnnaagnctgcnngncnnangnnccnncntnnntncnnnnggnngcnanaacnnnncnntcntnnnnaagncnangnntannacgccncnnngcngcaanngcggcgncntnnngnnantnncnnacnncncnnnnnnngtaggnnnncnngccnntggccnncncnnngnnntnngnacncnaccnnaccnngtnnnncnnancngnnnnnnncncagnntgnanannnccnncnnncaccccaannacnttncnccaatnnncnncntngnattcncnancannnnnatnnccnnnnncnannannntnccnnctgngcgnnctnncncngnntntnnnnggnnngctnntaggntnanancntnnannatncnncnannttnncnnntnntaaanaccnnggnaaaaagaaannnanncctnnnnnacaaggnnncnnagtnnattctnnntnntnntannantcnnngannannnnntnancttggncncnngncnagcgccnannnnncnnccacnntnncnnatagnganncgnngnnccncnnnnntngnanccnnnnnnatcngnnnnncagacatgncaacgnngnnnnnnggnanaancntcncngnnccntcnggcannncnnnannannnnnnnngtcnntggnnnnnaagnagaanngcngncnntnnnnnnnnangaacgnggnnnggcnnncnncnncatnnnnngncangangnanannnnanccncgancnnnnngngcggnntgnnngngccnggcnnanccncaancnnnncangcncancntcnncnnncnnnntgccannganaannnnnccnnnntnnnngccnncnncggnntannnnancagcnnncggnnnatnncnnnnccgntnacggtggnnnnggtgnncnnctcncnnangnccnngntcncnnccncttcnnnnncnnngngcnnnccgcgnncancnnnaccgnngnccacngtnnnnnggnnnnnnnnggnnaanannnccnnnatcngcnnnnnnnngnnctnnncnntcncncnnncngnatnnnnaanngncnngncnnnnnccttcnncnnnnnnncnanngnntggnnnnncnnggnanngnntncaanannnttcngnncaganntgnnnncnannggancttcctnnnngnnnnccngcncnnccancagnncnnnaacnnnnannncnancngnncgangnnnnccncancannnnccnngncgnnnnngnncnnnncnacnngnanntnngnnnngnnnancnngcnngngngnagaacnngnncannngnnnncnncnngnnncngtnggnnncggcannaannngnnnngnnnngnccatnnnngcngcnccnnnnancangttctngnnntngt

SEQ ID NO: 909 - DNA, 4000 bp, Escherichia coli
  misc_feature (106)..(106): n is a, c, g, or t
  misc_feature (109)..(110): n is a, c, g, or t
  misc_feature (113)..(114): n is a, c, g, or t
  misc_feature (116)..(117): n is a, c, g, or t
  misc_feature (120)..(120): n is a, c, g, or t
  misc_feature (122)..(123): n is a, c, g, or t
  misc_feature (125)..(127): n is a, c, g, or t
  misc_feature (129)..(130): n is a, c, g, or t
  misc_feature (132)..(132): n is a, c, g, or t
  misc_feature (136)..(136): n is a, c, g, or t
  misc_feature (140)..(140): n is a, c, g, or t
  misc_feature (144)..(144): n is a, c, g, or t
  misc_feature (146)..(147): n is a, c, g, or t
  misc_feature (149)..(149): n is a, c, g, or t
  misc_feature (152)..(154): n is a, c, g, or t
  misc_feature (156)..(156): n is a, c, g, or t
  misc_feature (159)..(159): n is a, c, g, or t
  misc_feature (162)..(165): n is a, c, g, or t
  misc_feature (178)..(179): n is a, c, g, or t
  misc_feature (181)..(181): n is a, c, g, or t
  misc_feature (188)..(188): n is a, c, g, or t
  misc_feature (190)..(190): n is a, c, g, or t
  misc_feature (192)..(194): n is a, c, g, or t
  misc_feature (196)..(198): n is a, c, g, or t
  misc_feature (201)..(203): n is a, c, g, or t
  misc_feature (209)..(210): n is a, c, g, or t
  misc_feature (212)..(212): n is a, c, g, or t
  misc_feature (216)..(217): n is a, c, g, or t
  misc_feature (221)..(222): n is a, c, g, or t
  misc_feature (226)..(226): n is a, c, g, or t
  misc_feature (230)..(230): n is a, c, g, or t
  misc_feature (232)..(233): n is a, c, g, or t
  misc_feature (239)..(240): n is a, c, g, or t
  misc_feature (242)..(247): n is a, c, g, or t
  misc_feature (249)..(250): n is a, c, g, or t
  misc_feature (252)..(253): n is a, c, g, or t
  misc_feature (255)..(256): n is a, c, g, or t
  misc_feature (258)..(259): n is a, c, g, or t
  misc_feature (261)..(261): n is a, c, g, or t
  misc_feature (263)..(263): n is a, c, g, or t
  misc_feature (265)..(269): n is a, c, g, or t
  misc_feature (273)..(274): n is a, c, g, or t
  misc_feature (276)..(276): n is a, c, g, or t
  misc_feature (278)..(280): n is a, c, g, or t
  misc_feature (283)..(283): n is a, c, g, or t
  misc_feature (286)..(287): n is a, c, g, or t
  misc_feature (290)..(291): n is a, c, g, or t
  misc_feature (294)..(295): n is a, c, g, or t
  misc_feature (297)..(297): n is a, c, g, or t
  misc_feature (299)..(306): n is a, c, g, or t
  misc_feature (308)..(308): n is a, c, g, or t
  misc_feature (310)..(311): n is a, c, g, or t
  misc_feature (313)..(313): n is a, c, g, or t
  misc_feature (315)..(315): n is a, c, g, or t
  misc_feature (317)..(317): n is a, c, g, or t
  misc_feature (319)..(321): n is a, c, g, or t
  misc_feature (323)..(325): n is a, c, g, or t
  misc_feature (328)..(328): n is a, c, g, or t
  misc_feature (330)..(331): n is a, c, g, or t
  misc_feature (335)..(335): n is a, c, g, or t
  misc_feature (338)..(339): n is a, c, g, or t
  misc_feature (341)..(343): n is a, c, g, or t
  misc_feature (346)..(346): n is a, c, g, or t
  misc_feature (353)..(353): n is a, c, g, or t
  misc_feature (356)..(356): n is a, c, g, or t
  misc_feature (358)..(358): n is a, c, g, or t
  misc_feature (360)..(365): n is a, c, g, or t
  misc_feature (367)..(368): n is a, c, g, or t
  misc_feature (376)..(376): n is a, c, g, or t
  misc_feature (381)..(384): n is a, c, g, or t
  misc_feature (392)..(394): n is a, c, g, or t
  misc_feature (396)..(399): n is a, c, g, or t
  misc_feature (402)..(402): n is a, c, g, or t
  misc_feature (404)..(404): n is a, c, g, or t
  misc_feature (407)..(408): n is a, c, g, or t
  misc_feature (414)..(414): n is a, c, g, or t
  misc_feature (416)..(421): n is a, c, g, or t
  misc_feature (423)..(424): n is a, c, g, or t
  misc_feature (426)..(427): n is a, c, g, or t
  misc_feature (429)..(430): n is a, c, g, or t
  misc_feature (433)..(433): n is a, c, g, or t
  misc_feature (441)..(441): n is a, c, g, or t
  misc_feature (444)..(445): n is a, c, g, or t
  misc_feature (449)..(451): n is a, c, g, or t
  misc_feature (453)..(454): n is a, c, g, or t
  misc_feature (456)..(456): n is a, c, g, or t
  misc_feature (458)..(461): n is a, c, g, or t
  misc_feature (466)..(466): n is a, c, g, or t
  misc_feature (468)..(469): n is a, c, g, or t
  misc_feature (471)..(473): n is a, c, g, or t
  misc_feature (475)..(475): n is a, c, g, or t
  misc_feature (477)..(477): n is a, c, g, or t
  misc_feature (479)..(480): n is a, c, g, or t
  misc_feature (482)..(482): n is a, c, g, or t
  misc_feature (488)..(489): n is a, c, g, or t
  misc_feature (491)..(491): n is a, c, g, or t
  misc_feature (494)..(494): n is a, c, g, or t
  misc_feature (498)..(498): n is a, c, g, or t
  misc_feature (503)..(503): n is a, c, g, or t
  misc_feature (935)..(935): n is a, c, g, or t
  misc_feature (1957)..(1957): n is a, c, g, or t
  misc_feature (1980)..(1980): n is a, c, g, or t
  misc_feature (1991)..(1991): n is a, c, g, or t
taaatgaccggatttctcgttgccttgatggtcggaaaattttctaccggacctaataatgaaaggtgcttatatacatgtttactctaaatgtaggtttattttnttnnttnntnntcntnngnnntnntntttngggncccngnngnttnnntnggncgnnnnactttttctttcnntnaccggcngnannncnnnctnnnttcgtnngncacnnccgnncggncgtncnnaaaaannannnnnncnntnncnngnncncnannnnncccnnancnnnaanacnnccnnctnncntnnnnnnnnantnncngncngnnntnnnttnannaaanatnntnnnccntggaaanaancngnnnnnncnntttttccnatttnnnnaaatttcnnntnnnnttncnttnnccggtnannnnnncnntnngnnggngggttttntgnnggannncnntngnnnngggancnngnnncngntnngnttttcnnancgnccgnccggnggtgtctgacgaacgaagtgaggagttccgccggtcagtgaaggaaagccttagcggatcgttccaggcgaaccggtctgacgggataaaacccggaatcggaatagaaagaaaaaaaataaacctacatttataagttgtaaatatgtatatcactacctgatagaaatgcttagcgggcttgaaatgccttttatctatcgaagattttcggtcaattagggtggaaatatttataaaaaaacagcagttgataatctattgcattattccaatattcgtgtgtatgcccgcccggacgggtgaggaaatcgtggggaatattgtaataccggagtttttcatgtaatttctgatttacggtatagaagaagtcgtaatatccgcaatcgataatgatggctaaaggtcccgacttgctgttgtagggcnattggttgattacggtatattcgttccaacgctggggattctcggaataggggcccagcaattgcttcatttcccaattttcggggaaaggccggatatcgacacctccgcttatcgagccacaggctccgtaagtgtccgggtgacggaaagccagccataaagcaccgtgcccgcccatactgaaaccggtgatagctcttcctttgcggttattataagtgcggtattgggaatcgatatagttgatcagctctttgctcacataagtttcatagcggtaggaaggattgatggggctatcccaataccaactgttcaggccgtcgggacatacgatgatcatatcgaaattagaagccatttgagccagatcgggttttgtataggtggcccacgtatcgtaacatcctccataaccgtggagcagataggctaccgggtattttttctgtgtattttgggtatagctggcaggcaggataatgatatttttaatttgttttttcatggacgtactgtaaaccgagatcgtgtctattttctgggcttgagttgggaggtaggtcccgatcagaaataaggataggaacaataattgtatcagtcttatttttttcataagggtatacttattggtttgttaccggatattaacaatataaaacttgctgcaaatactctgtaaagatatttatttcttgtatattttcctgcatatttttttgtttttctttgattttgtccctgcggatatgtaacaaatacgtcattatttttcaatagtttcgtcataaatttgcattttgtatatggatttcttgtaaaggttcatcttcctcgactgttacgggcaacatttgacgtaaactctggtaggcataaaataccggatacaaagaatgttttggagattaaaatctaaagtgatcctactgattattttggaaactatcgattttatagtaaaatctatttttattgtaggtgtgtgtaaaattgggggggtatgtattgaattntttgtgttttattttgatatatntgtattttttngggggggtatgtggaaaaataattcaaattttatttgattattgttctaaatatatatttttgtcttggttttaatgaaaataagaaatgggtttggaaaaatactttttgtagcgtatatatccccttgtttttttagattgaatattgaaaacagatgtttttattgaaacaatatcggcaaatcgtctcttttttcccggaatgtcagattgtgggaacggctaaagacacttttcaatttccttctgccgggaaaagacttccggcacttatcgtttgatttaaaatttcaggcttatgaagattacactatcacagttgaacgttatggtcggagatattctctcgaataaaagtaagaacatagactatattgacgaggctgcggatagtggtgcagatccggcgttacccggcgaaatggtcctgtctgctgtgggaagggtgtaagatgccgttggccgatgatgtatacagagataaagaaccacctaaacaataaatattatgacaacacttagatttaaaatggttgaagaggcgatcggaagaaaagccgtagaagtaaaagcacctgccgaacgtccggcagagtatttcggaaaatatgtttttgatcgggacaaaatgcggaaatatttgccgaaagcttgtttcgaaacgttgatgaatacgatgaagaacgggagcccgttggatcgggaaacagccgattgtgtggctgccggaatgaaacagtgggctcaggatatgggagctactcactatacgcattggtttcaacccttgacgggaggaactgcggagaaacacgatgcttttatcgaggccgatcacgaaggaggagtgttggaagagttcacaggaaagttgctgatacaacaagaaccggatgcttccagttttccgagcggtggtcttcgcaatacatttgaagcccggggatatagtgcctgggatcctagttctccggcctttattgtcgatacgaccctttgtataccgactatctttattgcttatacgggggaggccctggatttcaaggcccctcttttgagggctctcgaggcagtaaaccgtgcggctgtggatatttgccggtatttcgacccgaaggtggaaaaagtgttctcttatctgggatgggagcaggaatattttttggtagacgaaagcctgtgggcggcccgtcctgatctggtacttaccggccggacgatgatgggacatgaaagtgctaaaaatcaacagctggatgatcattatttcggttctataccgactcgggtgattgcttttatgaaggatctggaatacgaatgtcagcaattgggaatcccggtaaaaacccgccacaatgaggtggctccgaaccagttcgaacttgctccggttttcgaagagaccaatctggctaatgaccacaatcagttgttgatgtctaccatgaaagtggtggcgaggcgtcattgtttccgggtacttttgcacgaaaaacctttcaaggggatcaacggttcgggcaagcacaacaactggtctttgggtaccgatacgggagtgaatctgttatctccgggacgttctgctacagagaatctgcaatttatcacctttctggtgaatatcctgatggcggtctatcgacggaatggcttattgaaagcctctgtgatgagtgcaggcaatgcccatcgtttaggagctaacgaagctcctcctgctattttgtcggtattcctggggactcagttgtcggctattctggataaaatcgaattcagccaatcggatgaagcgattcagttggataaaaagaccgggttcaggatggacgggattacgcatatccctgaactattcagggatacgaccgatcgtaaccggacatcaccgtttgcatttaccggtaaccggttcgaattccgtgccgtcggttcctcggataattgtgccgatgccatgattactttgaatacggcagtggcttatcagttaaaaga

SEQ ID NO: 910 - DNA, 4000 bp, Escherichia coli
  misc_feature (3363)..(3363): n is a, c, g, or t
tgttctgcgcattttcctatacgctctatgtcagccaagaccatcctgattttgaatacattgcgcatcttgttcgctctggcaaagttggcggcgtgatgttttccaaaggtgatgtatatgaggcggctatgctggcaaaccgtttgcaacggctcgccaaagtcccactgctcatcagcgccgacatggaatggggcgtttccatgcgcatagaccgtgccacagaatttccttataacatggctattgcagccacacaaaagcccgactatgctttccaagtggcttacgctattgccgaagaagctcgtgccttaggcatccaccaaaactacgctccctctgttgaccttaatagcaacccgcgaaatcctgtcatcaacacccgtgcctttagcgaaaatgttgcgctcaccaaccaaatggcggcagctttcatcaaaggcacacaatctggcggactgattgccactgccaaacattttcccggtcatggagatactgacatcgatagccataaagacctacctgtgctgcattttgagcgagcgcgtcttcaagcactcgaactcaagcccttccaacacgctattgagcaaggcgtcatcagcgtgatggttgggcatctggctttgcccaagattagtctttctgacaaaatcccggctacactttcgcctgaaatcatcaccaaaattttacgcgaagagctgggtttcaatggcttagtggttactgatgccatgaacatgcaaggggttaagaagaactttgaggttggcgaggcggcagttcgcgctgtgctggctggtaacgacatgattttgatgtcgccaaatatcgaggcggcacaatcagctattctcaaggcggttcaagacaagcgcattgatgtcgggcgcattgatgcttctgtgcgcaaaattcttgcactcaaagagtggcttggtctgcacaaatcccgctttgtgaatatcgatgagattgaaaccaaagtcggcacgcgtgcacatcaatggctggcgcaagaagtagccaatcactccatcaccttgcttaaaaatgagcgccaaattttgcccctgaaacttccaagccccaacctgcgcgtgctgaacatttcgctgcagacttcagaaaactgtaacactggcaaaaacttttttgccgaactctcaaaattctactccaacacgctacacttgcaacttttgccaaaaagcaacgagcttaatttcaagttcgctttgcgtgccgccgaaaaatctgcggcagtcgtggtatcgtgctacgccgacacgcgagcttgggaaggcaaatttggcttggataaagaccagacgaagttcctacaaaccttggtcaaagtttgcaacgagcgccatattccattgattctcgtctcatttggcacgccatacatcgttcttgatgtgccagatgtgcccgtgtacctttgtgcctactgtcccgtcaaggtgtccgagaatgcagcagttaaagtcatcacaggtcagctcgtgccaaaaggcaaacttccagtaaccattcccaatctctttccctttggttcaggacttaccagttttagtgccctgcctgattctacacgctaacttgtgccgcttgcatcgactgtgttaaggaaacgttttctgcttctaatgaaattcttagatttaatctaaataattctcaagtgattctacttacggaggttaaaaaagggtctcgattcaaggttgttcgcattgatgagaaggatattcgcacgcagctcttgcgttttggcttaggggaagggagcgaagcggtctgctttgaacgcctgcctttaggtccgattgtcatcaagcatcagcgtcaggaagtggctattggtcgagaatttgctaataaaatctgggtagagccgcttgagagataactctttcaacatttttgattatgggcaaatctgcatctgaggcattagtagaggcggaaaaacttgagcccagctcttcggctgaaccgctcagctcagcactttcttcagcacgcactaagttggtgttggtgggcaatccgaatgttggcaagtcaggcttttttaatcacttcagcggtctttatgtcgatgtatccaattttcccggcaccacagttgaaattgcacatgggcattacaaaaactatgatgtctatgacacgccgggcatttatggcgtcagctcttttaatgatgaagagcgcgtagcacgcgataccattctctcggcagatgtagtgctcaacgtcgttgatgccaccaatcttgagcgcgaccttttcctaactctgcagctaattgacatgcgctttcgcatgattgttgcgctcaacatgatggatgccctgcacgctgctggattagagatagatacccaagaacttgagcgcattcttggcgtgcccgtcgttgaagtggttgccatcaaaaaacaagggtttgatgagttggaatcacggcttagagaagcacgccccggtcactccgaccctgccctgcaagcggaacttcaaccgcttatctcgaagctcaaaccaactgccaatcctaccgccgatgccctgatgattctcgaaggtgatgaggtcatcagtgagcgacatggtcttgagcctattgataagcgcgaggcgatttatgttgctcgtcgcaatcgtgtcaatgaaattgtagcaaaggtttatcgccaaaagtcagccgctcgcttcagcgcacagtttagcgagaagctaggacgctggacacttcaccctatcacaggcattcccattctcctttttgcactatggctgatttatcaagtcgttggtgtcttggtggcacagcgtgtggtcggacacttagaagtggaatatggcaaccgcctttgggaaccagcagtcaaacatctttttgcacgcgttacgcctgtcagcattgaagttgaagtgctcgaaaaagatgacaatggcgaataccagaccgtcgagcggcgcacatttgattttccaaacggcacgcacgccgacccagccttgcttgaagccatgaagcagttcatggcagagaaaaccgtgatgcaaaattttactttttcgcaagagacgctctggggcaaacttgtggtcatcttggctggcgagtttggcgctattacgatgacggttacctacctacttttcctactcttgccgctcatcgttggtttttaccttttccttgcattgctcgaggattgcggctatttgcctcgccttgctacgatggtcgaccggctgctcaacgcgatggggctgaatggtcgcgcagtcattcccatcattttgggttttggctgcgtaacgatggcnacgattaccacacgcttgcttaacacctcgcgagagaaaaccattgccgcttcaattctcaatttcgcaattccttgttcggctcaacttgcggtgattacggctttgctcaccaaggcaggcggcgaatacaccttaattttctttgtgattattctcgccaatctcatcggtattggcaccgtcatagacaaaattttgcccggcaaatcttcagccctgctgattgatttgccacccatgcgcttaccacgccttagtaatgttgccaaaaaaacttggattaaaacgcttagtttcatgaaagaagcctcgccatggttttttgctggcgcattgctcatttctacaatgcaagtaactgggcttcttgatgtctggattcggctctttgaaccgattaccaccaactggcttgggttgcctgccgatgcagcacgctcgtttgtgatgggcatggtgcgccgcgattttggcgcggcaggtctatatgaacttgccctttcaccaaagcaaattgttgtctcgcttaccgtcatcactctgtttgtgccttgcattgccagcttgatggtactgctcaaagagcgcgggctgtgtgaagccatgaccatttggtttggcagttggattttag

SEQ ID NO: 911 - DNA, 4000 bp, Escherichia coli
  misc_feature (199)..(199): n is a, c, g, or t
  misc_feature (2230)..(2230): n is a, c, g, or t
  misc_feature (2374)..(2374): n is a, c, g, or t
  misc_feature (2867)..(2867): n is a, c, g, or t
  misc_feature (3585)..(3585): n is a, c, g, or t
  misc_feature (3597)..(3597): n is a, c, g, or t
  misc_feature (3629)..(3629): n is a, c, g, or t
  misc_feature (3644)..(3646): n is a, c, g, or t
  misc_feature (3648)..(3651): n is a, c, g, or t
  misc_feature (3655)..(3655): n is a, c, g, or t
  misc_feature (3657)..(3662): n is a, c, g, or t
  misc_feature (3664)..(3664): n is a, c, g, or t
  misc_feature (3666)..(3668): n is a, c, g, or t
  misc_feature (3672)..(3680): n is a, c, g, or t
  misc_feature (3682)..(3682): n is a, c, g, or t
  misc_feature (3685)..(3685): n is a, c, g, or t
  misc_feature (3688)..(3688): n is a, c, g, or t
  misc_feature (3690)..(3696): n is a, c, g, or t
  misc_feature (3699)..(3708): n is a, c, g, or t
  misc_feature (3710)..(3711): n is a, c, g, or t
  misc_feature (3714)..(3714): n is a, c, g, or t
  misc_feature (3716)..(3716): n is a, c, g, or t
  misc_feature (3718)..(3720): n is a, c, g, or t
  misc_feature (3722)..(3722): n is a, c, g, or t
  misc_feature (3724)..(3729): n is a, c, g, or t
  misc_feature (3735)..(3739): n is a, c, g, or t
  misc_feature (3742)..(3745): n is a, c, g, or t
  misc_feature (3748)..(3750): n is a, c, g, or t
  misc_feature (3752)..(3753): n is a, c, g, or t
  misc_feature (3756)..(3757): n is a, c, g, or t
  misc_feature (3759)..(3760): n is a, c, g, or t
  misc_feature (3762)..(3762): n is a, c, g, or t
  misc_feature (3767)..(3767): n is a, c, g, or t
  misc_feature (3771)..(3771): n is a, c, g, or t
  misc_feature (3774)..(3775): n is a, c, g, or t
  misc_feature (3779)..(3779): n is a, c, g, or t
  misc_feature (3782)..(3782): n is a, c, g, or t
  misc_feature (3785)..(3786): n is a, c, g, or t
  misc_feature (3790)..(3790): n is a, c, g, or t
  misc_feature (3793)..(3793): n is a, c, g, or t
  misc_feature (3795)..(3795): n is a, c, g, or t
  misc_feature (3798)..(3799): n is a, c, g, or t
  misc_feature (3802)..(3802): n is a, c, g, or t
  misc_feature (3806)..(3807): n is a, c, g, or t
  misc_feature (3810)..(3811): n is a, c, g, or t
  misc_feature (3813)..(3814): n is a, c, g, or t
  misc_feature (3817)..(3830): n is a, c, g, or t
  misc_feature (3833)..(3833): n is a, c, g, or t
  misc_feature (3835)..(3835): n is a, c, g, or t
  misc_feature (3837)..(3839): n is a, c, g, or t
  misc_feature (3842)..(3844): n is a, c, g, or t
  misc_feature (3847)..(3851): n is a, c, g, or t
  misc_feature (3855)..(3857): n is a, c, g, or t
  misc_feature (3859)..(3871): n is a, c, g, or t
  misc_feature (3874)..(3878): n is a, c, g, or t
  misc_feature (3880)..(3880): n is a, c, g, or t
  misc_feature (3882)..(3882): n is a, c, g, or t
  misc_feature (3884)..(3891): n is a, c, g, or t
  misc_feature (3894)..(3895): n is a, c, g, or t
  misc_feature (3897)..(3899): n is a, c, g, or t
  misc_feature (3902)..(3906): n is a, c, g, or t
  misc_feature (3908)..(3908): n is a, c, g, or t
  misc_feature (3910)..(3918): n is a, c, g, or t
  misc_feature (3920)..(3922): n is a, c, g, or t
  misc_feature (3924)..(3924): n is a, c, g, or t
  misc_feature (3926)..(3929): n is a, c, g, or t
  misc_feature (3931)..(3933): n is a, c, g, or t
  misc_feature (3935)..(3939): n is a, c, g, or t
  misc_feature (3941)..(3944): n is a, c, g, or t
  misc_feature (3946)..(3953): n is a, c, g, or t
  misc_feature (3956)..(3960): n is a, c, g, or t
  misc_feature (3963)..(3963): n is a, c, g, or t
  misc_feature (3965)..(3973): n is a, c, g, or t
  misc_feature (3975)..(3977): n is a, c, g, or t
  misc_feature (3979)..(3987): n is a, c, g, or t
  misc_feature (3989)..(3998): n is a, c, g, or t
tatttatcacgctggatataagaaggcgttctatgttcagcctctagagctttatcaataagctgacttgtatctgacttaccacaaccaattaatattgttaaagagaataaaataagaaaaagtttatataattttttatttgtcatgtttatgtaaatttaaatattgatttgagggttaaagtaaaataatcaantatgattataaaaatatattaattgattactaatcaaaaacaagactttttattaaatgaagacattcagaaattacggatattggctttatctattatttatattattttattctggaaatactttctccaatgaattatttccatccaagggtgcagttgtaacttcgaacgctctagcaactaaagcaggagagaaaattttagctgaaggcggaaacgcttatgatgctgctaccacaatcagtgcaatgctttctgtggtagagccatttgcatcaggtctagggggtggtgcattctggttaatttatgatgctaaaagtaagaaatataaaatgttagatgccagagaaactgccccacttcaatctcataaaaatatgtatctagatgaaaatgagaaccttataaaaaatatttcaaagcttgggccattgtctgcaggaataccaggtattcctgcggtattgagttacgtcaatgagaaatacggttcaaaaaaattaagcacacttttagtccctgcctataaggcagcaataaatggatttcctgtaaatgaaaggtatttaaaaggagcaaattataaaaaggaatggctgaaaaaatataaagaaaccgaagcaatttttttagataaaggtgaggtaccaaaaaaaggatggattctaaaacaaactgatctagcaaaaacgatcaaaaaaataatgaaaggtggccacaaaagtttttacacaggaagttttgctaaaaaaatggttgaatctgttcaaaataatggcggtatttggagcgaagaagatttaaatagatataaagttattgagagagagccagttaaatcgacctacaaaggaatttcaattatcgccccaggacttccatcctcagggggcttggttttatctaatgctcttaatatattagcaggatatgaattagataaacttagtcttaccacccaaaaacatttaattattgaggctctaagacgagcgtattatgaaagagccataaaaatgggagacccagatttcatggctaattctcttgaatttcttttaactcccagttatgcagcaaaacaaagagaaagcattaatattaattatgcaacagataatcaaacgctcgagtttgctgacccaccatatcaagggcaaggaaatgatacaacgcatttttcggtaatcgataaatatggtaatcgtgtagcagtgacccaatctatcaacttttggtttgggtctgcttttgttccaaaagggacaggtgttttgctgaataatgaaatggatgatttttctatcaagcctggaaccgagaatggctatggattaattggctatgatgctaatgcagtggaacctggaaaaagaatgttatccagtatgacgccaacctttcttgaatcagatagaggttttgtaattttaggaactcccggaggttcgaggattataagtatgattcttcttgcaacattggaatgggtaaatggaggagacgctaaatctatggtctctttgccaaggtttcatcatcaatatcatccagattatgtgctctatgaggaagaagcatttatgtcgagcgagatcgatgaattggaaagtatgggacatatatttaaaaaatcaaataggcagtttggtaatatgcagataattatgtgggatcaagtaaataataaaattgaaattgcctctgacccaagaggaaaagaaaaaggccgtgaagaagtctattgattttaaaaacacatatagctttttataaaaggttacatagagacttatagagcaatttagctcaccttcatcaaccacctaaaaagaatagtttttattgggagttacacagcatgtcaaagggatatcatattcgtttgtatcttctataatttcgcaaggcataaaaagactgatgccaattttttttacatccttatgtaaagaggcaaaaaaacgatcgtaaaatcctttcccatagcctaccctatatccttttgtatcaaatgctaaaagnggggtgataaccatatcaatcttatcgttttctatccaaataggatcaattggttcggtaatattatatttggtttgtttagtttttgtatctggactgaatgctgcatttctcatggtcccctcttcaaagttactcacaggnacaacaacattaatgttatttttccaacaatattgaatgattggtgaagtattaatttcaccttttgtatgaatgggtaaaaagcaatgaacaaattttagctcatattttttaataagctcgattgtgttctgaatgagatgagatgaattttcttcaagttctaatgaagaaagttcttggcgctttttcaaatatatctttcttgctgtatcttttttcaaaataatcgtgatatcagagggctacaaattaaactgtgtgacatttattatcattccttataaccctctgtaatcacctatacaaagtacaatatacttatttcagttgatccttacccggcgcgtatgtttctgccgctcctggaaatgcttttgcatggacatcagctgcgaactgattaacggcatctttaataagatcagctccattcatgtatgttctgacaaacttaggtttaaagtctgtagaaaaaccgagcatatctggnagaaccaatgcttgcccatccacatcaagacctgctccaacacccacaactgggatagaaactgctttactgactgctgcacctacatgctgcggaacagcctccaaaacaatggcaatacacccaagttgatcaagttttttggcttcttcgacgatgctaagcgcactttcttttgttttaccttgagctttaaatccaccgattgcattatggtgggatggtgtaaggccaatatgtcctattgttggaataccggattgggaaagatgagcataaagctcttcgtttccatcaacaccttctattttaagagcatttgccccagccttgattaagatttcaacgttatccaatgaatcctttaacccctttctatttgccataaatggcataccagcgattaggaatttatcttttgctccttttttcacggctctggtgtgcattgcaattgtttccacatcgcaactcaaagtgtcttcatggccatgtacaaccatatttaaatcatcaccaattaaaattccatttatatttgtgtcgttaagaatcttggcactccaatactcatgtgaagtaacaacaacaatctttgttccttccgcttttaattgtttaaaactttctaatacgctcatttatctgtttccttaaattgtttatataaaaagtgacaattaaataaattacattaaatcctattttggattaaacntaaaaattaatnatcaggttttaaaacaagaagacttttggtcntgaattgtttttttnnnannnntttngnnnnnnantnnntttnnnnnnnnntnaanaangnnnnnnnttnnnnnnnnnncnnaanantnnntntnnnnnnttcccnnnnnttnnnnaannntnnaanntnntntttanaaanaannattnatnaannatanttntntannccntatnnttnngnnttnnnnnnnnnnnnnntananannnttnnntannnnnattnnnannnnnnnnnnnnnaannnnntngntnnnnnnnnggnnannnttnnnnnanannnnnnnnntnnnantnnnnannnannnnnannnnannnnnnnnaannnnntanannnnnnnnnannnannnnnnnnnannnnnnnnnntg

SEQ ID NO: 912 - DNA, 4000 bp, Escherichia coli
  misc_feature (1)..(1): n is a, c, g, or t
  misc_feature (25)..(25): n is a, c, g, or t
  misc_feature (55)..(55): n is a, c, g, or t
  misc_feature (58)..(58): n is a, c, g, or t
  misc_feature (76)..(76): n is a, c, g, or t
  misc_feature (85)..(85): n is a, c, g, or t
  misc_feature (87)..(87): n is a, c, g, or t
  misc_feature (94)..(94): n is a, c, g, or t
  misc_feature (100)..(100): n is a, c, g, or t
  misc_feature (121)..(121): n is a, c, g, or t
  misc_feature (193)..(193): n is a, c, g, or t
  misc_feature (199)..(199): n is a, c, g, or t
  misc_feature (202)..(202): n is a, c, g, or t
  misc_feature (208)..(208): n is a, c, g, or t
  misc_feature (217)..(217): n is a, c, g, or t
  misc_feature (250)..(250): n is a, c, g, or t
  misc_feature (256)..(256): n is a, c, g, or t
  misc_feature (271)..(271): n is a, c, g, or t
  misc_feature (292)..(292): n is a, c, g, or t
  misc_feature (328)..(328): n is a, c, g, or t
  misc_feature (334)..(334): n is a, c, g, or t
  misc_feature (346)..(346): n is a, c, g, or t
  misc_feature (349)..(349): n is a, c, g, or t
  misc_feature (376)..(376): n is a, c, g, or t
  misc_feature (382)..(382): n is a, c, g, or t
  misc_feature (388)..(388): n is a, c, g, or t
  misc_feature (391)..(391): n is a, c, g, or t
  misc_feature (430)..(431): n is a, c, g, or t
  misc_feature (436)..(436): n is a, c, g, or t
  misc_feature (439)..(439): n is a, c, g, or t
  misc_feature (448)..(448): n is a, c, g, or t
  misc_feature (460)..(460): n is a, c, g, or t
  misc_feature (463)..(463): n is a, c, g, or t
  misc_feature (475)..(475): n is a, c, g, or t
  misc_feature (508)..(509): n is a, c, g, or t
  misc_feature (547)..(547): n is a, c, g, or t
  misc_feature (568)..(568): n is a, c, g, or t
  misc_feature (649)..(649): n is a, c, g, or t
  misc_feature (658)..(658): n is a, c, g, or t
  misc_feature (771)..(771): n is a, c, g, or t
  misc_feature (974)..(974): n is a, c, g, or t
  misc_feature (977)..(977): n is a, c, g, or t
  misc_feature (1013)..(1013): n is a, c, g, or t
  misc_feature (1019)..(1019): n is a, c, g, or t
  misc_feature (1026)..(1026): n is a, c, g, or t
  misc_feature (1034)..(1034): n is a, c, g, or t
  misc_feature (1046)..(1046): n is a, c, g, or t
  misc_feature (1163)..(1163): n is a, c, g, or t
  misc_feature (1169)..(1169): n is a, c, g, or t
  misc_feature (1184)..(1185): n is a, c, g, or t
  misc_feature (1193)..(1193): n is a, c, g, or t
  misc_feature (1244)..(1244): n is a, c, g, or t
  misc_feature (1247)..(1247): n is a, c, g, or t
  misc_feature (1253)..(1253): n is a, c, g, or t
  misc_feature (1286)..(1286): n is a, c, g, or t
  misc_feature (1292)..(1292): n is a, c, g, or t
  misc_feature (1307)..(1307): n is a, c, g, or t
  misc_feature (1311)..(1311): n is a, c, g, or t
  misc_feature (1313)..(1313): n is a, c, g, or t
  misc_feature (1986)..(1986): n is a, c, g, or t
  misc_feature (2262)..(2262): n is a, c, g, or t
  misc_feature (2553)..(2553): n is a, c, g, or t
  misc_feature (2576)..(2578): n is a, c, g, or t
  misc_feature (2594)..(2594): n is a, c, g, or t
  misc_feature (2598)..(2598): n is a, c, g, or t
  misc_feature (2610)..(2610): n is a, c, g, or t
  misc_feature (2724)..(2724): n is a, c, g, or t
  misc_feature (3565)..(3565): n is a, c, g, or t
ntgcttggggatttgggacgacatnaagaatataccggctaaggtaaagctgacnggncagattattgccgcagcnattcccgtngncttcggngtacanatcgaatgggtaaccaatccnttcggaaccattttaatcattcccgaatggttggccgtaccggttacgattttttggattgtcggatttacnaatacngtnaatctnattgacggnttagacggcttggcggcaggggtatcggtaatngcttcnatttccatgtttttnatggctgtcagtatgaatcantatttgccggctatgattttagtggctatgtcgggngctgcnttgggatttttncantataactttaatcccgccaaaatcttnatgggngatacnggnagcatgcttctggggtatactatggcggttgtggctgtnntgggnctngtcaagacngcggcaacggtngcncttattgtaccnatcatcgccttaggggtacctattttagatacnntgtttgctattgtgcgtcgcaaaatgagcggcgttccnatatttcagcccgataaaggncatttgcatcaccgtttactggctttggggatgactcagaaacaagctgttctcagcatgtacatggtcagtgcggttttnggatttgtngcgattttcgttgccaatgtaagctataagaccggtattgttacggttatcgccgtcttggctattattatttattcggcccgtcgaatcggtgtgttacggcgctccgacancacaaacggcatgaaaaaatagaagggtatacgtctaaggaggcgctttcatgattaaagtaatgaccgtattcggcactcgaccggaagccataaaaatggctcctgtcgtattggaactgaaaaaacatcaggacgaaatcgagacggtcgtggccgtaacggctcaacatcggcaaatgcttgatcaagtgttgcatttnttnaaaatcaaacccgattacgatttggatattatgtcncagggncagactntatacganataacctcgcgngcgatgaacggattaaaagaggttttggaaaaagaaaagcccgatctggttctcgttcacggcgatacgacgacgacctttgccggtgctttggcttcttactacagtcagactgcngtcggncatgtagaagcgggnntgagaacnggggatatatattcgccttttcccgaagaaatgaatcgtaagctcacaggngcnattgcntcttttcattttgcaccgacggaaacggctaangccaancttttacgtgaaggngtgnanccggaaaaaatatatgtaacaggaaatacggttattgacgccttaatgaagaccgttcgtcccgactacgagtttgatgacgagaaattgcgccaaatcgactttgaacagcatcgagttatcttattaaccacccatcgtcgggaaaatctaggggagccgatgcgacatatttataaagctttacgttcggtcgtacaagaaacgcccgatgcggaaatcgtttttcccgtacatcgcaacccgcttgttcgacaggtcgttaacgaagaactggcgggggtagacagaatccacctcattgaaccgcttgattatgaaccctttgccaaccttatgagtcgcagctatctggtgctgaccgattcgggcggtattcaggaagaagctccgtctttgggaaaaccggttctcgttttgagaaatacgacggaacgaccggaagcggtaaaagcgggaaccgtatctcttatcggtaccaatgtggatgtcgtttatgaaacgacgagacgcctattgactgataaaaaagcttatgaagccatgagcaatgccgtcaacccctatggtgacggaagggcttcggaacggattgttcaagctgtgcgttatgtatacaatgaatgctccgaacggcctgaagaatttaaataaaatgaataaatattcaaancaaatagtatgattaaaaggcgacaaaatgtcgccttttttagtactctttacacttttaaaccttaagaaaaaaagggctaagcccattcggttttgttgcattttatcaaatggaagagtaaaatatacatcaggtacggggtcaatcgatgcggatataatcattgatttttaccgtattcactgtagttgccgtgaggggtaaatattcgtgggccaagcaacggaagaccgcaaaaaatcacaaaaaagaagcgacggcatgtcgacattncagctcgtagccgtagccggttcattgggccttactttatttgtgaacattattgtcggtattttcattggacgctttgtggattcgtattttaatacaagtccgttcgggctcatggcatttgcactcttaggttccgttaccgggttttggactttgtataaaaaagcggggactttgaatgaacgtggcaagtaacaggggaaatgaaaggacgaccggtggacgtatttactttatatgttaaaaaaacggtaattcgtcttgctgtaggcaccgtactgggggctnttgccgcttgggcggtcggagcnnncgagtatatttccggntggntcatcggtagcntggtcaatctgttgtacttcgtaatgctcagcagtcggttagcgaaatccgcacgtatgccggccgaacaagccttggtctttatccgcggcggcgtagtagtgaggctgttgntgattatgcttgtgcttatcgttgtactgcaatttcctcaaatcaggatttcctcctttgtggcaggtgtcatgatgtacagagtactgattttcggtgaactttttgtcaaggcgttacagcgcattttgtaggaagggaggtgcagcttatggaattacacgcggggcatcatacggttgttcagttgttagggttaaatgtcaatattgacaccttgatgatgacatggattgttgccgccatcgttattgtggttacactgttggcgacgcggggacgtgccttggtaccgagcggtatgcaaaacggcatggaaatgattgttgaagccttacttgaacagtttaaagaaaacctgggacctaaatacggtcaggttacatctgttctcttaaccatgtttttgttcattttctttgctaatgaattcggtctgttaccgaatccgggtgtattatcatcacctacaaatgatttgaacacgaccgtcgcattggctttggtcgcatcgtttttgacacatgcgttgtatattcgcaatcagggtgccggaaagtatttcaaacatttcttccagccttttgtattgttcttccccatcaacttaatggaagaatttacaaaaccgttgaccttgtcattccgtcttttcggtaatattttggccggtgaaattttgatggaagtgctgtatgaactggtacctgtaggcgtgccgctcatttggctcgtgttcagcttggttatcggtttaatccaggcatttatctttactattttgacaacatcttatttagctccgtcgttccacggatcacattaaatttttacatatctnggagggttataacttatggaaaaggcaattgttttggcattctcggcattcggtgcttgcttgggtattggtttggcagctttgggcgcggctcttgccgacggcaatgcggcttcgaaaatgttggaaggtacggcacgtcagcctgaaatgggcggcaagctccttacgaacatgcttatctctatcggcttgattgaatctattcctattatcgctgccgttatcgccattgtattggtattcgccaatccgtttgtaagtttactctaatttgaataaagaagtgttacttaccgaaacggggagggaataccattgatcagtataaacggtactttgcttttccaattcctcaacttctttgttctggtcgctattttggccaagtttgcttataaaccgatgttgaaggttctggaggaacggagaaac

SEQ ID NO: 913 - DNA, 4000 bp, Escherichia coli
  misc_feature (1991)..(1992): n is a, c, g, or t
  misc_feature (3422)..(3424): n is a, c, g, or t
  misc_feature (3426)..(3427): n is a, c, g, or t
  misc_feature (3429)..(3429): n is a, c, g, or t
  misc_feature (3432)..(3434): n is a, c, g, or t
  misc_feature (3438)..(3439): n is a, c, g, or t
  misc_feature (3441)..(3444): n is a, c, g, or t
  misc_feature (3448)..(3450): n is a, c, g, or t
  misc_feature (3453)..(3455): n is a, c, g, or t
  misc_feature (3457)..(3457): n is a, c, g, or t
  misc_feature (3459)..(3468): n is a, c, g, or t
  misc_feature (3470)..(3471): n is a, c, g, or t
  misc_feature (3474)..(3482): n is a, c, g, or t
  misc_feature (3484)..(3484): n is a, c, g, or t
  misc_feature (3486)..(3499): n is a, c, g, or t
  misc_feature (3501)..(3501): n is a, c, g, or t
  misc_feature (3503)..(3506): n is a, c, g, or t
  misc_feature (3508)..(3508): n is a, c, g, or t
  misc_feature (3512)..(3522): n is a, c, g, or t
  misc_feature (3524)..(3525): n is a, c, g, or t
  misc_feature (3528)..(3528): n is a, c, g, or t
  misc_feature (3531)..(3535): n is a, c, g, or t
  misc_feature (3537)..(3537): n is a, c, g, or t
  misc_feature (3539)..(3541): n is a, c, g, or t
  misc_feature (3543)..(3545): n is a, c, g, or t
  misc_feature (3547)..(3548): n is a, c, g, or t
  misc_feature (3551)..(3552): n is a, c, g, or t
  misc_feature (3555)..(3560): n is a, c, g, or t
  misc_feature (3562)..(3563): n is a, c, g, or t
  misc_feature (3568)..(3574): n is a, c, g, or t
  misc_feature (3576)..(3577): n is a, c, g, or t
  misc_feature (3579)..(3580): n is a, c, g, or t
  misc_feature (3582)..(3585): n is a, c, g, or t
  misc_feature (3588)..(3590): n is a, c, g, or t
  misc_feature (3592)..(3594): n is a, c, g, or t
  misc_feature (3597)..(3605): n is a, c, g, or t
  misc_feature (3607)..(3610): n is a, c, g, or t
  misc_feature (3612)..(3613): n is a, c, g, or t
  misc_feature (3617)..(3620): n is a, c, g, or t
  misc_feature (3624)..(3625): n is a, c, g, or t
  misc_feature (3627)..(3627): n is a, c, g, or t
  misc_feature (3629)..(3631): n is a, c, g, or t
  misc_feature (3633)..(3633): n is a, c, g, or t
  misc_feature (3635)..(3637): n is a, c, g, or t
  misc_feature (3641)..(3641): n is a, c, g, or t
  misc_feature (3647)..(3654): n is a, c, g, or t
  misc_feature (3656)..(3659): n is a, c, g, or t
  misc_feature (3664)..(3665): n is a, c, g, or t
  misc_feature (3667)..(3667): n is a, c, g, or t
  misc_feature (3670)..(3672): n is a, c, g, or t
  misc_feature (3674)..(3674): n is a, c, g, or t
  misc_feature (3676)..(3678): n is a, c, g, or t
  misc_feature (3680)..(3681): n is a, c, g, or t
  misc_feature (3683)..(3684): n is a, c, g, or t
  misc_feature (3688)..(3688): n is a, c, g, or t
  misc_feature (3691)..(3691): n is a, c, g, or t
  misc_feature (3695)..(3695): n is a, c, g, or t
  misc_feature (3700)..(3703): n is a, c, g, or t
  misc_feature (3705)..(3705): n is a, c, g, or t
  misc_feature (3707)..(3707): n is a, c, g, or t
  misc_feature (3709)..(3710): n is a, c, g, or t
  misc_feature (3713)..(3713): n is a, c, g, or t
  misc_feature (3718)..(3718): n is a, c, g, or t
  misc_feature (3721)..(3721): n is a, c, g, or t
  misc_feature (3726)..(3728): n is a, c, g, or t
  misc_feature (3730)..(3734): n is a, c, g, or t
  misc_feature (3737)..(3738): n is a, c, g, or t
  misc_feature (3740)..(3740): n is a, c, g, or t
  misc_feature (3744)..(3744): n is a, c, g, or t
  misc_feature (3746)..(3747): n is a, c, g, or t
  misc_feature (3750)..(3750): n is a, c, g, or t
  misc_feature (3753)..(3754): n is a, c, g, or t
  misc_feature (3758)..(3758): n is a, c, g, or t
  misc_feature (3763)..(3763): n is a, c, g, or t
  misc_feature (3767)..(3767): n is a, c, g, or t
  misc_feature (3771)..(3771): n is a, c, g, or t
  misc_feature (3775)..(3777): n is a, c, g, or t
  misc_feature (3780)..(3780): n is a, c, g, or t
  misc_feature (3782)..(3782): n is a, c, g, or t
  misc_feature (3788)..(3790): n is a, c, g, or t
  misc_feature (3792)..(3792): n is a, c, g, or t
  misc_feature (3795)..(3795): n is a, c, g, or t
  misc_feature (3797)..(3798): n is a, c, g, or t
  misc_feature (3805)..(3806): n is a, c, g, or t
  misc_feature (3811)..(3811): n is a, c, g, or t
  misc_feature (3813)..(3813): n is a, c, g, or t
  misc_feature (3817)..(3817): n is a, c, g, or t
  misc_feature (3820)..(3821): n is a, c, g, or t
  misc_feature (3824)..(3824): n is a, c, g, or t
  misc_feature (3826)..(3829): n is a, c, g, or t
  misc_feature (3833)..(3833): n is a, c, g, or t
  misc_feature (3837)..(3837): n is a, c, g, or t
  misc_feature (3839)..(3839): n is a, c, g, or t
  misc_feature (3842)..(3842): n is a, c, g, or t
  misc_feature (3845)..(3848): n is a, c, g, or t
  misc_feature (3850)..(3851): n is a, c, g, or t
  misc_feature (3859)..(3866): n is a, c, g, or t
  misc_feature (3868)..(3868): n is a, c, g, or t
  misc_feature (3870)..(3872): n is a, c, g, or t
  misc_feature (3878)..(3879): n is a, c, g, or t
  misc_feature (3883)..(3883): n is a, c, g, or t
  misc_feature (3885)..(3890): n is a, c, g, or t
  misc_feature (3895)..(3896): n is a, c, g, or t
  misc_feature (3898)..(3900): n is a, c, g, or t
  misc_feature (3902)..(3902): n is a, c, g, or t
  misc_feature (3905)..(3905): n is a, c, g, or t
  misc_feature (3911)..(3911): n is a, c, g, or t
  misc_feature (3915)..(3917): n is a, c, g, or t
  misc_feature (3920)..(3920): n is a, c, g, or t
  misc_feature (3926)..(3926): n is a, c, g, or t
  misc_feature (3928)..(3929): n is a, c, g, or t
  misc_feature (3932)..(3932): n is a, c, g, or t
  misc_feature (3938)..(3938): n is a, c, g, or t
  misc_feature (3940)..(3942): n is a, c, g, or t
  misc_feature (3947)..(3949): n is a, c, g, or t
  misc_feature (3952)..(3953): n is a, c, g, or t
  misc_feature (3958)..(3958): n is a, c, g, or t
  misc_feature (3961)..(3962): n is a, c, g, or t
  misc_feature (3964)..(3964): n is a, c, g, or t
  misc_feature (3966)..(3967): n is a, c, g, or t
  misc_feature (3970)..(3972): n is a, c, g, or t
  misc_feature (3974)..(3974): n is a, c, g, or t
  misc_feature (3977)..(3977): n is a, c, g, or t
  misc_feature (3981)..(3981): n is a, c, g, or t
  misc_feature (3983)..(3983): n is a, c, g, or t
  misc_feature (3987)..(3987): n is a, c, g, or t
  misc_feature (3997)..(4000): n is a, c, g, or t
tcgcacgcgcctcgccgcgcgcgaaccatctcgatcccatcgtcattatcatcgataccgccaccgcttcctgagatgatcgcgtgcgacgcgactgcgactaggcggcaactcgtgcgcgcgtccgcgtcggagaaggcgccgcgccgctcgacgagcgcgccgcgcgacgtcatgatacccgcgccgaccacatctgcgtgcgacacgacgcgtttcagcgcttcgtccaccgacactcgttgcgccaccgccatcgcgtcgccctctgccgttccatcctcgcgttgactcggccaaaaaaaacttcaactctccgaaaactaacacatctgtcgatgataatacaaacgcgcgacttgcgctccgccggcgccgcgcgctcacggcggcggtaatcgatgcaatcccggtgaatgtccggtactcacgctacttgtgctcacgatcgaccgcttcaaccgatcgctcgtctcttctaattctttcctcagcgcttgcacttcgctcgacaacgtctccttgagactcgccaactcgcccttgtaattcttcacctgattatccatcttataccgccaatcctgaagttctgtcttcagcgcgtgcacgcgattgagcaactcttcgcgcgtttgttgatgatcctgcgcggacgcgagtcggcgatgtttcggcgtcagtgcgcgatttgatttcgattttgatttcgacgtcttcgtcgcgatcgtcgtcgtcgtgtcgcgtcgcgtcgcgtcgcgtcgcgtcgcgttcgcgccgtacctttaactgtctcacttcggtctccatcccggtgttcccgtacgcgttcgcgcgcgcgggagagtccatggcgcgcgacgccgagtgacgatggcggggcgtggcggtggtgactggacgtcctcgcaaacatttctgagacggagaaaattgtgcccgcaactgtggaatttgtggatattgcgggaaaaaaggactacggcgactacggactacgaactacgaaggactgcggcgagcgctaagcctagaaatgtcgcgatggaattcgcgagcgtggcgattaaaactgccggcgcgcgtaacgaacgccaaccgacggcgtcggcgagcgaagccacggtggcgggaccgccgatgctggcgttgctcgcgaggacgtactcgcgacggcgatcggcgtcgacgcgaatgccgacgaatacaaaggcgagatggacggcgtacaggatgaatgagaagacgaagacgttggcgtatcgcgcaaacgtggaagcgctcaaaacgccgcccgcggcgccggcggcgacgaagaacacgaagagcatcgcgttcgcgagcggttccgcggcgacggcgagcgacgccgcgcgtttcggcgccaaagtcgcgaaaacgacggtgaaaaccgtcgccatcgggagcacggcgtcgggttggcccacgaggcgagcgacgagctcgcccgcggcgaggaagccgacggcgacgaagaacgccgacaacgcgtcgtccgcgcccgagcgcgccgccgcgccgtccgcgtcctcggcctcgcgctccgtcgtcgcctcgcgctcgcgctcggcgtcgtcctcgtcgtccgccgcgtcgccgcttcctcgctcgccctcgcgtcgcgccaaccacgaaatgaacggaaagtacgccagcgccatcgcgttatcgacgcacagtcccgcgacgaattcttcgccatccatccccagcgtcgtcgccacggcgacgtaattcaatccaccgccgacgtttttcgccgccagcgccgcggcgagtttccaactaaacgcccccccgaacgccgcgctcgcgccgcgcgccccgaacaccgcgccgaaagcgctcccgatcgccgcgacgacgaacgctcgcgccatcgcgcgcgtccttcttctcgtccctcccgcgcgcgcgttcgctcgcaggagcgtcatcggcgtcgcggcgaacgcgcacatcttttgcanntccgcgacgccgcgcgcgccgccgctcggcagcgcgccgatcgcggcgaacgcggcgccgaacgccatcgcgcacacgggcgcggtcgccgcgcgtccgacgcgcgttcgcgacgcgacgacgcgtccgagcgacgccgccgcgagcacggcgaacggcacggcgaacgccgacgccgcgggcgcgagcgcgcgcgcgcgatgccgcggcgcgcgtcgccgacgtcgcggcgtcaccgcgcgacgcgtcgtcgcgcgatcgacgcgcgcggcgagacgcgcgcgcggcgccgtcgccatgacgccgcgacgccgcgatgtgacgcgccgcgacgtcggcgccactcgacgacgcgcgccgggcgacgcgcgacgaacggcgcgcgcgtcgcgctcgacgacgatgcttcgcgcgacgacgcgacgcgcgctcgcggcgtcgcgcgtcgcgcgcgcgtcgatcgcgcgcgagacgacgacgacgacgacgacggcgcgcgtcgacgacgcgacgcaccgcgcgacgcaccgcgcggcgtcgtcgaacgcgacgacggcgacgcggtattcgcgcgatggttcgcgcgaccgcggcgcgcgatcgacgcgcgcggcgacgacgccgacgcgcgcgcgagggttcgccgagggcggcgcggcgccgccgcgggacgacgagacgcgaggatttgatttctacgacgccgcggacgtgggcgtcgtccggggaccgggaactgtgatcgaacacgacaccgggggcgtgctggcgctgaacgcgctgcgagacgtggacggggcgaggaaaaatcgtaaacgcgtggggcgaggcgtcgggagcgggaaggggaagacgagcgggcgagggcacaagggacagaaggcgcgaagcggaggggggccgaggctcgggtttgagggcggacaaacgccgctgcgattgacgctgccgaaacgcggcgcgcataatccgcacgcgatgacgtttgatgtggtgaatttgaacgcgctgcgagcgcacgtcgaggcgggacgattcggggagtacgactacgaaaatccgcgcgtgttgacgatgaaggatttcgtcgacgcggggttgtcgaacaggaaaattaagcatggggtgaaaattttagcgggcgcgctcggagacgacgccgagggcgcggatgatgcgttcataaaggtgcgattggaggtgtcgcgcgcgagcgccaaggcgaaggaaatcatcgaacgcgcgggcgggagcgtgacgcgagtgcattacaatcgcctcgggttgcgcgcgttgttgcagccggagaaatttccgcgcggcttgcccaagcccgcgcgagcgccgccgaagattcgtccattcatcgatcgcgaaggaactttgcccgcgccggcgcccttggaggccgactcgtgaagaagcgcgannnanntnaannncganntnnnnacgnnntcnnnanannnnnnnnnncnnggnnnnnnnnngntnnnnnnnnnnnnnncngnnnncncttnnnnnnnnnnnanntcnttnnnnncncnnncnnncnngannttnnnnnncnntcgannnnnnntnntnncnnnnttnnncnnncgnnnnnnnnngnnnncnnattnnnncacnncncnnncncnnncgangacgannnnnnnncnnnngttgnncnaannncncnnnanncnncccnagngcangcccnnnncnancnnggncgggnccncggannngnnnnnggnntnggcntnngcnttnntgtncttgncctngccngcgnnncgncncaacannntnaancnnttcgccnncgccngnccgncgnngcngnnnngggngganangangannnncnntccccccnnnnnnnngntnnnggcgcnnccgngnnnnnntttcnncnnnanccngagctngggnnngancatgancnngtncggcgncnnnttgcnnntgnntttgnganncngnnacnnnanctnggtngngccnttggctttgnnnn

SEQ ID NO: 914 - DNA, 4000 bp, Escherichia coli
  misc_feature (2)..(2): n is a, c, g, or t
  misc_feature (7)..(8): n is a, c, g, or t
  misc_feature (12)..(12): n is a, c, g, or t
  misc_feature (14)..(14): n is a, c, g, or t
  misc_feature (16)..(17): n is a, c, g, or t
  misc_feature (19)..(19): n is a, c, g, or t
  misc_feature (21)..(21): n is a, c, g, or t
  misc_feature (23)..(23): n is a, c, g, or t
  misc_feature (27)..(28): n is a, c, g, or t
  misc_feature (30)..(30): n is a, c, g, or t
  misc_feature (35)..(35): n is a, c, g, or t
  misc_feature (37)..(37): n is a, c, g, or t
  misc_feature (39)..(39): n is a, c, g, or t
  misc_feature (41)..(42): n is a, c, g, or t
  misc_feature (47)..(48): n is a, c, g, or t
  misc_feature (51)..(52): n is a, c, g, or t
  misc_feature (54)..(55): n is a, c, g, or t
  misc_feature (57)..(58): n is a, c, g, or t
  misc_feature (60)..(60): n is a, c, g, or t
  misc_feature (63)..(65): n is a, c, g, or t
  misc_feature (216)..(216): n is a, c, g, or t
  misc_feature (377)..(377): n is a, c, g, or t
  misc_feature (402)..(402): n is a, c, g, or t
  misc_feature (486)..(486): n is a, c, g, or t
  misc_feature (1126)..(1126): n is a, c, g, or t
  misc_feature (1293)..(1293): n is a, c, g, or t
  misc_feature (1980)..(1980): n is a, c, g, or t
  misc_feature (1986)..(1986): n is a, c, g, or t
  misc_feature (1991)..(1992): n is a, c, g, or t
  misc_feature (1998)..(1998): n is a, c, g, or t
  misc_feature (2029)..(2029): n is a, c, g, or t
  misc_feature (2764)..(2764): n is a, c, g, or t
  misc_feature (3461)..(3461): n is a, c, g, or t
  misc_feature (3464)..(3464): n is a, c, g, or t
antcccnncacnangnnancnanaagnngnggcancnanannacgtnnttnnanncnncncgnnnagcagctacctgtagaaacctacctacggtccggtgtgttgccccaaaataaaacgaagccgcgtggacacttcatcgccgaccgtgctcgtcgttatcgatcaatcggtcgattcgcacccgtgcgtcgacgagttgtgagcgtagcccnacaaggtcgtcgctccccaaccgcatggacgtgttgcactcgctgcatgccagcgtgcgaagccgccatgcgagttctacggagtgcgtcgtgatcgcgccacatcgacggcacttggcaatcagttcggcgactccaccctgtgcgtggaccagaagagngaacccgccggtattcttctgttcngttgtatcgttcgcgagcatcaggcgagtatgggctgatgctcagcgacgatgcaagcgataggggtgaggcccgatcatcgcnaagggcttataagtccatatgaagccgtccgaaagaaatgtcggaatcttcacggctcgcagttggctttcttgcgaaaggccccatcgttggataggcagcacgctccgcgctcaatccgcccggccctggcgatatccttcatccattgggctaaagccagggggcacttctccagtaatctcaccaggaacatctggggcgaacaagagcgcctgcaactcttctttggcttctcttttacgagggcttctcgctgtgatccccgaccgcgggcatgaagtttccagactgtccgcaaccgacgtgtgcggaagcgcacgcctgaccggcgaacagctcgatagcctgcgcgcgtgcgcgaagggcatctcgcttcgattcgagaagtcagaaatagtcaatgcgttggttgccgcaggttacgccgagaggaacatcgtcggcgtcatcaagcttacggcaagcggagatcagcatttgcgcttgcagagggttgacgcaagctcagcgtaagtgcaagacggcaccgactcgaggcgttgtccccgacctgcggcccgctgcgtactcaaacgataggcagcgcgaaagcagaccctaagtagcgccctcgaccgttgctgcgctagctcgatcntgtttcagtatctcgcgcgcagcgcacgcgtaggtactaccgagtggaatgccgaatcgcgcacacgtgatgctaggtagcggattgctgcagccggtcaagttcgtcgccagttcgatcgcaagcccttgttgattcgcgtcaatcgacaacaggaattggtctcnaacgttcgccggcgcatatggggtcgtcattgcattgttccttctcgcccgtcttgatggactgacgaccatccgtaaacgcatgcctgttgactgacggagacgagcccgtccacaacggtcaatccgttcgaggacctgagcgcaatgaggaacgagcgcgcctcattgcccgatcggccgcgcgaattcgaactctcgtagtgtggcgtattcatttgctctttcgggttttacgcccgagaagccgagcgtcaccttgctcatggttgagcaaggaggatgagtatggcctcaatttgcccccagcgccgcgagcgaatgaaatagatatgccggtcctttgccatgccttggtgggaccttttgttcagtaaagcgtcctttcacgtccggtaaagcgcgactcgatcgcgttgtgccctgcggtttgcccgatatcagcgccgagctgctcgccatcaaagtcgcaagcgtcagtcctggcaccgccgtggacaccgacgagcatgaaagtcgctgcgccacgcaacgcccgaatcatctgcgtaccggttcggcccgctaagtccgatcgcgaaatgcgccaacaggcagtccctggacaaccggggcggagccgggtgtgcatccagcctccgcctcggtgattcaagaatgccggctcttgcttttcttgtataggtnttgtanaattnntattcnccttacagaacaagctttgtacatagtgctnccgatccgcacagtatgctccatgacaggtttgaatccggtcaccttgcgcgcctgggagcggcgctacggcctgatcaagcctgaacgcaccagcagtggacaccgcatgtacagcgacggcgacgtcgaacgcattcggaaggttcttgcgttgacgcgggagggcgtcgcgatcgggcaggtgaaagcagcgctcgaggccgaacctgtagtcgctacaccaccaccggacaagggtccgtggctcggttatcgccgccgtttagccgcagccatcgccgggttcgacgaaggtgcgcttgaagctatctatgacgaagcgctggctttgcactcagtgaacgtcgtcgatcgcatgttgctagtgccgatgctcgcagagctcggtacgcggtggaccaaggtgaccggtggcgtggcggaggagcacttcttttctgcgtacctgcgcaacaagatcggtgcgcggtttcatcatcgacgcatgcatgaagtgggtccaaaaatcctcatggcttgcggccccggcgagctgcacgagacgggccttctcctgttcgcactcgctgcgcacgacgctgggtttcgtgtcgtgcttctcggggccaacgtgccgttccgcgagaccgcggccgccgcacatcgcacgcaatgcgacgcagtcgtcatttcgaacacgctggacctcggaactcccgagttctacgccgaactgtcagctctcgtttcagcnaccaagcgccccgtctttgtcggcggccatatcgcctcggttcgcgagaaggaaattcaagcgtctggagcagtggcccttgcgacatccatcgaattggcactgcgccgcgtggcctccggcattcagcgtgcgcgagggcgccaatgagcgttattagtcaattttgaggtgcccgacgatcgacgatcgcacggagatacgaactgctactcggcgctgccgttgcacccgcgtcaacgccaacaaattcaacttcaatgaaggagccgtcatgagaaacaaattgcttgccattgccgcctcgacgctgatagcagcatccgcgtcggccaaagatatcgtcgacaccgcagtttcggccggccagttcaatacgctcgctaccgcgctgcaagctgctggactcgtcgacacgcttaagggacccggtcccttcaccgtgttcgcgccgaccgatgcggcattcgccaaaattccaaaagctgatctggatgcgctgctgaaggacaaggcgaagctcacggcagtgctgacctatcacgtcgttcctgggaaagtaatggccaaggacgtcaaacctggcgcattgaagagcgtagaaggtagcccgatcacggtggcagcgaccggaggcaaggtaatggtcgacggcgcaacggttacaaagaccgacatcagcgccgacaacggcgtnatncacgtaatcgattctgtaatcgttccaaagaattagttctggaggtgctcgccgggtggtcgcccggcgacgtctatttcgctaaagaggaaccatgaaagctctcacttggatagccgttatcgttctcgtcatcggcggcatcaactggctgctggtcggcgcattcaatttcgatcttgtcgcaacgctgtttggcgagatgtccgcgatgtcgaggatcgtctacatgctggtcgggcttgcggccatttatgtcgcgatctactcgccgcgactcgtccgtagcgctacttgattagcgtcggcgggcgtcagcgactgttgacgctcgccaccagtcctgtacccgggattgaatgcaacacatcatctcccttctggtctgtattgcgatcaccgccgccgcggctgtggttggcggcattgcctcatttgaggcgggccctttctacctgcaactcgaaaggccggcgtgggcccctccaccctggttgttcgggccggtatggaccatcttgtatctcttcatggct

SEQ ID NO: 915 - DNA, 4000 bp, Escherichia coli
  misc_feature (219)..(219): n is a, c, g, or t
  misc_feature (1948)..(1948): n is a, c, g, or t
  misc_feature (1991)..(1991): n is a, c, g, or t
  misc_feature (2007)..(2007): n is a, c, g, or t
  misc_feature (2012)..(2012): n is a, c, g, or t
  misc_feature (2025)..(2025): n is a, c, g, or t
  misc_feature (2029)..(2029): n is a, c, g, or t
  misc_feature (2047)..(2047): n is a, c, g, or t
  misc_feature (2334)..(2334): n is a, c, g, or t
  misc_feature (2371)..(2371): n is a, c, g, or t
  misc_feature (2434)..(2434): n is a, c, g, or t
  misc_feature (2455)..(2455): n is a, c, g, or t
  misc_feature (2633)..(2634): n is a, c, g, or t
  misc_feature (3153)..(3153): n is a, c, g, or t
  misc_feature (3183)..(3184): n is a, c, g, or t
  misc_feature (3209)..(3209): n is a, c, g, or t
  misc_feature (3297)..(3297): n is a, c, g, or t
  misc_feature (3849)..(3849): n is a, c, g, or t
ttaatcttctcacgaattaacttgcctgagatcaaacatgcagagactgaagaagacaaaatcaaaggaactcgcatcatgaagctattccgtcatcacccgatgtttgtctttggactctttgctttgttagcttatgaggtggcagagatatcaatcaacagctactttattaactttgttacgggtcaaggatggttagatgacaacacagcaagnatcgttttgaccattgctttgggcttctttatggtgggaaggtttgtgggtagctggctcatgcgacgcattcgagcagaaataatgctgtttgtttgtgcagtagcgagcgtcataagtatggttgttgtgctattaaacattgggcgattctctatggttgccatcattatcaactatctttttgaagccattatgtttccaaccatcttctcattggcccttaatggtctgggaaatctaaagaaaagtgcagcttctttgctaatgatgacaccgattggaggctgtggtttcttgctcatgggcatcattgcagacaatgcaaaccttgtgattcctttcttaattcccttctttggcttcttcgttgtattgctttatgcttctgaattgatgcgaaagagattgtaatccaacagaagataggaggtaacattgctatatccatgttgcaactgacgccatgtcgcttgatttaacgcaaaattaaactttttaacctgcttcgaattgaaaaaagagaaccaacattttgcgtcatcaaaagattatgttaaatttgcaatcagaaaaagatgaagagataacattcatttagtgatctatttataaacataatattacagattatggcagttagttttaaagaattaggtctcgttaatacacgcgagatgtttaagagagcagtgaatggcggctatgcaattcctgcatttaacttcaacaatttagagcagcttcaggctattattacggcgtcatctgaattgaaatcaccggtaatcttacaggtttcaaagggtgcccgcaattatgctaacccgacattactacgttatatggcagaaggagcagtagcttttgcaaaggaacttggctgtgctcatcctgagattgcacttcacttggaccacggagacagcttcgagctcgtgaaagattgcgtagatatgggcttctcttcagtcatgatagatgcttcttcaaaaccttttgaagagaatattgagttgactaagaagtgcgttgattacgctcatcagttcgatgtgactgtagaagcagagttaggtgtacttgctggtgttgaggatgaagttgcttcagaggaatctcactacactcgaccagaagaagtgattgagttctcacagcgttcaggctgcgatagtctcgccatttcaatcggtacatctcatggtgcatataagtttaagccagaacagtgtactcgtgacccgaagactggccgcttagtacctcctcctttggctttcgatgttctcgcagagatagagaagaagcttccaggattccctattgtacttcatggttcgtcttcagttccacagaaatatgttgatattatcaaccagtatggaggcaaattacctgatgcagtgggtatacctgaggaacaattacgtagggctgctaagagtgctgtatgtaagattaacatcgattctgactctcgtttggcttacactgcaggcgtaagagagactcttgcgaaccatcctgactactttgatccacgtcaatatggtaaggttgcacgcgattatatgatcgaaatgtataaagagaagatcacagacgtgcttggttctgagaacaaacttgctcaattgtaagcaaactacgactgaaaggtcgaataaaataataaaggtgagcacttcatagtgcccaccttttttcgtatatcattatcttttgnggtgtatatcaatacttttgagggtatatatcgatatcttttngggtgtatatcaatanttttnagggtatatatcnatanatttgagggtatatatcnatatatttggctgcgcaaacagaaagggctctctaattcattagcctacaattgagagccgatttgcatcattttgctgaacaaccatattatagttgtttacccaaatgccacacaagaccgaaattaagaataccttgcaggccgtaaccaagttcagaagtgaatctcaaatgattcgaaccaatctctattcccacaggagaaagctgataagccaccctcattttgttttctttaatgttagggaaactgctgctatttgacgacagatgataagcacttanccccaaacctcctcttgaataaagtgcaaagtgcccnttgtctaaccaagaatagcgcactgaaggcatgaaagtaaaggccttactcgataatttcaantcatcatttgggacgattgantagatgagtccaaggtaaacgaggctaaaagcgtcattattcacttgcttttctaatggcacatgtgctccttgtgccactgcttctgtataactaagtcctgcacctactgcccatttctcattcaaatgatagaaatattccatatttaatgaacagttaatgttgctgagtgtcnngaacaaagaagcgtcgtcttcaagctcaaacaatttaatatagtcatttctcacgctctttaagtgcggttcatcaccgaatccgatactccatctcaattcatgtttgaaatgttgtgcctgtattgtcaatgcaaaacaagtcagaagtaaagttagaagtccttttttcatgttatcgtttctatttaattagtttgctacaaagataaagaaaaaatccataatcaaacattttttcacatcttttttttcattttattgaatcaagtcaatctcatgagaaatcatcgagatagtaaacgaaagatgagttaaacgttttgaaagtaatttacaacagagaccacaaaaccttacaatatgaaagctcttagcacaactatccaacagcgtgctattttcttgcattttacaaactccttacaatcaatcaattacgaaaaaggccttaaaatttatgatgatatcacataaaaacaacgtgtaatctctatggaatcatacgctcatctctgncatttcatcgcatgaaatgaagcatttgtnngcgccatttgtgccgaattagagantcgaatggcgcaaaacaccctatcttcttatagccttcgttgattaaaccctatttttctatgatttactctctatttcatcactccncgaagtgttaaaaaactatcattaatctttacgatataagcctctacttcttgactaaaacgaagacaagaacaagagtttcagctaaaactttatatcatttcgctttgtttattccagcatattatcatcccgaaggccaaatattttgtcgttttccaacatttgttgaacccaaagagaaaggcactttgctcatgaaaacaaagtgccttagtcttgatatgttataaacagcgtttactttatagggaaaagaccatagagttcggcatcaatctggtcggtaatcctttgaaaatcctgaggattattctcgaaatcagtgtgatctccatcaacaatgatgagatgacctttatagtctttaatccagttttcatagcgatcgttcagtccagagaggtaatcgatgcggatactcttttcaaattcgcgcccacgtttaccgatatggttaaccaaagtcggtatacttgaacggatatatatcatgagatcgggtaactttacgagtgaaatcatgagctcaaacaagtcagaatagttagnaaagtcacgatcactcatcatgcccatactatgtaaattcggcgcaaagatacacgcatcttcaaatatagtgcggtcttgtatgatggtatctgcactctttgatatctcaactacctccttaaaacgtttatttaagaaatagatttgg

SEQ ID NO: 916 - DNA, 4000 bp, Escherichia coli
  misc_feature (189)..(189): n is a, c, g, or t
  misc_feature (499)..(499): n is a, c, g, or t
  misc_feature (1314)..(1314): n is a, c, g, or t
  misc_feature (1430)..(1430): n is a, c, g, or t
  misc_feature (1986)..(1986): n is a, c, g, or t
  misc_feature (2273)..(2273): n is a, c, g, or t
  misc_feature (2279)..(2279): n is a, c, g, or t
  misc_feature (2321)..(2321): n is a, c, g, or t
  misc_feature (2342)..(2342): n is a, c, g, or t
  misc_feature (2351)..(2351): n is a, c, g, or t
  misc_feature (2357)..(2357): n is a, c, g, or t
  misc_feature (2360)..(2360): n is a, c, g, or t
  misc_feature (2369)..(2370): n is a, c, g, or t
  misc_feature (2373)..(2373): n is a, c, g, or t
  misc_feature (2378)..(2378): n is a, c, g, or t
  misc_feature (2381)..(2381): n is a, c, g, or t
  misc_feature (2384)..(2385): n is a, c, g, or t
  misc_feature (2393)..(2393): n is a, c, g, or t
  misc_feature (2399)..(2399): n is a, c, g, or t
  misc_feature (2402)..(2402): n is a, c, g, or t
  misc_feature (2409)..(2409): n is a, c, g, or t
  misc_feature (2429)..(2429): n is a, c, g, or t
  misc_feature (2432)..(2432): n is a, c, g, or t
  misc_feature (2438)..(2441): n is a, c, g, or t
  misc_feature (2444)..(2444): n is a, c, g, or t
  misc_feature (2446)..(2446): n is a, c, g, or t
  misc_feature (2449)..(2449): n is a, c, g, or t
  misc_feature (2459)..(2459): n is a, c, g, or t
  misc_feature (2474)..(2474): n is a, c, g, or t
  misc_feature (2790)..(2790): n is a, c, g, or t
  misc_feature (2831)..(2831): n is a, c, g, or t
  misc_feature (2837)..(2837): n is a, c, g, or t
  misc_feature (2842)..(2847): n is a, c, g, or t
  misc_feature (2849)..(2849): n is a, c, g, or t
  misc_feature (2854)..(2858): n is a, c, g, or t
  misc_feature (2860)..(2861): n is a, c, g, or t
  misc_feature (2863)..(2869): n is a, c, g, or t
  misc_feature (2871)..(2873): n is a, c, g, or t
  misc_feature (2875)..(2878): n is a, c, g, or t
  misc_feature (2880)..(2884): n is a, c, g, or t
  misc_feature (2886)..(2888): n is a, c, g, or t
  misc_feature (2890)..(2893): n is a, c, g, or t
  misc_feature (2895)..(2905): n is a, c, g, or t
  misc_feature (2907)..(2908): n is a, c, g, or t
  misc_feature (2910)..(2913): n is a, c, g, or t
  misc_feature (2915)..(2917): n is a, c, g, or t
  misc_feature (2920)..(2923): n is a, c, g, or t
  misc_feature (2926)..(2927): n is a, c, g, or t
  misc_feature (2929)..(2929): n is a, c, g, or t
  misc_feature (2931)..(2935): n is a, c, g, or t
  misc_feature (2937)..(2942): n is a, c, g, or t
  misc_feature (2944)..(2944): n is a, c, g, or t
  misc_feature (2948)..(2950): n is a, c, g, or t
  misc_feature (2953)..(2954): n is a, c, g, or t
  misc_feature (2956)..(2956): n is a, c, g, or t
  misc_feature (2958)..(2959): n is a, c, g, or t
  misc_feature (2961)..(2961): n is a, c, g, or t
  misc_feature (2963)..(2963): n is a, c, g, or t
  misc_feature (2967)..(2967): n is a, c, g, or t
  misc_feature (2969)..(2971): n is a, c, g, or t
  misc_feature (2974)..(2975): n is a, c, g, or t
  misc_feature (2979)..(2979): n is a, c, g, or t
  misc_feature (2983)..(2983): n is a, c, g, or t
  misc_feature (2985)..(2988): n is a, c, g, or t
  misc_feature (2990)..(2994): n is a, c, g, or t
  misc_feature (2996)..(2998): n is a, c, g, or t
  misc_feature (3000)..(3000): n is a, c, g, or t
  misc_feature (3002)..(3006): n is a, c, g, or t
  misc_feature (3008)..(3010): n is a, c, g, or t
  misc_feature (3013)..(3016): n is a, c, g, or t
  misc_feature (3018)..(3019): n is a, c, g, or t
  misc_feature (3021)..(3021): n is a, c, g, or t
  misc_feature (3023)..(3025): n is a, c, g, or t
  misc_feature (3027)..(3030): n is a, c, g, or t
  misc_feature (3032)..(3038): n is a, c, g, or t
  misc_feature (3043)..(3046): n is a, c, g, or t
  misc_feature (3048)..(3048): n is a, c, g, or t
  misc_feature (3050)..(3054): n is a, c, g, or t
  misc_feature (3056)..(3056): n is a, c, g, or t
  misc_feature (3058)..(3058): n is a, c, g, or t
  misc_feature (3060)..(3064): n is a, c, g, or t
  misc_feature (3066)..(3068): n is a, c, g, or t
  misc_feature (3071)..(3075): n is a, c, g, or t
  misc_feature (3077)..(3077): n is a, c, g, or t
  misc_feature (3079)..(3083): n is a, c, g, or t
  misc_feature (3085)..(3087): n is a, c, g, or t
  misc_feature (3089)..(3089): n is a, c, g, or t
  misc_feature (3091)..(3097): n is a, c, g, or t
  misc_feature (3102)..(3102): n is a, c, g, or t
  misc_feature (3105)..(3110): n is a, c, g, or t
  misc_feature (3112)..(3130): n is a, c, g, or t
  misc_feature (3133)..(3136): n is a, c, g, or t
  misc_feature (3138)..(3141): n is a, c, g, or t
  misc_feature (3143)..(3145): n is a, c, g, or t
  misc_feature (3147)..(3147): n is a, c, g, or t
  misc_feature (3150)..(3151): n is a, c, g, or t
  misc_feature (3153)..(3153): n is a, c, g, or t
  misc_feature (3155)..(3156): n is a, c, g, or t
  misc_feature (3158)..(3160): n is a, c, g, or t
  misc_feature (3162)..(3166): n is a, c, g, or t
  misc_feature (3169)..(3170): n is a, c, g, or t
  misc_feature (3172)..(3174): n is a, c, g, or t
  misc_feature (3176)..(3181): n is a, c, g, or t
  misc_feature (3183)..(3185): n is a, c, g, or t
  misc_feature (3187)..(3200): n is a, c, g, or t
  misc_feature (3202)..(3203): n is a, c, g, or t
  misc_feature (3207)..(3208): n is a, c, g, or t
  misc_feature (3210)..(3229): n is a, c, g, or t
  misc_feature (3232)..(3234): n is a, c, g, or t
  misc_feature (3237)..(3239): n is a, c, g, or t
  misc_feature (3241)..(3245): n is a, c, g, or t
  misc_feature (3247)..(3254): n is a, c, g, or t
  misc_feature (3256)..(3256): n is a, c, g, or t
  misc_feature (3258)..(3260): n is a, c, g, or t
  misc_feature (3263)..(3265): n is a, c, g, or t
  misc_feature (3268)..(3268): n is a, c, g, or t
  misc_feature (3270)..(3275): n is a, c, g, or t
  misc_feature (3278)..(3282): n is a, c, g, or t
  misc_feature (3284)..(3287): n is a, c, g, or t
  misc_feature (3289)..(3290): n is a, c, g, or t
  misc_feature (3293)..(3298): n is a, c, g, or t
  misc_feature (3301)..(3303): n is a, c, g, or t
  misc_feature (3306)..(3307): n is a, c, g, or t
  misc_feature (3309)..(3313): n is a, c, g, or t
  misc_feature (3315)..(3328): n is a, c, g, or t
  misc_feature (3330)..(3337): n is a, c, g, or t
  misc_feature (3341)..(3343): n is a, c, g, or t
  misc_feature (3346)..(3348): n is a, c, g, or t
  misc_feature (3350)..(3358): n is a, c, g, or t
  misc_feature (3360)..(3362): n is a, c, g, or t
  misc_feature (3364)..(3376): n is a, c, g, or t
  misc_feature (3378)..(3378): n is a, c, g, or t
  misc_feature (3380)..(3386): n is a, c, g, or t
  misc_feature (3388)..(3389): n is a, c, g, or t
  misc_feature (3391)..(3395): n is a, c, g, or t
  misc_feature (3398)..(3398): n is a, c, g, or t
  misc_feature (3401)..(3404): n is a, c, g, or t
  misc_feature (3406)..(3406): n is a, c, g, or t
  misc_feature (3408)..(3408): n is a, c, g, or t
  misc_feature (3410)..(3411): n is a, c, g, or t
  misc_feature (3413)..(3416): n is a, c, g, or t
  misc_feature (3418)..(3418): n is a, c, g, or t
  misc_feature (3420)..(3427): n is a, c, g, or t
  misc_feature (3429)..(3431): n is a, c, g, or t
  misc_feature (3433)..(3434): n is a, c, g, or t
  misc_feature (3436)..(3437): n is a, c, g, or t
  misc_feature (3439)..(3442): n is a, c, g, or t
  misc_feature (3444)..(3454): n is a, c, g, or t
  misc_feature (3457)..(3458): n is a, c, g, or t
  misc_feature (3460)..(3460): n is a, c, g, or t
  misc_feature (3463)..(3467): n is a, c, g, or t
  misc_feature (3470)..(3477): n is a, c, g, or t
  misc_feature (3479)..(3479): n is a, c, g, or t
  misc_feature (3481)..(3481): n is a, c, g, or t
  misc_feature (3483)..(3483): n is a, c, g, or t
  misc_feature (3485)..(3490): n is a, c, g, or t
  misc_feature (3492)..(3497): n is a, c, g, or t
  misc_feature (3499)..(3504): n is a, c, g, or t
  misc_feature (3506)..(3514): n is a, c, g, or t
  misc_feature (3516)..(3518): n is a, c, g, or t
  misc_feature (3520)..(3520): n is a, c, g, or t
  misc_feature (3523)..(3524): n is a, c, g, or t
  misc_feature (3526)..(3531): n is a, c, g, or t
  misc_feature (3533)..(3537): n is a, c, g, or t
  misc_feature (3539)..(3539): n is a, c, g, or t
  misc_feature (3541)..(3543): n is a, c, g, or t
  misc_feature (3547)..(3548): n is a, c, g, or t
  misc_feature (3550)..(3552): n is a, c, g, or t
  misc_feature (3554)..(3554): n is a, c, g, or t
  misc_feature (3556)..(3557): n is a, c, g, or t
  misc_feature (3559)..(3565): n is a, c, g, or t
  misc_feature (3567)..(3567): n is a, c, g, or t
  misc_feature (3569)..(3569): n is a, c, g, or t
  misc_feature (3571)..(3572): n is a, c, g, or t
  misc_feature (3575)..(3576): n is a, c, g, or t
  misc_feature (3578)..(3578): n is a, c, g, or t
  misc_feature (3580)..(3581): n is a, c, g, or t
  misc_feature (3583)..(3592): n is a, c, g, or t
  misc_feature (3594)..(3596): n is a, c, g, or t
  misc_feature (3598)..(3598): n is a, c, g, or t
  misc_feature (3600)..(3600): n is a, c, g, or t
  misc_feature (3602)..(3602): n is a, c, g, or t
  misc_feature (3605)..(3610): n is a, c, g, or t
  misc_feature (3612)..(3612): n is a, c, g, or t
  misc_feature (3614)..(3618): n is a, c, g, or t
  misc_feature (3620)..(3622): n is a, c, g, or t
  misc_feature (3624)..(3624): n is a, c, g, or t
  misc_feature (3626)..(3626): n is a, c, g, or t
  misc_feature (3628)..(3629): n is a, c, g, or t
  misc_feature (3631)..(3631): n is a, c, g, or t
  misc_feature (3634)..(3636): n is a, c, g, or t
  misc_feature (3640)..(3640): n is a, c, g, or t
  misc_feature (3642)..(3642): n is a, c, g, or t
  misc_feature (3644)..(3644): n is a, c, g, or t
  misc_feature (3647)..(3647): n is a, c, g, or t
  misc_feature (3653)..(3654): n is a, c, g, or t
  misc_feature (3657)..(3658): n is a, c, g, or t
  misc_feature (3660)..(3662): n is a, c, g, or t
  misc_feature (3664)..(3664): n is a, c, g, or t
  misc_feature (3668)..(3669): n is a, c, g, or t
  misc_feature (3672)..(3674): n is a, c, g, or t
  misc_feature (3677)..(3677): n is a, c, g, or t
  misc_feature (3681)..(3681): n is a, c, g, or t
  misc_feature (3685)..(3686): n is a, c, g, or t
  misc_feature (3690)..(3690): n is a, c, g, or t
  misc_feature (3693)..(3694): n is a, c, g, or t
  misc_feature (3697)..(3698): n is a, c, g, or t
  misc_feature (3700)..(3702): n is a, c, g, or t
  misc_feature (3705)..(3707): n is a, c, g, or t
  misc_feature (3712)..(3712): n is a, c, g, or t
  misc_feature (3714)..(3718): n is a, c, g, or t
  misc_feature (3720)..(3720): n is a, c, g, or t
  misc_feature (3722)..(3722): n is a, c, g, or t
  misc_feature (3724)..(3724): n is a, c, g, or t
  misc_feature (3727)..(3731): n is a, c, g, or t
  misc_feature (3733)..(3735): n is a, c, g, or t
  misc_feature (3738)..(3740): n is a, c, g, or t
  misc_feature (3742)..(3742): n is a, c, g, or t
  misc_feature (3744)..(3744): n is a, c, g, or t
  misc_feature (3747)..(3747): n is a, c, g, or t
  misc_feature (3749)..(3749): n is a, c, g, or t
  misc_feature (3751)..(3752): n is a, c, g, or t
  misc_feature (3754)..(3754): n is a, c, g, or t
  misc_feature (3756)..(3757): n is a, c, g, or t
  misc_feature (3761)..(3761): n is a, c, g, or t
  misc_feature (3763)..(3763): n is a, c, g, or t
  misc_feature (3766)..(3770): n is a, c, g, or t
  misc_feature (3772)..(3773): n is a, c, g, or t
  misc_feature (3776)..(3776): n is a, c, g, or t
  misc_feature (3778)..(3778): n is a, c, g, or t
  misc_feature (3782)..(3782): n is a, c, g, or t
  misc_feature (3787)..(3787): n is a, c, g, or t
  misc_feature (3789)..(3790): n is a, c, g, or t
  misc_feature (3795)..(3795): n is a, c, g, or t
  misc_feature (3798)..(3799): n is a, c, g, or t
  misc_feature (3802)..(3802): n is a, c, g, or t
  misc_feature (3804)..(3805): n is a, c, g, or t
  misc_feature (3808)..(3808): n is a, c, g, or t
  misc_feature (3810)..(3811): n is a, c, g, or t
  misc_feature (3815)..(3817): n is a, c, g, or t
  misc_feature (3820)..(3820): n is a, c, g, or t
  misc_feature (3823)..(3823): n is a, c, g, or t
  misc_feature (3826)..(3826): n is a, c, g, or t
  misc_feature (3828)..(3830): n is a, c, g, or t
  misc_feature (3832)..(3834): n is a, c, g, or t
  misc_feature (3836)..(3844): n is a, c, g, or t
  misc_feature (3846)..(3846): n is a, c, g, or t
  misc_feature (3849)..(3853): n is a, c, g, or t
  misc_feature (3857)..(3858): n is a, c, g, or t
  misc_feature (3860)..(3863): n is a, c, g, or t
  misc_feature (3870)..(3871): n is a, c, g, or t
  misc_feature (3875)..(3876): n is a, c, g, or t
  misc_feature (3878)..(3880): n is a, c, g, or t
  misc_feature (3882)..(3883): n is a, c, g, or t
  misc_feature (3886)..(3887): n is a, c, g, or t
  misc_feature (3890)..(3890): n is a, c, g, or t
  misc_feature (3892)..(3895): n is a, c, g, or t
  misc_feature (3898)..(3899): n is a, c, g, or t
  misc_feature (3901)..(3901): n is a, c, g, or t
  misc_feature (3904)..(3904): n is a, c, g, or t
  misc_feature (3906)..(3911): n is a, c, g, or t
  misc_feature (3915)..(3915): n is a, c, g, or t
  misc_feature (3917)..(3921): n is a, c, g, or t
  misc_feature (3923)..(3924): n is a, c, g, or t
  misc_feature (3931)..(3932): n is a, c, g, or t
  misc_feature (3935)..(3935): n is a, c, g, or t
  misc_feature (3938)..(3939): n is a, c, g, or t
  misc_feature (3946)..(3951): n is a, c, g, or t
  misc_feature (3953)..(3955): n is a, c, g, or t
  misc_feature (3957)..(3957): n is a, c, g, or t
  misc_feature (3960)..(3960): n is a, c, g, or t
  misc_feature (3962)..(3962): n is a, c, g, or t
  misc_feature (3965)..(3965): n is a, c, g, or t
  misc_feature (3967)..(3968): n is a, c, g, or t
  misc_feature (3970)..(3971): n is a, c, g, or t
  misc_feature (3974)..(3974): n is a, c, g, or t
  misc_feature (3976)..(3976): n is a, c, g, or t
  misc_feature (3980)..(3981): n is a, c, g, or t
  misc_feature (3984)..(3985): n is a, c, g, or t
  misc_feature (3987)..(3988): n is a, c, g, or t
  misc_feature (3990)..(3992): n is a, c, g, or t
  misc_feature (3995)..(3995): n is a, c, g, or t
  misc_feature (3998)..(3998): n is a, c, g, or t
  misc_feature (4000)..(4000): n is a, c, g, or t
ggcgcgaagatcacgatcgactcggcaacgctcatgaacaaggggctcgagatcatcgaggcgcggtggctgttcgacgtgcgcccggaccaggtgcaggtcgtggtccatccgcagtcgatcgtgcactcgatggtggagtacgtggacgggtcggtcctcgcccagctcggtgtcgccgacatggcngtgccgatcctctacgccctcacgtatcccgagcggcggccgacgccggccgcccggctcgatctcacgcgggcggggcagctgacgttctacgagcccgacgcggacaagttcccctgccttgggctggcgcgcggggcgctcgagcgcggcggggccgcaccggtcgtgctcaacgcggcgaacgagatcgcggtcgcggccttcctcgatcggcgcatcggattcacggagatcgctcagctgatcgagtgggcgctcgacgccgccagcgccgtcgccgtgcgctcgctcgaggagtgcgtggcgntcgacgccgagacccggctgcgggtcgggcggaggatcgacgcgcgcagcggaggcccttccgcgtgacgacgctcgtctcgttcctcgttgtcatcggcatcctgatcctgatccacgagctcgggcacttcatcgtcgcgcgcctcaccggggtcggggtcgagcgcttctcgatcgggttcggcccggtgctcgtgcgctggcgcgggaaggagaccgagtactgtctctccgcagtcccgatgggcggctacgtcaagatgatgggcgaggagaacccgctcgagggcggcggcggggccgtgcccttcgacccggcgaagtcgttcgcgctcaagccgctcccggtgcggttcctgatcgtcttcgctggccccgggatgaattttgtcctcgccgcgctcatcttcggggtcgtgctcgcgaccatcggacggccggtgtggccgccggtcgtcggccgggtcaccgacgggagccccgcggccgcggcgggcctcctgaccgacgacgtcgtgacgcgcgtggacgggcgcccgatcggctattgggaggacctcgaccgcgcggtcgccgggtcggacggacggacgctcgtgctcacggtcagacgcggcggggccgagcgcacgttcagcgtgacgccgcggcgaacgaccgtgcgcgacccgatcttccgggacccgaaggacgcgtgggagctcggcgtggggccgaagctcaccccgcagatcggcgccgtgaacccgggctcgcccgccgagacggcgggcctgcgcgtcggggactgggtcctggcggtcgcgggccagncggtgttcacgcccgacgagctcatgcaggcgatccagaagcgtggcggccagacgttcgacatcgtcgcggaacgcgacggcaagcccgagacgctgaccgtcacggccaccgcngtcagggagaaagggcccagcgggcaagaggtcgagatcgggcgcatcggggtcggcatcgtgacgcgcgtcgtgcgttacgagccctatcacccgctcgtcgcggccgcgtacggctgggtcaggacgtgggacatgaccctgctcacggccaagggcctctggaagatcgtctcgcggcagatcgactcctcgaacatcggcggcccgatccagatcgcggccgaggccgggcgccaggcgaaagagggcgtcgcctcgctcgcggtgttcacggcgatcatcagcgtgaacctggcgctgctgaacctcctgccggtgccgatgctcgacggcgggcacctcttcttcttcgtcatcgaagcggtcatggggcggccgctgtcgctcaagaagcgcgaagcggcgcaacagctcgggttcgttttgctgatgctcctcatggtctacgcgctctacaatgacctggtgaggatcgatgcgtttcgaatgttcaaataggacgactccatgatcacacggcggaagacgcgacagatccggttgggcggcgtgnagattggcggcgacgcgccgctcaccgtgcaatcgatgacgaagaccgacacgcgcgacgtccaggcgacgctgctcgagatctgggcgctcgaagcggccggctgcgacatcgtgcggtgcgcggtgcccgtccgcgaggcggccgagaagctcggcgagatcaagcggcagatccgcattcccctcgtggccgacatccacttcaactacaagctggcgctcatcgcgctcgagcagggcgtcgacggcctgcgcctcaaccccggaaacatcggcggcaagccnttcgtncaggaggtcgtgaacgtcgccaaggaaaagcaaattcccgtncggatcggggtcaacgcgggntctctcganaagganctnctcgccaannacngtggnccnacnnccgaaggnatggtngantccgcgntgcgacacatccggatcctngangactgnnnntancnggngatgaagatntcgctgaaggcctcngacccgcgcatgatgatcgaggcgtaccggatgctcgccgaccaggtcgactacccgttccacctgggcgtgaccgaggcgggcacgcccggcgtcgggacgatcaagtcggcggttggcctcggggcgctcctctccgagggcatcggcgatacgatccgtgtctcgctctccgcggatccgaccgaagaagttcgggtcgggatcgacatcttgaaatcgcttggcctccggaagggcggcctcaccttcgtctcgtgcccctcgtgcggccgcgccgacgtcgatctcgtcaagctcgcgaaggaggtcgagnacgagttccgtgggctgaacgaggagatccacatcgcggtnatgggntgcgnnnnnnanggccnnnnngnngnnnnnnngnnngnnnncnnnnngnnngnnnngnnnnnnnnnnncnncnnnntnnngannnncgnngncnnnnncnnnnnngncgannnggnnancnngnangcgntnnncgnngagntcgncnnnntnnnnncnnngngnnnnncnnngcnnnngnngncnnngnnnnannnnnnntgggnnnntncnnnnncnangnnnnngnnngcnnnnngngnnnnncnnncncnnnnnnnggcgncgnnnnnngnnnnnnnnnnnnnnnnnnnggnnnngnnnngnnngntgnncncnngnnngnnnnncgnntnnncnnnnnngnnngnnnnnnnnnnnnnngnnacgnncnnnnnnnnnnnnnnnnnnnngannncgnnngnnnnngnnnnnnnnangnnngcnnnctncnnnnnntcnnnnngnnnnanntcnnnnnnggnnngcnngnnnnncnnnnnnnnnnnnnncnnnnnnnnggannngcnnncnnnnnnnnngnnncnnnnnnnnnnnnngncnnnnnnngnncnnnnntcncannnncngngnngnnnncncnnnnnnnnannngnngnncnnnnannnnnnnnnnngcnncngcnnnnngcnnnnnnnngncncngnnnnnnannnnnncnnnnnncnnnnnnnnngnnncntcnncnnnnnnannnnnancnnncgcnngnnnangnncnnnnnnngngngnnggnnancnngnnnnnnnnnntnnntncngncgnnnnnngnannnnncnnngncncnngngcnnnccgncnangtncatcannttnngnnncngctnnggnnnccngcgnttcnncatnatnncgnncnnngtnnncgccngnnnnncngngncgnnnnngnnnccnnncngncgngncnngnannactngngcnnnnncnncancncggngcgcngnnaggangcnncgncnncgncnngggnnnggncgngcngnnngnnncnnnnnnnnncntcnnnnnccgnncnnnncgtcgtnncgcnngnnngnngcnngtncnnnnccnngnggncnnnnnngcgnannnnntnncactgcnnggngcnntgctgcnnnnnngnnnantcnanggncnngnngangngcgnncgnncnncnnnggngtngn

SEQ ID NO: 917 - DNA, 4000 bp, Escherichia coli
  misc_feature (56)..(56): n is a, c, g, or t
  misc_feature (60)..(61): n is a, c, g, or t
  misc_feature (226)..(226): n is a, c, g, or t
  misc_feature (278)..(278): n is a, c, g, or t
  misc_feature (289)..(289): n is a, c, g, or t
  misc_feature (311)..(311): n is a, c, g, or t
  misc_feature (317)..(317): n is a, c, g, or t
  misc_feature (374)..(374): n is a, c, g, or t
  misc_feature (442)..(442): n is a, c, g, or t
  misc_feature (514)..(514): n is a, c, g, or t
  misc_feature (542)..(542): n is a, c, g, or t
  misc_feature (769)..(769): n is a, c, g, or t
  misc_feature (803)..(803): n is a, c, g, or t
  misc_feature (818)..(818): n is a, c, g, or t
  misc_feature (870)..(870): n is a, c, g, or t
  misc_feature (895)..(895): n is a, c, g, or t
  misc_feature (958)..(958): n is a, c, g, or t
  misc_feature (1028)..(1028): n is a, c, g, or t
  misc_feature (1502)..(1502): n is a, c, g, or t
  misc_feature (1874)..(1874): n is a, c, g, or t
  misc_feature (3071)..(3071): n is a, c, g, or t
  misc_feature (3122)..(3122): n is a, c, g, or t
  misc_feature (3245)..(3245): n is a, c, g, or t
  misc_feature (3792)..(3792): n is a, c, g, or t
  misc_feature (3803)..(3806): n is a, c, g, or t
  misc_feature (3808)..(3809): n is a, c, g, or t
  misc_feature (3811)..(3811): n is a, c, g, or t
  misc_feature (3886)..(3886): n is a, c, g, or t
  misc_feature (3899)..(3899): n is a, c, g, or t
  misc_feature (3902)..(3902): n is a, c, g, or t
caggatgagtatgctcgaccaaacgatgcgtcgcgccggcgatgatggcggcaacnatgnngcatacgatcaggatgagcccgtggtcgccgaacagaaggctcgccgcgagaccaataaacacgaaggaaatggcgatgaaatgcagacgacgagtgactggtttgctatgaacacgcagataaaagagccagaactgctcgaagtctgcgtccttcgctggcgntgcggagccaacccggtcaccttcctttaaggctgctcgcttcatgccggcntccggctagantaggcgcgcattgccgggcaanggtgcnaggccgaagcccgacatgcgcatgctaaaacagaggaacaaccatggattctgctgntccctatctcaagcttgtgggccgcgtgcttctttccatcatgttcatccagtccggcgtcggaaagntcttcggctatgccggcacggaagagcatatgaacgcggcgggcgtgccagggaccctccttcctcttgtcntcgtcactgaggtgggcggcggtcttcncgtgctgcttgggctttttactcgctatgcggcgatcgctctcgccggtttctgcgtgctcgccgcctggttcttccactatcagccgggcgacatgggccagatgatcaacttcatgaaaaacatcactatcgcaggtgggttcctcgtgctggcgggcgccggcccgggcgctttcgctctcgataatctgcgccgctaacgggggaacgttaaccctcggcgcnttcgcccaaattgacgatggcgttctgtgccagnggatcggcgacggcnatctccgtcaccaacggacggcccgcataatagttgcgcaacagcatgaacngtgccgccgcgccgactagcggcangaggagggacacggaaatcggaacgccgagcgctgagagaagcgcagcgagcaaacagccacntgccgccccgacatcccaggcgccttccgtcgcgacgtggaacctaagggtgcagggcgaacgcttggcntgattgtacacggcggtcattatcgtcgggatgtagaggcagaccacgagcgcgccgagcgcgttggcgacgacggcgagaagcgcgtggcccggtgccagcgcgcgcagtaccgtggtgaaggcgagcacgccaatcgcgtaagtgaccgctctctgtccatgcccggcatcgatcagacggccaagcaacaggcctgaaaccgcgccgaccagcgccgcgagcgcaagcgcgccgccgaacgccacgaagctttcgccgagcgacaagaacagggcgatctgccagacgaagaaatagccagccgcgatccagccgtcggccaggaacagcttcatgccgggaatggcggcgcggaaagcaccgggacaatgtcgcgcgacggggacgtcgggcgtcaacagcagaggcaaagcggcgagcagcagcaccacggcggttacaccgaaggccatgcggggaccaaaggccacnagcgcccaacccgtcacgagcgggctcacgatcccgaccagcgccgcgagcgcttcgcgcgcgccaagctcggagccgcgatgttcgtgattgccgagcgcggcgtaataggcgtggtagctcgaccagtaaagcgtatcgccaagcgaagcgaccacgcagagtgtgagcagcgctggtccgagcccatgcacctcggcaagcagcgggtattgcagggcggtaagacaggtgccggcgataacgagggcccgcaggccgaatttggccgcaagcggcacgagtaccggcctgatgatgaagcggccggccaggatcagggcaagcgaggcaagcaccagcgggatcgaaaggcctgacttaagcagatanacggcaaagaatgcgccgccgccggaaagcgcgatggcgtggatgccatagtgcaggttcagcagattgaccgtccggtcgcgaaaaaatgccatgagtccctaagatgcgcgttagatcgagcggtttcctagcggcagggcagcgcgcagacaacgcgcgaagtgacatccgccaggatggctttacttcgcgccccgcttgcccttaaagacggcaccaagcagcaaggagcaagtcatgggttacaaagtcgccgtggtcggcgcgaccggcaatgtcgggcgcgagatgctcaacatcctggccgagcgcgaattccccgccgatgaagtgttcgccatcgcctcgcgtcgctcgatgggcgtcgaggtctcctatggcgatcaccggctgaaatgccgcgatctcgagcaattcgacttcaggggcgtcgatttcgcgctgatgtcggcgggctctgctgtgtccaaggactggtcgccgcagatcggcgcgcaaggttgcgtcgtcatcgacaactcatcctgctggcgctacgaccccgacgttccgctagtggtgcccgaagtcaatgccgacgctgtcgaaggtttcaccaagaagaacatcgtcgccaatcccaattgctcgaccgcccagctcgtcgtggtgctgaagcctctgcacgaccgcgccaagatcaagcgcgtggtggtcgcgacctatcagtccgtctccggcgccggtaaggaggccatggacgagctgtgggaccaaaccaagggcattttcgtcaccgagccgcctgagcccaaaaaattcaccaagcagatcgccttcaacgtcattcctcacatcgacgtcttcctcgacgacggctcgaccaaggaggaatggaagatgtcggccgagaccaagaagattctcgatcccaagatcaagctgactgcaacttgcgtccgcgtgccggtgttcgtcggccactccgaggcggtcaatgtcgaattcgaggagccgatcacggcggaagaagcgcgcaaaattctgcgcgaggcgccgggcgtgctggtagtcgacaagcaggagcctggcggctacgtgacgccgatcgaatgcgtcggcgactacgcgacattcgtctcgcgcatcagggaggaccagacgctcgataacgggctctcgttctgggttgtgtccgacaatctgcgcaaaggngcggcgctcaacacggtgcagatcgccgagacgatcatcaaccgcaatctnttggaaaaggctgcctagttctgtcgcgtgcgcctctaggccccgttcaaggccgcgaagttgtcgcttgcctcgtcgagctcaatcagctcgccgctggcaatgtcgaaatgcaggccgtgnaacgcgagcaggccttcattcattcgcttcttgatgaatgggaaggtgcggagattggcaagcgaagagcggatcgcagcaagctcgaacgccacctcttcgccgtgggcgaacacgtcggtctccaagaccttgagattgtcgagcagcgtcagccagcgcccgatgaagcctcgctccggcacgtgttccctgaccttctggcggtacgctgcgacgccgccgcaatgtgaatgcccgagcacaatgatgtgcggaactttcagcgcgagtgcggcgaattcgatcgcggcgcttgttccgtggtatttgccctcaggctcgtagggcggcacgaggttggccacgttgcgcaagatgaataaggcgccgggctcggcgtcgaagatggccgagacatcgacacgggcatctgaacaggcgatgaccattgcggtcggtgtctggccaagctcggcgagctggatgtagcggccgcggtccttggcgtgaacctcgcggcggaagcggaaatgcccgtccaccagggttttcggtaaacgcaaangtgacctcccnnnngnngnattgactgacaccgcgttgctccgtcgctggcacgattcccgccctttgcgcgtttgtctagtgcacgcgcgcangcgattggcaganccnatcgcccgttcgtgagtgcctacttgatcttgaccgttgggtggagcgaggcttttgcgctggccgcccccaagaagcgcgatttccctaccgcggcg

SEQ ID NO: 918 - DNA, 4000 bp, Escherichia coli
  misc_feature (145)..(145): n is a, c, g, or t
  misc_feature (211)..(211): n is a, c, g, or t
  misc_feature (304)..(304): n is a, c, g, or t
  misc_feature (1171)..(1171): n is a, c, g, or t
  misc_feature (1174)..(1174): n is a, c, g, or t
  misc_feature (1300)..(1300): n is a, c, g, or t
  misc_feature (1567)..(1567): n is a, c, g, or t
  misc_feature (1579)..(1579): n is a, c, g, or t
  misc_feature (1594)..(1594): n is a, c, g, or t
  misc_feature (1714)..(1714): n is a, c, g, or t
  misc_feature (1717)..(1717): n is a, c, g, or t
  misc_feature (1986)..(1986): n is a, c, g, or t
  misc_feature (2522)..(2522): n is a, c, g, or t
  misc_feature (2696)..(2696): n is a, c, g, or t
  misc_feature (2824)..(2824): n is a, c, g, or t
  misc_feature (2834)..(2834): n is a, c, g, or t
  misc_feature (2855)..(2855): n is a, c, g, or t
  misc_feature (2861)..(2861): n is a, c, g, or t
  misc_feature (3327)..(3327): n is a, c, g, or t
  misc_feature (3410)..(3410): n is a, c, g, or t
  misc_feature (3578)..(3578): n is a, c, g, or t
  misc_feature (3645)..(3645): n is a, c, g, or t
  misc_feature (3800)..(3800): n is a, c, g, or t
  misc_feature (3842)..(3842): n is a, c, g, or t
  misc_feature (3965)..(3965): n is a, c, g, or t
  misc_feature (3998)..(3998): n is a, c, g, or t
agcaacggtcgcgccgtcgatagtttcttgctcgagcaggctctgagccacaagatcaagacctgcacgattcttttcgagcaagacttttgcgcgggcttcttgctcgcgaaggattaatccaatttctgagtcgatcattcgngcggtctcgtctgagtattcgcgaccgttagtcatcaagtcttcgcctaaaaagacctgctgctgngaactccaggccattgggccaaccgcgtcgctcattccccattcgcgcaccattcgtcgcgcaattgaagttgcctgctcaaggtcgtttgcngcgccactattcaaatgaccaaacacaatcatttctgcaacacggccacccatggctttgcagatcatgtctttgaagtagtcacgagaatatgtatgtcgctcttctggcagagtccatgtaacaccaagcgccatgccacgcggcaagatcgtcactttgtgcagtggatcactgtggggtagaacagttgcaagaaccgcgtgaccaccttcgtgatatgcagttgctcgtttttcttcggcgttaaggatcaaactttcacgacgagcacccatgatcactcggtcacgggcattttcgaagtcgatgtgttcaataacttttgagcctcgacgcacggcgagcaacgccgattcattgacaaggtttgcaagatctgcgccactcattcctggtgttgctttggccatcgtgtcgagaacgacgtcggtacccattcgcttgccttttgagtgcacggtcagaatcgccaagcgctcttcacattctggcaacggcattattacttgacgatcgaagcgacctggtcgcaaaagtgctgcatccaaaatgtcaggacggtttgtcgccgccataacaatcacgccttctgttgtttcgaatccgtccatttcggcgagcaattgatttaaagtctgctcacgctcgtcatgtccgccaccaagacctgcgccacgctttcgtccgattgagtcaatttcgtcaacgaaaataattgctctacccattttgcgggcttgctgaaagagatcgcgcacgcgacttgcgccgacgccgacgaacatttccatgaagtcagaacccgtcaccgacaaaaagccaacacctgcttcgccagccaccgcacgcgcgaaaagagttttnccngtgcccggagggccaactagcaaaacacctttaggaacgcgagcaccgatctctttgaagctctcgggcattttcaagaagtcaacgacttcgcgaatctcttgcttgacgccgtcatatccggcnacgtcggcaaatgtagtggcgggtttatcggcgttgtagtttttggctcggctacgaccgatcgacatgatgcttccggcttgacccatggctcgacgttgcatccaaacgaaaaaacccatgatcaaaatgaatggcaatagaagtggaatcaaattcgtaaagaagttgccttgcggtgtcgcatagtcatagtcgacacctttttctttgagcaaagtttcgtctgcatcagaaagaatcacggcaccggtcgtcgcgaattcnctgccgtctttnagggttccgctgatntcattcgaaagattgttgatttgaacttgtgtcacttgattttgtttgacaagttccagaaactctgtgtacgaaactttcgtagcggtggatgctggccacaatcgaggtccggctatnaanaagacgaccacggccacgattgcccatgtcgcccaacggggcatgtttggtttttcggtgtcgctacttacatttgattttttttgagtcttttttgaagacttcttgttcaaaaaatttgcaggcttcttgcgggcggcaggcttacgctttgacgacgaaggctttgctggtggcggtgggggaggaagtttggtcacgcttttaatgatacgacccgatgttgaaaccctgcaatggcgaatgtctcgttctcggcagggtattcncccgatttgaaatcccctgtggccgatgactcatcaattattgttatctctatggttcgtcgttgttcacgttgcacatgtaacgaactcgcaacaattactttgacctatcaatacagtcgtgccttggtatggatagatgacttgaccgccgagcgagatccgcacgcttatgatttgtgcgatcgacacggcgtaagaattacggctccgtctggttggaggctcgaagatcgccgcaaccgtttcagagttgtaatgccaaaccgcctcgcgggatgaaccaatcgccgtgggctccgccctatgggcaggagccggcaagaagccaaacttttaatctaaagacggtcattttgacttggaccgcgagttacttcgtggcgctgttcgtcagttcggcaattctcgtggcaactggcaacacagacatagtttctggcaaagaaccgaagtggttcttgggtgtttctgcgcttgcactttgggttccgttcattatcggtttgtatctggtctcacagaaacttggtagncaaagattttcgagcgacttttttttaaagtttcggcgtgtcgatctttggggtcttccgattggcatcgcaggtcagcttgttctcgtcgggcttgtgacttggccatttcgtgttttgttccctgaaaaatttgctccagaactgatcgagaagcgagcgcaagacttattnaacaacgcaactggcccatggttgatcgttttgattttggtcgttgtcattggcgcaccgtttgttgaagagttggtatatcgcggctttattcagtcaggattaaaaaaccgtttaggaagttcagntgctgtcgtnattactgccgtttggtttgcngccgtncaccttcaacttgtcgagtttcccggcctgctcgcgtttgcgctcgtcctcggtttttgttttcatcgaactcacagaattggcatgtcaattgttgcgcatgtcgcgtttaatgcgactggtttgttgctcgtggccctgctctaatcaagaacaactattcacgactagagtttctacgcagtgaagcaaattaattttcgcagttggaccgctcagcaaattacttcggctgtgatcgttgctggttcaactttgatgttgttaatgaccctgcacccagagttgatattgcgaaacaacacgccaactggcggagacatgggcgcacatgtctatggtccggcgttcttgcgtgattttttgttgcctcattttcgcttaacgggttggagcaatgactggtactcgggttttccgatgtatcgcttctacatggttttgcccgcacttgcagttttgctanttgatctgatcttgccgtatggcatcgcgttgaaaattattgccgttctcggaatcttgaccctgccggtttgcgtttggctntttggcaagtttgcaaaatttctctttccgattcctgaactgttgacattggcatctgttgtctttttgtacgacgagagttttacgatttacggcggcaatatcgcatcaacaatggccggtgagttttcgttttcaatttcgttgtcactagctattttgactttngggcttttaattcgagcttttgaagaacatcgaggcaagatgctgactgctgttgtgcttgctcttngcgcattgagtcacggcattgttttgttgttcgttttcggtggagtagtgctgctggccgcaatttggtacaccaaaaagacaacaatcaccgctgtaacaatttctgtcacggcaattttgctttcttcgttttgggttttgccgttcttgacnggtcacgcatatatgaccgatatgaaatatgaaccaagaccnagtggcgcgagtgattctttttggaaaatgtattttcctttggcaactttttgggatgtcctgatttttgtttttgcttgcgtgggtttcgcagtgttcgtcaagcgtcgcaatcgaaccggnatctggatgggtgtctattgcgtcgtgttggtntt

SEQ ID NO: 919 - DNA, 4000 bp, Escherichia coli
  misc_feature (1868)..(1868): n is a, c, g, or t
  misc_feature (2172)..(2173): n is a, c, g, or t
  misc_feature (3845)..(3845): n is a, c, g, or t
tggcgcgcaacgacgtggaccccatggccgtcgaggacgtggtgttcggatgcgttgacaccctcggtccccaggctggcgacatcgcccgcacggcgtggttggccgctggcctgccggaggcgatcccgggtacgaccatcgaccgccagtgcggttccgggcagcaggccgtgagcttcgccgccatgggcgtcatgtccggcctgcaggacctggtggtcgccggcggtgtgcagaacatgagcatgatccccatcggcctggccctcgaggccgcccggcccttcgggcacgaggatccgttctccgggtccaccggctgggtggcgcgctatggaacccaggaggtgtcccagttccggggtgccgagctgattgccgagaagtggaacatcagtcgcgaggagatggaggcgttcgccttcacgagccacgagcgggccatcaccgccatcgacgaggggcgcttcgagcgggaggtcgccccgctggctggagtcgaggtggacgagggtccccgacggggcggcagcatcgagaagatggcccagctggcacccctggtcgacggaggccggatcacggccgccctggccagccaggtgagtgacggcgcagcggccatcctcgtggcctcggagcgggccatcgaagaccacggcctcaccccgcgggccaggatccaccacatcagcgtgcgtggtgatgacccgatctacatgctctccgggcccattgcggcgaccacctacgcgctggagaagtccgggatgtcgatcgacgacatcgacctcttcgagtgcaacgaggccttcgcccccgtgccgctcgcgtggatggccgagcacagggtgccccacgagaaggtcaacgtgaacggcggggcgatcgccctgggccacccgctgggctgtagcggtgccaagctcatgaccacgctgctgaacgagttggaacgcacgggcgggcgcttcgggctccagacgatgtgcgagggcggcggccaggcgaacgtgaccatcctcgagcgcctctgaccgcccggccgcccggcgatttgctccggggtaggtcggacgcggctcaggtcgggtggatcaatccacgatcgcgtcgacgaggccccaccccaacgcggtggtggcgtcgatggtggcgccggtcaggcacatccgggccgtctgctggcgcccgatacgccgtgggatgctgaccgtgcctccagcgcccggtatgaggcccatggatacctccggcaggcagaacgtcgccgagccggtggcctccaggcgtccggcgaatgcagccaactcgactccggcaccgacggctggaccatgcacccggacggtgagccggtcggccagcaggtccagccagggagcggcgttggccgaggaccggatcaggtgagccgccaccggatcggcgaccgtgccgaactcggccggatcgccaccacagcagaatgccggccccctgccggtcagcaggacctgacgcctgtcgtccggtgccaccagcgggcggagtgcctcgaccagcgcatcgcgcatcgctgcggagaaggcgttgcgtagtcgcggtcggttcaacgtcagcgtcacggtgtcgtcgtcggcgtccaccagaacgggagggtccggctcgacgggcctgaccctccgcccgcgaccctccagccaccctgcgaactcggcgcctgcctgcagcgtgccgtaggccgtggactccagcaggaggccggccggcgtatccaggccctccccgtggcgaaggacctgacagcaggccagtgccgcccggggggcgccggccaccccgtcggcgatccggacggcatcgacggcatcctcgaccagcangtcgaaggcgggggctgtgcccggggcggccagcccgatggagacgatgggtagccgggccagtgatgcggcggcctccggcggaagcaggtgggcatcgtcgacgatcagcagtgtcaggtcacgaaggacgccgatgtcgaggtccgccgtcggcgtcgtcagacgtgtcgtcgcctcgtccacggacaggacacggttcggaactgcgttggccacctgcccagtctgctcgttgcccggaccgtcgtcagcccggagaaccgtcgccgaggtgggcgaggtccgagcgcagcacccgccnnagcagctttccggtgtcgttgtaggggagcgacgccacgaactccacgtggtcgggcgtgcggttggatcgcagccggtcacgtacggcgtcgcgtagttgctccgggctggccgaggcgcccgggtggaggaccacggcggcgatgatccgttccccccactgcatgtcgggtaggccgatggctgcggcgtcggccaccgccgggtgacagaccaggacctcctcgatctcgccgggggagacgttctggccgcccttcacgatgacgtcgtcgattcggcccgtgacgtggaggtacccgtcggtgtccatccagccaccgtcatgggtggggaaccagccgtcggcggtcaggcgtggggccgacccccggtattcgcctgagacctgttctccccggacccagatctccccgggctggcccactgccacctcgtctccaagatcgtcccggatcgtgacctcgatggtgggtagcggccgccccgctgatccgaggcgtgcccggatcgccggatcggcgctcgccatggcctcccggtgctcgtcgggccccagcagggccacggtcgagctggtctcggtgagcccgtaggcgttcacgaatgcggtgttcggaagtagctcaagggcccgctggatagtgggcgaaggcatccggccgccgccgtaggagagagatcgcagggtgggtagtcccggtccgtcggagccttcggcatccagcacctcgacgatgcgtgtcagcatcgtgggcaccaccatggcgctggtgaccgattcggcccggacgagcgcgacccagtcgtcggcatcgaaggtgggcagttggacgacccggcgtccagcgaagacgttggagaggatcgctgcgatgccggccacgtggtacggcggcacgctcacgagggcggcctcgtcctcgttggcgcccatgaactccaccgatccgaggacgtacgacacgaggtgccggtggcgcagtacagcggccttgggctcgccggttgtgccgctggtgaacaactcgatggcggttccctcgccggtcatgtcccattcgggttccggtggttcggcaccgtcgacgaggtccatcagcccgtggcgcgacaggagcccgatgccgtcgatgccggtcaggcggttgggggattcggggtccacgacgatgatcgccggggagatcctggaggccagcgcggccagctcgccgtcggtcaaccggtagttgaggggcacgaagggcaggtcggcccaggccgctccgaagagcgatatcggcatggcgaccgaggacaggtcggccatggccacgtgcgagccgccatcggcgcggaaccgtacggaggccgcaccggcggagtcgtagaggtcccggtaggtgaggccgccgtcagccggtccgagggcgacccggtctccgaaaccgtccgctgccatctccagcagcatcatgaggttcacgtcgtcgccctaccttgtcgtgggctgccggatcgggtcagtccgaggccggcaggggcttggcttccttcaggtccagcagggcatcgccgatgcccagtgatccgtcccccggcttggtgcagagcacttcgaccgtctcgtccggatccacgtaacgcttacccatgagggtcccgcccgatgtcccctcggcgggcagnccgctgtcgcccgctgcaccgggagcgagcatgggcgcaccgccacaccgcaggtcgacctcgcctacacccttcacgacgatcacctgggtggtgcagacgctgctggtgaaccggcttccgggcttcagggatggcatctgggtgtctcctgc

SEQ ID NO: 920 - DNA, 4000 bp, Escherichia coli
  misc_feature (1)..(3): n is a, c, g, or t
  misc_feature (5)..(5): n is a, c, g, or t
  misc_feature (8)..(10): n is a, c, g, or t
  misc_feature (15)..(18): n is a, c, g, or t
  misc_feature (20)..(25): n is a, c, g, or t
  misc_feature (27)..(31): n is a, c, g, or t
  misc_feature (33)..(34): n is a, c, g, or t
  misc_feature (40)..(40): n is a, c, g, or t
  misc_feature (43)..(43): n is a, c, g, or t
  misc_feature (45)..(47): n is a, c, g, or t
  misc_feature (50)..(50): n is a, c, g, or t
  misc_feature (52)..(52): n is a, c, g, or t
  misc_feature (54)..(55): n is a, c, g, or t
  misc_feature (57)..(58): n is a, c, g, or t
  misc_feature (60)..(62): n is a, c, g, or t
  misc_feature (64)..(70): n is a, c, g, or t
  misc_feature (74)..(74): n is a, c, g, or t
  misc_feature (76)..(77): n is a, c, g, or t
  misc_feature (79)..(80): n is a, c, g, or t
  misc_feature (83)..(85): n is a, c, g, or t
  misc_feature (88)..(92): n is a, c, g, or t
  misc_feature (94)..(94): n is a, c, g, or t
  misc_feature (97)..(97): n is a, c, g, or t
  misc_feature (100)..(101): n is a, c, g, or t
  misc_feature (104)..(110): n is a, c, g, or t
  misc_feature (112)..(112): n is a, c, g, or t
  misc_feature (114)..(121): n is a, c, g, or t
  misc_feature (124)..(124): n is a, c, g, or t
  misc_feature (127)..(131): n is a, c, g, or t
  misc_feature (134)..(134): n is a, c, g, or t
  misc_feature (136)..(136): n is a, c, g, or t
  misc_feature (139)..(145): n is a, c, g, or t
  misc_feature (147)..(148): n is a, c, g, or t
  misc_feature (150)..(150): n is a, c, g, or t
  misc_feature (152)..(154): n is a, c, g, or t
  misc_feature (156)..(157): n is a, c, g, or t
  misc_feature (159)..(160): n is a, c, g, or t
  misc_feature (163)..(163): n is a, c, g, or t
  misc_feature (165)..(166): n is a, c, g, or t
  misc_feature (168)..(171): n is a, c, g, or t
  misc_feature (173)..(173): n is a, c, g, or t
  misc_feature (175)..(175): n is a, c, g, or t
  misc_feature (177)..(179): n is a, c, g, or t
  misc_feature (181)..(184): n is a, c, g, or t
  misc_feature (188)..(192): n is a, c, g, or t
  misc_feature (194)..(196): n is a, c, g, or t
  misc_feature (199)..(199): n is a, c, g, or t
  misc_feature (202)..(213): n is a, c, g, or t
  misc_feature (215)..(219): n is a, c, g, or t
  misc_feature (221)..(224): n is a, c, g, or t
  misc_feature (227)..(228): n is a, c, g, or t
  misc_feature (230)..(234): n is a, c, g, or t
  misc_feature (236)..(236): n is a, c, g, or t
  misc_feature (239)..(240): n is a, c, g, or t
  misc_feature (242)..(245): n is a, c, g, or t
  misc_feature (247)..(247): n is a, c, g, or t
  misc_feature (250)..(255): n is a, c, g, or t
  misc_feature (257)..(257): n is a, c, g, or t
  misc_feature (259)..(264): n is a, c, g, or t
  misc_feature (266)..(266): n is a, c, g, or t
  misc_feature (269)..(275): n is a, c, g, or t
  misc_feature (278)..(280): n is a, c, g, or t
  misc_feature (283)..(287): n is a, c, g, or t
  misc_feature (290)..(292): n is a, c, g, or t
  misc_feature (296)..(298): n is a, c, g, or t
  misc_feature (300)..(305): n is a, c, g, or t
  misc_feature (307)..(307): n is a, c, g, or t
  misc_feature (309)..(311): n is a, c, g, or t
  misc_feature (313)..(317): n is a, c, g, or t
  misc_feature (321)..(327): n is a, c, g, or t
  misc_feature (329)..(330): n is a, c, g, or t
  misc_feature (332)..(334): n is a, c, g, or t
  misc_feature (337)..(338): n is a, c, g, or t
  misc_feature (341)..(341): n is a, c, g, or t
  misc_feature (343)..(350): n is a, c, g, or t
  misc_feature (352)..(355): n is a, c, g, or t
  misc_feature (358)..(364): n is a, c, g, or t
  misc_feature (366)..(374): n is a, c, g, or t
  misc_feature (378)..(381): n is a, c, g, or t
  misc_feature (383)..(388): n is a, c, g, or t
  misc_feature (392)..(392): n is a, c, g, or t
  misc_feature (395)..(399): n is a, c, g, or t
  misc_feature (403)..(406): n is a, c, g, or t
  misc_feature (410)..(410): n is a, c, g, or t
  misc_feature (412)..(413): n is a, c, g, or t
  misc_feature (415)..(415): n is a, c, g, or t
  misc_feature (417)..(418): n is a, c, g, or t
  misc_feature (420)..(420): n is a, c, g, or t
  misc_feature (422)..(422): n is a, c, g, or t
  misc_feature (424)..(430): n is a, c, g, or t
  misc_feature (433)..(437): n is a, c, g, or t
  misc_feature (440)..(443): n is a, c, g, or t
  misc_feature (445)..(446): n is a, c, g, or t
  misc_feature (448)..(450): n is a, c, g, or t
  misc_feature (452)..(452): n is a, c, g, or t
  misc_feature (455)..(457): n is a, c, g, or t
  misc_feature (459)..(460): n is a, c, g, or t
  misc_feature (463)..(466): n is a, c, g, or t
  misc_feature (468)..(468): n is a, c, g, or t
  misc_feature (470)..(470): n is a, c, g, or t
  misc_feature (472)..(472): n is a, c, g, or t
  misc_feature (474)..(477): n is a, c, g, or t
  misc_feature (479)..(484): n is a, c, g, or t
  misc_feature (486)..(487): n is a, c, g, or t
  misc_feature (498)..(498): n is a, c, g, or t
  misc_feature (567)..(567): n is a, c, g, or t
  misc_feature (579)..(579): n is a, c, g, or t
  misc_feature (616)..(616): n is a, c, g, or t
  misc_feature (618)..(618): n is a, c, g, or t
  misc_feature (620)..(620): n is a, c, g, or t
  misc_feature (629)..(629): n is a, c, g, or t
  misc_feature (651)..(651): n is a, c, g, or t
  misc_feature (666)..(666): n is a, c, g, or t
  misc_feature (669)..(669): n is a, c, g, or t
  misc_feature (693)..(693): n is a, c, g, or t
  misc_feature (711)..(711): n is a, c, g, or t
  misc_feature (756)..(756): n is a, c, g, or t
  misc_feature (759)..(759): n is a, c, g, or t
  misc_feature (766)..(766): n is a, c, g, or t
  misc_feature (771)..(771): n is a, c, g, or t
  misc_feature (816)..(816): n is a, c, g, or t
  misc_feature (834)..(834): n is a, c, g, or t
  misc_feature (894)..(894): n is a, c, g, or t
  misc_feature (912)..(912): n is a, c, g, or t
  misc_feature (975)..(975): n is a, c, g, or t
  misc_feature (999)..(999): n is a, c, g, or t
  misc_feature (1011)..(1011): n is a, c, g, or t
  misc_feature (1038)..(1038): n is a, c, g, or t
  misc_feature (1050)..(1050): n is a, c, g, or t
  misc_feature (1058)..(1058): n is a, c, g, or t
  misc_feature (1065)..(1065): n is a, c, g, or t
  misc_feature (1068)..(1068): n is a, c, g, or t
  misc_feature (1140)..(1140): n is a, c, g, or t
  misc_feature (1296)..(1296): n is a, c, g, or t
  misc_feature (1323)..(1323): n is a, c, g, or t
  misc_feature (1389)..(1389): n is a, c, g, or t
  misc_feature (1395)..(1395): n is a, c, g, or t
  misc_feature (1481)..(1482): n is a, c, g, or t
  misc_feature (1488)..(1488): n is a, c, g, or t
  misc_feature (1512)..(1512): n is a, c, g, or t
  misc_feature (1545)..(1545): n is a, c, g, or t
  misc_feature (1557)..(1557): n is a, c, g, or t
  misc_feature (1566)..(1566): n is a, c, g, or t
  misc_feature (1575)..(1575): n is a, c, g, or t
  misc_feature (1611)..(1611): n is a, c, g, or t
  misc_feature (1617)..(1617): n is a, c, g, or t
  misc_feature (1635)..(1635): n is a, c, g, or t
  misc_feature (1674)..(1674): n is a, c, g, or t
  misc_feature (1713)..(1713): n is a, c, g, or t
  misc_feature (1719)..(1719): n is a, c, g, or t
  misc_feature (1725)..(1725): n is a, c, g, or t
  misc_feature (1749)..(1749): n is a, c, g, or t
  misc_feature (1752)..(1752): n is a, c, g, or t
  misc_feature (1758)..(1758): n is a, c, g, or t
  misc_feature (1791)..(1791): n is a, c, g, or t
  misc_feature (1797)..(1797): n is a, c, g, or t
  misc_feature (1803)..(1803): n is a, c, g, or t
  misc_feature (1821)..(1821): n is a, c, g, or t
  misc_feature (1824)..(1824): n is a, c, g, or t
  misc_feature (1827)..(1827): n is a, c, g, or t
  misc_feature (1836)..(1836): n is a, c, g, or t
  misc_feature (1944)..(1944): n is a, c, g, or t
  misc_feature (1959)..(1959): n is a, c, g, or t
  misc_feature (1977)..(1977): n is a, c, g, or t
  misc_feature (2025)..(2025): n is a, c, g, or t
  misc_feature (2713)..(2713): n is a, c, g, or t
  misc_feature (2715)..(2715): n is a, c, g, or t
  misc_feature (2744)..(2744): n is a, c, g, or t
  misc_feature (2788)..(2788): n is a, c, g, or t
  misc_feature (2819)..(2819): n is a, c, g, or t
  misc_feature (2828)..(2828): n is a, c, g, or t
  misc_feature (2891)..(2891): n is a, c, g, or t
  misc_feature (2894)..(2894): n is a, c, g, or t
  misc_feature (2924)..(2924): n is a, c, g, or t
  misc_feature (2930)..(2930): n is a, c, g, or t
  misc_feature (2978)..(2978): n is a, c, g, or t
  misc_feature (2981)..(2981): n is a, c, g, or t
  misc_feature (2987)..(2987): n is a, c, g, or t
  misc_feature (2990)..(2990): n is a, c, g, or t
  misc_feature (3056)..(3056): n is a, c, g, or t
  misc_feature (3452)..(3452): n is a, c, g, or t
  misc_feature (3929)..(3929): n is a, c, g, or t
  misc_feature (3968)..(3968): n is a, c, g, or t
nnncnaannnaaagnnnngnnnnnntnnnnntnnaaaccnaancnnnttncngnntnntnnnannnnnnnaaantnncnnaannnttnnnnncnaanttnnaannnnnnncnannnnnnnnaanttnnnnnttnanttnnnnnnnanncnannntnnannaantnntnnnncngnannntnnnnaaannnnngnnnaanttnnnnnnnnnnnncnnnnncnnnnccnncnnnnncnaannannnnanttnnnnnntnannnnnntnaannnnnnnggnnnttnnnnnccnnnaaannntnnnnnngntnnngnnnnnaaannnnnnncnncnnnggnnaantnnnnnnnntnnnnttnnnnnnnannnnnnnnnaaannnncnnnnnncccnaannnnncccnnnnaaantnncnanngntnannnnnnnccnnnnnaannnngnngnnnantannnannccnnnnantnantnnnntnnnnnntnntccaaaaaacnaaaaataatcggtgcattatagcggtaacttaatgttttgtcagtaaatggtgtttacgaacacccaanagcaccaatacncctaaataaacgaccgcagccagtccgattaaccaancnanccaataganacgcattaaaaatgtcatggcngcccattcttcaatngangggcagttataccaaagcaagccncccatggctaaggctgcncctaaaactttcagaaaaaagaccgcacttttacgtgaaaaatgntanacatccnctttngctaaaccacgataaagcaaataagcatttaaggttgctgacatngcagaagcaatcgctaancccacataactaaatggaatcgccaatacgttaaagcccatattgctcaccatagcgatnatcccgattttcacgggngttttggtgtcttggcgtgcgtaatagccattagccaggatcttaatcagcataaagctaagnaaacccgcattgaatgcccataangaataagaggcngcatgcacatctgttaaggtaaaactnccacgcataaanaataccantaacatnggntgggctaacacggcaataccaatcgcggcaggcacaccgagtaataaaatcattcgcacgccccagtccatngtgttacgaaaatcaaccgcactttgggaagaattgtcttctcgattcacatgatggcgagcaagtgtcggtaaaatcacggtggaaatggcgataccaaatagaccaagtggaaactctaatagacgatcagaataataaagccaactaatagancccgtcattaagaaactggcaatgacngtatcaagcagcaagttgatttgacttacggaaaccccgaacaaggcaggaatcatcaatcgacgnattttngctaccccttcatcatgccacgcccattttggttttacgagcaagcctgctttcttcaagaaagggatttggaataaaaattgtannaaaccncctaagaagatcccgatagcaagngcaagatcaggattgtctaatcttggcgcgagnaaaagtgcggtngcaatcatngcgatattnagtaaaacaggcgaaaacgacatcacgccaaatttncctatngtatttaaaatcgcgccngaaagtgccacaaaggtgacaaaccataaataaggaaangtaatttttaagagtaaagacgcttgttcaaatttgtgngcatcnggtccntcatttagccaatcggtaaaccanccnatcccnaagatcgccgccacaacaggtgatcccaccatngcaagnaaagtnacaatactgactaatccnccnagngtacccganactttcccgataaattctcgcgttttagaaagatcgcccgatttttgatattcagctaatacgggtacaaaggcttgagaaaatgcgccttccgcaaataaacgacgnaaaaagtttgggatncggttagcgaataaaaanacgtctgccgccgcgcctgcaccgattaaatgggcaatcaccacatcncggactaaacctaacacacgggacactaatgtcatcccactcacgataatgccggattttaaaagtcgtttactcaaaataggggtctcttcaaaaaaatttgccttaattgtatagaatttttgtttttacgctatattccaacgaaaaaaactgataaaatcctgcccacatcgtttgtgtgagccaatagaaagcgctttttttaaataacgatgcttactttcggttgtgtctcaccgaaatcaacacaaattattcattgacaaaagtataaaaaatcggcatattctacgcccttattttgtcataatcatctaacagaaattttaggagtttgaccttggctaatatcaagtcagcaaaaaaacgcgcggttcaatctgaaaaacgccgccaacacaacgcaagccaacgctctatgatgcgtacttacatcaaaaaagtatatgctcaagtagcagcaggtgaaaaagcagcagctgaagcagcattcgttgaaatgcaaaaagttgttgaccgtatggcttctaaaggcttaatccacgctaacaaagcagcaaaccacaaagctaaattagctgctcaaatcaaaaaattagcgtaattaaagcattaaaacagcttaaaaataaaaccgcactttggtgcggtttttgtttgtcttaaaccgtcctgccacaaacgncngataacaagcttgcattcccccctttaanctgtaaactaccccacaacttaaaaattaatcataaaataaacnataaatgaccaaaaaatcttttaaaaaagcngatccgaantatcaaaaagaattagccaaatatggtaatccgatcccaagcagagactacattctgcaaatnatncgtgaaaataatgccccgatgagtcgggangaaatnctgaccgcactttcaattaaaagtgacgaacaacaagaagccatgcgncgncgcttncgngccatggaaaatgatggacagttagtttttactaaacgtaaacgctatgccttgcctgaaaaattngatttattcaaaggcatggtcatcggccatcgcgaaggctatggctttttacaagtcgaaggtaaaaaagaggatctctttattcctaatcaccaaatgcaacgtgtaatgcatggtgattttgtattagcccaacctgcaggcttagatcgtcgtggacgccgtgaagtccgtattgttcgtgtacttgaaagtcgcaaaaaacaaattgtcggtcgtttcttcttagaaaatggttttagctatgtggtgcctgatgatagccgtatcggacgagatattttagtccctaatgaacaccgcaatggggcccgaatgggacaagttgtcgtggttgaattgcaagaacgatctgcctccttcactcaacctgttggtattatcaccgaaattctnggtgacaatatggcaaaagggatggaagtggagatcgcccttcgtaatcatgatattcctcaccaatttccaagtgcggtcgaaaaatacgttaaaaaattcaccgaagaagtgcctgaagaagcgaaaaaaggccgtgtggatttacgcaatctgccactggttaccattgatggcgaagatgcgcgcgattttgatgatgccgtatattgcgaaaaaagtggtaaaggctggaaactttgggtggcaattgccgatgtcagctactatgttcgtttacgttctgcattagatactgaagcttataaccgtggtaactccgtttacttcccaaatcgtgttgtgccaatgctgccggagattttatcgaacggattgtgttcactgaatccacaagttgatcgcttgtgtatggtgtgtgaaatgcacgtttccgcaaaaggtaaactcacggactatcgtttttatgaagcggtnatgaactctcatgctcgcttaacctatacgaaagtcgcngcgattttagacggcgatgatgaacttcgcac

SEQ ID NO: 921 - DNA, 4000 bp, Escherichia coli
  misc_feature (1)..(25): n is a, c, g, or t
  misc_feature (27)..(43): n is a, c, g, or t
  misc_feature (45)..(58): n is a, c, g, or t
  misc_feature (60)..(60): n is a, c, g, or t
  misc_feature (62)..(66): n is a, c, g, or t
  misc_feature (68)..(76): n is a, c, g, or t
  misc_feature (78)..(83): n is a, c, g, or t
  misc_feature (85)..(91): n is a, c, g, or t
  misc_feature (93)..(99): n is a, c, g, or t
  misc_feature (101)..(145): n is a, c, g, or t
  misc_feature (147)..(151): n is a, c, g, or t
  misc_feature (153)..(158): n is a, c, g, or t
  misc_feature (160)..(162): n is a, c, g, or t
  misc_feature (164)..(169): n is a, c, g, or t
  misc_feature (172)..(175): n is a, c, g, or t
  misc_feature (177)..(180): n is a, c, g, or t
  misc_feature (183)..(184): n is a, c, g, or t
  misc_feature (186)..(186): n is a, c, g, or t
  misc_feature (189)..(191): n is a, c, g, or t
  misc_feature (194)..(194): n is a, c, g, or t
  misc_feature (196)..(196): n is a, c, g, or t
  misc_feature (198)..(198): n is a, c, g, or t
  misc_feature (200)..(210): n is a, c, g, or t
  misc_feature (212)..(212): n is a, c, g, or t
  misc_feature (214)..(215): n is a, c, g, or t
  misc_feature (217)..(222): n is a, c, g, or t
  misc_feature (224)..(244): n is a, c, g, or t
  misc_feature (247)..(247): n is a, c, g, or t
  misc_feature (250)..(252): n is a, c, g, or t
  misc_feature (254)..(256): n is a, c, g, or t
  misc_feature (258)..(271): n is a, c, g, or t
  misc_feature (273)..(287): n is a, c, g, or t
  misc_feature (290)..(296): n is a, c, g, or t
  misc_feature (299)..(312): n is a, c, g, or t
  misc_feature (315)..(331): n is a, c, g, or t
  misc_feature (334)..(339): n is a, c, g, or t
  misc_feature (341)..(343): n is a, c, g, or t
  misc_feature (345)..(352): n is a, c, g, or t
  misc_feature (354)..(357): n is a, c, g, or t
  misc_feature (359)..(364): n is a, c, g, or t
  misc_feature (366)..(372): n is a, c, g, or t
  misc_feature (374)..(378): n is a, c, g, or t
  misc_feature (380)..(391): n is a, c, g, or t
  misc_feature (393)..(394): n is a, c, g, or t
  misc_feature (396)..(400): n is a, c, g, or t
  misc_feature (402)..(404): n is a, c, g, or t
  misc_feature (406)..(435): n is a, c, g, or t
  misc_feature (437)..(442): n is a, c, g, or t
  misc_feature (444)..(448): n is a, c, g, or t
  misc_feature (450)..(479): n is a, c, g, or t
  misc_feature (481)..(484): n is a, c, g, or t
  misc_feature (486)..(515): n is a, c, g, or t
  misc_feature (517)..(520): n is a, c, g, or t
  misc_feature (522)..(522): n is a, c, g, or t
  misc_feature (524)..(554): n is a, c, g, or t
  misc_feature (556)..(558): n is a, c, g, or t
  misc_feature (560)..(560): n is a, c, g, or t
  misc_feature (563)..(581): n is a, c, g, or t
  misc_feature (583)..(602): n is a, c, g, or t
  misc_feature (605)..(613): n is a, c, g, or t
  misc_feature (615)..(616): n is a, c, g, or t
  misc_feature (618)..(636): n is a, c, g, or t
  misc_feature (638)..(638): n is a, c, g, or t
  misc_feature (640)..(648): n is a, c, g, or t
  misc_feature (650)..(689): n is a, c, g, or t
  misc_feature (691)..(694): n is a, c, g, or t
  misc_feature (696)..(696): n is a, c, g, or t
  misc_feature (698)..(702): n is a, c, g, or t
  misc_feature (705)..(716): n is a, c, g, or t
  misc_feature (718)..(739): n is a, c, g, or t
  misc_feature (742)..(742): n is a, c, g, or t
  misc_feature (744)..(744): n is a, c, g, or t
  misc_feature (746)..(747): n is a, c, g, or t
  misc_feature (749)..(750): n is a, c, g, or t
  misc_feature (752)..(765): n is a, c, g, or t
  misc_feature (767)..(771): n is a, c, g, or t
  misc_feature (774)..(774): n is a, c, g, or t
  misc_feature (777)..(778): n is a, c, g, or t
  misc_feature (781)..(782): n is a, c, g, or t
  misc_feature (785)..(786): n is a, c, g, or t
  misc_feature (791)..(793): n is a, c, g, or t
  misc_feature (796)..(800): n is a, c, g, or t
  misc_feature (802)..(804): n is a, c, g, or t
  misc_feature (808)..(808): n is a, c, g, or t
  misc_feature (818)..(828): n is a, c, g, or t
  misc_feature (830)..(830): n is a, c, g, or t
  misc_feature (832)..(832): n is a, c, g, or t
  misc_feature (834)..(835): n is a, c, g, or t
  misc_feature (838)..(841): n is a, c, g, or t
  misc_feature (843)..(844): n is a, c, g, or t
  misc_feature (847)..(849): n is a, c, g, or t
  misc_feature (852)..(852): n is a, c, g, or t
  misc_feature (854)..(854): n is a, c, g, or t
  misc_feature (857)..(858): n is a, c, g, or t
  misc_feature (862)..(868): n is a, c, g, or t
  misc_feature (870)..(871): n is a, c, g, or t
  misc_feature (873)..(876): n is a, c, g, or t
  misc_feature (879)..(885): n is a, c, g, or t
  misc_feature (887)..(887): n is a, c, g, or t
  misc_feature (889)..(889): n is a, c, g, or t
  misc_feature (891)..(897): n is a, c, g, or t
  misc_feature (900)..(902): n is a, c, g, or t
  misc_feature (904)..(904): n is a, c, g, or t
  misc_feature (906)..(906): n is a, c, g, or t
  misc_feature (908)..(909): n is a, c, g, or t
  misc_feature (911)..(917): n is a, c, g, or t
  misc_feature (920)..(925): n is a, c, g, or t
  misc_feature (927)..(928): n is a, c, g, or t
  misc_feature (930)..(939): n is a, c, g, or t
  misc_feature (942)..(942): n is a, c, g, or t
  misc_feature (947)..(950): n is a, c, g, or t
  misc_feature (952)..(952): n is a, c, g, or t
  misc_feature (955)..(956): n is a, c, g, or t
  misc_feature (962)..(964): n is a, c, g, or t
  misc_feature (967)..(967): n is a, c, g, or t
  misc_feature (969)..(969): n is a, c, g, or t
  misc_feature (971)..(972): n is a, c, g, or t
  misc_feature (974)..(976): n is a, c, g, or t
  misc_feature (983)..(983): n is a, c, g, or t
  misc_feature (985)..(986): n is a, c, g, or t
  misc_feature (988)..(988): n is a, c, g, or t
  misc_feature (992)..(992): n is a, c, g, or t
  misc_feature (994)..(994): n is a, c, g, or t
  misc_feature (996)..(997): n is a, c, g, or t
  misc_feature (1003)..(1007): n is a, c, g, or t
  misc_feature (1009)..(1010): n is a, c, g, or t
  misc_feature (1013)..(1013): n is a, c, g, or t
  misc_feature (1015)..(1015): n is a, c, g, or t
  misc_feature (1017)..(1018): n is a, c, g, or t
  misc_feature (1021)..(1021): n is a, c, g, or t
  misc_feature (1023)..(1028): n is a, c, g, or t
  misc_feature (1031)..(1032): n is a, c, g, or t
  misc_feature (1036)..(1036): n is a, c, g, or t
  misc_feature (1039)..(1043): n is a, c, g, or t
  misc_feature (1045)..(1047): n is a, c, g, or t
  misc_feature (1050)..(1054): n is a, c, g, or t
  misc_feature (1058)..(1058): n is a, c, g, or t
  misc_feature (1060)..(1061): n is a, c, g, or t
  misc_feature (1063)..(1064): n is a, c, g, or t
  misc_feature (1067)..(1070): n is a, c, g, or t
  misc_feature (1075)..(1075): n is a, c, g, or t
  misc_feature (1077)..(1078): n is a, c, g, or t
  misc_feature (1081)..(1083): n is a, c, g, or t
  misc_feature (1086)..(1087): n is a, c, g, or t
  misc_feature (1089)..(1089): n is a, c, g, or t
  misc_feature (1092)..(1095): n is a, c, g, or t
  misc_feature (1099)..(1099): n is a, c, g, or t
  misc_feature (1101)..(1102): n is a, c, g, or t
  misc_feature (1104)..(1104): n is a, c, g, or t
  misc_feature (1106)..(1106): n is a, c, g, or t
  misc_feature (1111)..(1111): n is a, c, g, or t
  misc_feature (1113)..(1113): n is a, c, g, or t
  misc_feature (1115)..(1117): n is a, c, g, or t
  misc_feature (1119)..(1125): n is a, c, g, or t
  misc_feature (1128)..(1128): n is a, c, g, or t
  misc_feature (1132)..(1135): n is a, c, g, or t
  misc_feature (1138)..(1140): n is a, c, g, or t
  misc_feature (1142)..(1145): n is a, c, g, or t
  misc_feature (1147)..(1149): n is a, c, g, or t
  misc_feature (1319)..(1319): n is a, c, g, or t
  misc_feature (1460)..(1460): n is a, c, g, or t
  misc_feature (1535)..(1535): n is a, c, g, or t
  misc_feature (1735)..(1735): n is a, c, g, or t
  misc_feature (1778)..(1778): n is a, c, g, or t
  misc_feature (1993)..(1993): n is a, c, g, or t
  misc_feature (2615)..(2615): n is a, c, g, or t
  misc_feature (2742)..(2742): n is a, c, g, or t
  misc_feature (2759)..(2759): n is a, c, g, or t
  misc_feature (2768)..(2768): n is a, c, g, or t
  misc_feature (2782)..(2782): n is a, c, g, or t
  misc_feature (2834)..(2834): n is a, c, g, or t
  misc_feature (2865)..(2865): n is a, c, g, or t
  misc_feature (2872)..(2872): n is a, c, g, or t
  misc_feature (2884)..(2884): n is a, c, g, or t
  misc_feature (2919)..(2919): n is a, c, g, or t
  misc_feature (2926)..(2926): n is a, c, g, or t
  misc_feature (2929)..(2929): n is a, c, g, or t
  misc_feature (2934)..(2934): n is a, c, g, or t
  misc_feature (2971)..(2971): n is a, c, g, or t
  misc_feature (3010)..(3010): n is a, c, g, or t
  misc_feature (3020)..(3020): n is a, c, g, or t
  misc_feature (3022)..(3022): n is a, c, g, or t
  misc_feature (3027)..(3027): n is a, c, g, or t
  misc_feature (3040)..(3040): n is a, c, g, or t
  misc_feature (3047)..(3047): n is a, c, g, or t
  misc_feature (3059)..(3059): n is a, c, g, or t
  misc_feature (3082)..(3082): n is a, c, g, or t
  misc_feature (3085)..(3085): n is a, c, g, or t
  misc_feature (3088)..(3089): n is a, c, g, or t
  misc_feature (3094)..(3094): n is a, c, g, or t
  misc_feature (3112)..(3112): n is a, c, g, or t
  misc_feature (3131)..(3132): n is a, c, g, or t
  misc_feature (3136)..(3136): n is a, c, g, or t
  misc_feature (3155)..(3155): n is a, c, g, or t
  misc_feature (3245)..(3245): n is a, c, g, or t
  misc_feature (3258)..(3258): n is a, c, g, or t
  misc_feature (3299)..(3299): n is a, c, g, or t
  misc_feature (3331)..(3331): n is a, c, g, or t
  misc_feature (3355)..(3355): n is a, c, g, or t
  misc_feature (3367)..(3367): n is a, c, g, or t
  misc_feature (3395)..(3395): n is a, c, g, or t
  misc_feature (3401)..(3401): n is a, c, g, or t
  misc_feature (3452)..(3452): n is a, c, g, or t
  misc_feature (3467)..(3467): n is a, c, g, or t
  misc_feature (3483)..(3483): n is a, c, g, or t
  misc_feature (3530)..(3530): n is a, c, g, or t
  misc_feature (3545)..(3545): n is a, c, g, or t
  misc_feature (3576)..(3576): n is a, c, g, or t
  misc_feature (3611)..(3611): n is a, c, g, or t
  misc_feature (3643)..(3643): n is a, c, g, or t
  misc_feature (3653)..(3653): n is a, c, g, or t
  misc_feature (3668)..(3668): n is a, c, g, or t
  misc_feature (3677)..(3677): n is a, c, g, or t
  misc_feature (3692)..(3692): n is a, c, g, or t
  misc_feature (3758)..(3758): n is a, c, g, or t
  misc_feature (3779)..(3779): n is a, c, g, or t
  misc_feature (3806)..(3806): n is a, c, g, or t
  misc_feature (3809)..(3809): n is a, c, g, or t
  misc_feature (3818)..(3818): n is a, c, g, or t
  misc_feature (3833)..(3833): n is a, c, g, or t
  misc_feature (3841)..(3841): n is a, c, g, or t
  misc_feature (3848)..(3848): n is a, c, g, or t
  misc_feature (3851)..(3851): n is a, c, g, or t
  misc_feature (3899)..(3899): n is a, c, g, or t
  misc_feature (3926)..(3926): n is a, c, g, or t
  misc_feature (3985)..(3985): n is a, c, g, or t
nnnnnnnnnnnnnnnnnnnnnnnnnannnnnnnnnnnnnnnnnannnnnnnnnnnnnnanannnnnannnnnnnnnannnnnnannnnnnnannnnnnnannnnnnnnnnnnnnnnnnnnnnnnnnnnnnnnnnnnnnnnnnnnnannnnntnnnnnntnnngnnnnnnaannnnannnnctnntntcnnngcnananannnnnnnnnnntntnngnnnnnncnnnnnnnnnnnnnnnnnnnnnaanaannntnnntnnnnnnnnnnnnnnannnnnnnnnnnnnnnccnnnnnnnccnnnnnnnnnnnnnnggnnnnnnnnnnnnnnnnnttnnnnnngnnnannnnnnnngnnnntnnnnnntnnnnnnntnnnnngnnnnnnnnnnnnanngnnnnncnnntnnnnnnnnnnnnnnnnnnnnnnnnnnnnnncnnnnnnannnnnannnnnnnnnnnnnnnnnnnnnnnnnnnnnncnnnnannnnnnnnnnnnnnnnnnnnnnnnnnnnnngnnnngntnnnnnnnnnnnnnnnnnnnnnnnnnnnnnnnannntnccnnnnnnnnnnnnnnnnnnntnnnnnnnnnnnnnnnnnnnnccnnnnnnnnngnnannnnnnnnnnnnnnnnnnntngnnnnnnnnncnnnnnnnnnnnnnnnnnnnnnnnnnnnnnnnnnnnnnnnngnnnntncnnnnnttnnnnnnnnnnnncnnnnnnnnnnnnnnnnnnnnnnaanancnnannannnnnnnnnnnnnncnnnnnccnggnnttnnggnnaaaannnccnnnnncnnncccnaaaaaaaaannnnnnnnnnngngntnnttnnnncnnttnnnggntnccnnaaannnnnnncnnannnnttnnnnnnncnancnnnnnnnaannncntnanngnnnnnnnccnnnnnncnntnnnnnnnnnngcnctccnnnncntcnntttttnnngcntngnngnnntcgccananngnaggnancnnggccgnnnnncnngcngntnncgnannnnnnggnngggnagnnnnngnnnaannnnnaagnanntnnacnnnnaaaantnnccnnnggnntnggnnnncccnanncngngggcnangnnngnnnnnnnttncccnnnnttnnngnnnntnnnccccccttcaggctccatgcaccaattgcaccactgccaggcgacctccctggctactgtcgaagaggatttgtcggccttcggtgaggggaatgaatgcccctatgggaatgtcgcggccggcggtcacgtcgcgcaaaccgggcaaacggcgattgatgagaatccantgaccgttgtggaagtggaagtcgcccaccggaagtttgtcttctgcacttgttttttcgttgggtacaatcaaattgttcgtatgccaacgataaagggtttgccggtgatagaccatcatgcggtagttctctgaaatntacttgccatgggaaggggcatagtagaaattgagaatcggaagttgaccgacatagggttttccgcaaaacggncaaacaggctttgtcttgttgtcaaacacataccacccgtgttcgcaactgcagggttgcaacaaatcacacgtttttacgagggcttcttcccactctccggcactggggcggagtccgggattgtgcaaaccgtcgatgaacgcgcggttgaacattttggtgaggtaagggccgcacagcgtgtaggggcgttgctncggatcggcttgcggtagttcgcgcggatcgagttgtgccggnttcacacggttggtggcatcggtggggtgctcgataaaaagcgctttttctccatagcgaagatcgtcatcgcgctgaatatcgtcaagatcccaaactttgcctccattgagtggatggcgattgagcaagaaggtgtaaatgagtaccgctaaggcgtgccgatcggtggaaatctgcgggagatttttcttcggatcgccgaggcgcagacnccgcgtagccatcacttcgggggctatgaagccgggagtaccaacgacttcgggggggaacttcttggggacaaccaaaccatcgcaatcgatgatgcaagcattgccgcctacgggatcgaccaagacattgttgtacgacaagtcggaatgcgcaagtcccgcggcatgaaggcgccgcatggcacgggcgatttgcaagcacatgcgcaaacgagtgagaaaggtgcctttttgattggcaggcacgtagcgattgaccagtttggccgccgaaaaccactttccgttcttctcctgtccatttttgatgtaacgccatgtcggatcgactccactgaagaagaatttcttgtcgtagaaaggcatgactaaccccaccttctcgccccacataacaattttggtgggccaggcgaaaagtgtcgtccaatacttcccgacctcatcggtggtgaaaatcagttggcggtgcgtgttcacgatgtcatctatgcgctgccggtcattgggactgagggctttgcgatagaaggccaccacataggtgccatcggtggaaaaatagacatccttgacgccgccggaggctttgatttcgtcatagaactcaacggaactnccgtcagtggctgttagcgttacgatatttgccatggtcgtagggggttaacaatgagcatcaggggaattcgtgacttcgccgtcgcacggactcgaggttggctgcgcgtccgcggtctcggtgngaacgggaacttcaccngccgtggcngaagttgtttcggnttcttttgatgcgacttcagcaacaagttgttcagttgcttgggcagacgtnggttcgccggtctcgacatcgggtttgggcngcttttnctcttcgggagncttctcttcggcagcgggcgcagcgggcgtcgcancatctgnatnttgcnctgcggtcactgatgcttgtggagccaagacttcggntgccggctctttggcaggcgttacctcgctatcggtagncgtgtcgatngntgttntttctgtagaagnggtctcngcggttgttggntcttcgtgaggagccgcgctgtnggngtnnaccgncgacgtttccgcagaagnggcttctgctgttgcaggnncttngagagaggcctccgcgctnccggctttcgagacttcgtcggcgacagcagacgtcttttcgtcggacgacggggcttctttgccgcagagcactgcgatggtgcggtcntcgtaattgcccngcgaccaaaaatcgagccaagacaacaactgattttttgcnacttcttcaccggtagtgagtccgactccttngtgctccaaattctcccagagttngtcccacttttngggattcttcagattgttggtggtttcnaacttngcatcactcacgccatcggacatcaagaagagggcggtgaagtcgtcgacnaacgtgaatcgcagncgcttgtagcaagctnttggatcttggaatatttcgggcatggtgacaaaacgtgtttgtccnccatattctccttcntcgggctcgcccatcagtttaacctcatgcngatcgcggcgatagagggcaatggcgccgtcgccnacccaaaaggtaccgacaaaccaaccaaacgngaaacgcttngtgatgctgagcaanaaagtggcngcataggttcgaggntcgcgctgttgtttcgcagcttctgcttgtatggccttactggcattgaacgctgcagagcaaagnagatgataaagcacttcaccnaccttcgagatgttttcgctctctgantgntgataagcngaaatttgtgcttcnatgttttngagcgtntcngcatcggccagtttcttcaaacagcactcgaccgctgtttcacaagcnaaacgtgagccctcgcgggaataggcngcggagccggcaccgtcagaaacggccatgacgtaccaaccgttctcggcacaatagtncatgcggtaagcgtc

SEQ ID NO: 922 - DNA, 4000 bp, Escherichia coli
  misc_feature (3)..(3): n is a, c, g, or t
  misc_feature (183)..(183): n is a, c, g, or t
  misc_feature (204)..(204): n is a, c, g, or t
  misc_feature (285)..(285): n is a, c, g, or t
  misc_feature (471)..(471): n is a, c, g, or t
  misc_feature (542)..(543): n is a, c, g, or t
  misc_feature (873)..(873): n is a, c, g, or t
  misc_feature (1073)..(1073): n is a, c, g, or t
  misc_feature (1134)..(1134): n is a, c, g, or t
  misc_feature (1317)..(1317): n is a, c, g, or t
  misc_feature (1662)..(1662): n is a, c, g, or t
  misc_feature (1953)..(1953): n is a, c, g, or t
  misc_feature (1985)..(1986): n is a, c, g, or t
  misc_feature (2027)..(2027): n is a, c, g, or t
  misc_feature (2417)..(2417): n is a, c, g, or t
  misc_feature (2477)..(2477): n is a, c, g, or t
  misc_feature (2954)..(2954): n is a, c, g, or t
  misc_feature (3311)..(3311): n is a, c, g, or t
  misc_feature (3385)..(3385): n is a, c, g, or t
  misc_feature (3440)..(3440): n is a, c, g, or t
  misc_feature (3443)..(3443): n is a, c, g, or t
  misc_feature (3467)..(3467): n is a, c, g, or t
  misc_feature (3518)..(3518): n is a, c, g, or t
  misc_feature (3905)..(3905): n is a, c, g, or t
agngctctaaacccaagccattacggtgtagatgaggcttacataataaaaggcgatatagtggaggatgagggtaaagctagggtagatccgctggagggcttgaggatacttgccttcgatacagaggtttacaatccacagaaaacccctgatcctaagagggatccggttatactaatnggtttaatgagctaccctggngatgatgagccgttgatacttgaggctgacgagttcaacgatgctaggttgataagggcttttatcgaggaggttaggagnagggatccagacataatagtgggttacaatcagaataggttcgactggccttacctacttgagagggctaggatacacggtataccattggatgtggggcgtaggaggggtggggttccgcagagtagtgcttacggccacatatcgataccggggaggcttaacgtagacctcctggatttcgcnatggaggttagagaggttaaggttaagagcttagatgaggttgcagactacctaggcgttatgcctaaganngagagggttctactagagtggtggcagataggggagtattggagggatgagagtaagagggggttactgaagaggtaccttagagacgacgttctatcaactatggggctagcacttaaattcctacccttcggagcccagatgagccagattagcggtctcccactagaccaggttatgacagctagtgtaggctacaggcttgaatggaggcttatgagggaggcttacaagaggggggagcttgtaccgaatagggaggagaggggtgaggagagctacgagggggccatagtactagagcctaggcctggaatccatgagaacgtngcggttctcgatttcgcaagcatgtacccaaacataatggttaaatacaatgtaggccccgacacccttgtgagatccggggagctttacagcgatgaggtctacgtggctccagaggttgggcataggtttaggagggaacctccagggttcttcaagagagctctagagagattcctaaggtggaggaaggagataangaaggctatggagtcaactccaaagggtagccctgagtacaggctcctagatgaaaggcanaaggctataaaggttttagctaacgcaagctacggttacatgggctggctctccgctagatggtattgtagggagtgtgctgaagctgtaacagcatggggtaggaatctgataagatcagctatagctaaagcccgagagctagggcttaacgtcatatacggtgatactgatagcctattngttagatacgagcctgagaagcttgataagctagtcgagtatgttgaggaggagctgggtttcgatataaagctagataaaatctacactaaggtcttcttcacagaggctaagaagaggtatgttgggttaacagtagacggtaagatagatgttgtaggcttcgaggctgttagaggggattggagcgatctagctaaggagacacaggctgttgtagctgagatagtgttgaagacagggagtacagctaaggctgtagagtatgtaagggatactataaggaggcttagggaggggaggatggatatggataagctcatcatatggaagactataacgagnaggcttgaagagtataaagctgagcagccgcacgtaacagcagctaggatgatggttaaatcaggtgtaaaggtggaacccggggttaaggtgggatatgttatagttagaggatcaggccctctatacacaagggctaaaccatacttcatggcgtcagtggaggaggtggatgttgaatactatgtagataaacaggttataccagcagcgctaagaatcctagggtacttcggtgtaacagataaacagttgaagggaggaggtgctcagaggagcctcctagactanctatctaaatagaagcccagcgcatcatatgnngtgttcacgttaaatcactgaatgttaaaaccctgaggttnggcggcttataggatatcttactacccatcctagctcctatcaccaggtttacacctttctctgctgagagctctacaagcctttgggttataattccatcgaatactatggcgaaggcgttgccgggctccatgttctggaggcttgtgaatagatctttaaccttaaccctggctatctcattccacgatctatcgtatataaccccttcaagcgtccctttaagcttctcgatctcgctcacaacattccttgggatagctattgttatggtctccgttgggggcgcctgttgtacttccacaggtttaacctcttcaaccttttgaacctgctgttgaacctgctcctctacaggttgctgagcttcagcttcaggtactgttacnggtgttacaggtttaacctccgggggcttctctctagccttaagctccttcatgaaatcngctgctgtaaccatctcgcttaaagccttagctatctccctccccgttaactgctccacctctttatccttaggagctctagccacatagtctactttaatctggttaataacattaactgctattaactccccacctctatctccgtcaacaaataaaactatcttcttcttcgaggccaggttccttatagactcgggcacattctccttggccccttcaagtgcgatcacgttagtgtaaccgtatctaagcaggttgataacatcagctctaccctcaaccactataaccgtatcagaggtctcaacgtcagggcctgccggcaacctctcaggcccatactctatgagtctaggagctctagcaacctccccctcaatctgcctaataacctctttaacatcaggctcgctctcctttatcttcttcaaaatctccttcgctctctctatcacaacctttatcttctcagcnctcaaatcccttatatcctctactataaccctagcggtgtaaggtccaaccctgtcaacggtctctagcatagcagctattatggctgtctcaaccctatcaaggttacatggaacctgtatggagcctaaggtcttgttatcctggtatctaagctcaacctgaactctaccaatcttatccttctcctgtaaatcctctaagtcgaactcagagcctaggaggccctcagtctgaccgaagatagcccctataacatcgtgtctatcaaccctcccgtcaacctcaagcctagccttgataaggtacttcaagcccccacacctcaacgcctaaactctaagcccatgtagagtntctaagctgggctttaaatccctcaattaaactccttgaaaccagagtagcgcgatgtaatgtttttaagctgngggagtaagggttacctctaggtgttaggttattgtatcgagctccaccctaganctnatggttaggaatacagttgaggtnataacattagaggatctaagggaggctgtggagagcggtaggaggctgagngggtacataggctacgagcctagcggcctagttcacgtgggctggcttgtatggatgtttaaggtagcggatctcgttgaagcaggtgtagacttcatagtccttgaggccacatggcacgcttatatcaatgataagcttggaggggatatgggtttaataagggatgccgcctggcttgtaagagagttcatgagggagctcgggctccccgttgacaggattaagtttgttgatgcagaggagctagcatcagatccaagctactgggctctcgttataaatgttgctaagagctcaagcctagctaggattaggagagctttaacaataatgggtaggagggttgatgaggctgagctcgactcatccaagctaatatacccngctatgcaggtagccgacatatactacctagacctagacatagccctgggaggcttagatcagaggaaggcccacatgctagcaagggatttggc

SEQ ID NO: 923 - DNA, 4000 bp, Escherichia coli
  misc_feature (962)..(962): n is a, c, g, or t
  misc_feature (2561)..(2561): n is a, c, g, or t
  misc_feature (2979)..(2979): n is a, c, g, or t
  misc_feature (3772)..(3772): n is a, c, g, or t
  misc_feature (3963)..(3963): n is a, c, g, or t
agcgcacgaatctcaacatccatactgctactttctagagcctgcacaagctgggaaatttctgcgataccgggcagtattaccagcacatctcggctaccctctcgcttcagtgcctccttggtgactcgcaaggcagccctatctaatgattcatgagcctccacaggacagtagcgcgtttccactgaaaattcgcggccactactctcaataacgggggtgtcactacctaacacaccttttaaagcagcgacatccaatgtggcagacatcaccattagccgaagatcatcacggatgctctcttgtacatccagtgctaacgcaagtcctaggtctgcttcaatgcttcgctcatgaaactcatcgaaaataatgcccgccaccccttccaataaaggatcgtcttgcagtatgcgggtaagcacgccttgggtgaccacttccagccgggtattggggcctacattgctatcgccccgcatccggtaacccaccgtttcacctatctgttcgttgagctgtgacgccataaaggtggctgccaagcgagcggcgacacgacgcggctctaccagtaagagacgctgaccttgcgcccaggcgctggagagtaacattagcgggacacgggttgttttaccggcacctggttgagccaccagaataagccgagtgtgttcggctagcatggtttgaatggagcttagatgttgttcaatgggaagcgatatggtcatgaatcagtgcgaggttgcatttgaggaagtaataccgcatcccttcaggataacgtgctcaaggaactgacaaatggaagccaagtcagcctcactcagcgcttcttccccaagaatgccggtcacttgagcgctatattccgtgtagtgctgagtggccgaccaaattagaaagatcagccaacgtggatcaacatcgtccattttaccctgctgggnccactgacgaataatcactgcgcgggaggctacccactcctttagttcgccggcgagatactcttttaagaaaggtgcccccgccaatatctctgcggcaaacagtttggacccctcagggtaacgctgcccaagcatcattttggtgcgaataaaatcactgagtacctgccctgggtcgctatcctcagtaatatcctctagtaccgcattccagcgattcatcatccgatttagcagtcgcacatacagcgcctgcttgctccccatataataaagaatattggcttttggcagcttagcttggtctgcaatcgcctgcaggctagcaccacgataaccatgttgtgaaaacacctgctctgcagcgcttaatatggtttgttcaatacggtccctgctggcattttcttggttcgcggtatcagccgtcattcagtaagctcctttaataaaccttgcagtgtaatcgcgagaaatgtctaccaagcgtgcgtgtcgcatcactgtgcatttcgcagtgcgatgctcactaatagtgcatgtcacatctcatataacaaagtcttgcaagatttgcatttttgtcccaagctcaacgttgttgaccgatcggtcaaaacaatcataacggagtttggcatggcaacaattgagtttttgctcaatggcaccccgacccggtgtcatgtgccctctgacacaagcattctaacgctgctacgcgactatttggggatgaccggcacgaaagagggctgtgcatcgggtgactgcggcgcatgtaccgtcgccattaaaagcgatacagcgcctcattttgtaagcctgaatgcgtgtattacacccgctcaccagttacatggccagcacttgctaaccgtagagggcttggccactgacgaagaacttcacccggcacagcgtgccatggtggagtgccatggcagccagtgcggcttctgcacgcccggcatcgtaatgtcgctatttacgctacattcacaacagcaacagcggccagccccccttacgccagagcggcttgaagcagcactgggcggcaacttgtgccgttgtaccggatatcggcctattcgtgacgcagcgctaagcatgcaggagtcttcttggaaagcaccgcaatgggttgatgccagccaacccgctcatactccacttaccgctcctcaatctgcggaagccaacacggacctttttgctcagcccacgacactgagtcaactaactgaactacgccgacactatccatctgcacgccttgttgccggtgccaccgatctgtggctggaaaatacgcagcgcctggcgttgcttaatcaacttattgatgtcacacgggttgatgagctacgccatattgaagaagccatctttgatgagcagccaggctggtgggtaggcgcaggcgtcacctattcacagctcgaaccactgctagaaacccactatcccgcctttgcacatctacttcatcggctcggctcacagcaggtgcgtaaccgcggcacactgggtggcaatattgccaacgcatcgcccattggcgacaccccgcccgtactgctggcgctcaangcctgggtagaactggctaaccaggatggcagtcgcgcgctgccgctgagcgacttcttcctggattataaaaaaacggcgctggcagcggatgaagtcgtgagtcgaatatttattccacaattggcggacgacgccgtcctgaaagtatggaaactctccaaacggcgtgaagacgacatctctgccgtactaggagccttccattatcgtatcgacgatggcgttatgcaggatgttcgtatcgcctttggcggcatggcggccatccctaagcgagcgctacaaacagaggcagcgttaacagggcagcctatcgcgaaagagagctttcaagcggcacagcgggcgctatcggaagagtttcatcccatgagcgatgtgcgcggtacacaacactatcgtcatcaggtggcanccaacctgctcgaacgcctttatctatcgctctcagtacctaatcaagaggtgatgctccatgcgtacgctcactaagcttgatggcgacagcagccgcgctcgccgcgagctgcatgaccatatccaaggttctggtccactggctcgccatacggtggatagccacgggcaacggcaagccggtgcttccagcttccatgaaagcgcagagaaacatgtcaccggtaaagcaacctatattgatgacattaaaacaccccaagatgccctgtacgtggcgctcggcctttcacctgtcgctcacggcacgctaacgaaactggaacttgatgctgtaagacaggcgcctggcgttgtcgacgtgatcactctccatgatgtaccaggacacacagatattgggccggtattccccggcgaccctatttttgtcgaccaggagatcagttacgcgggacaatgcctatttgcggtggctgccacctctttacaggcagctcgccaagccgtgaagctggccacactgcatatcgacgaacagccggctagcctagatcctgtggccgctgctggacgtcaagaggttgtgcgcccaacccacgtgcaggagcggggcgactggcaaactaccttacagcaagccgaacaaactatagaaggcgagctatttatcggtgggcaggagcacttctatctcgagggccaagcgtgcattgtggtgcctacggaggatgaaggggtgatggttcatacctctaaccagcaccccagtgagacccaaaaattggtgncggaagtgctcggtattccttttcatgcggtcactgtagaagtgcgccgtatgggcggcggctttggcggtaaagagacacaagcatcgccctgggcctgcattgccgccattattgctcggcgtaccggtaaagccacgcgacttcgcctgccacgcagtgaagatatgcgtgccactggaaaacgccancctttccataaccgctatcaattagcgattgatgccc

SEQ ID NO: 924 - DNA, 4000 bp, Escherichia coli
  misc_feature (1)..(3): n is a, c, g, or t
  misc_feature (6)..(14): n is a, c, g, or t
  misc_feature (20)..(21): n is a, c, g, or t
  misc_feature (23)..(29): n is a, c, g, or t
  misc_feature (31)..(36): n is a, c, g, or t
  misc_feature (38)..(41): n is a, c, g, or t
  misc_feature (44)..(49): n is a, c, g, or t
  misc_feature (51)..(57): n is a, c, g, or t
  misc_feature (59)..(62): n is a, c, g, or t
  misc_feature (64)..(66): n is a, c, g, or t
  misc_feature (68)..(69): n is a, c, g, or t
  misc_feature (71)..(71): n is a, c, g, or t
  misc_feature (74)..(75): n is a, c, g, or t
  misc_feature (77)..(79): n is a, c, g, or t
  misc_feature (81)..(82): n is a, c, g, or t
  misc_feature (84)..(86): n is a, c, g, or t
  misc_feature (89)..(95): n is a, c, g, or t
  misc_feature (98)..(98): n is a, c, g, or t
  misc_feature (101)..(102): n is a, c, g, or t
  misc_feature (105)..(105): n is a, c, g, or t
  misc_feature (107)..(107): n is a, c, g, or t
  misc_feature (109)..(109): n is a, c, g, or t
  misc_feature (111)..(111): n is a, c, g, or t
  misc_feature (113)..(113): n is a, c, g, or t
  misc_feature (115)..(120): n is a, c, g, or t
  misc_feature (122)..(122): n is a, c, g, or t
  misc_feature (124)..(126): n is a, c, g, or t
  misc_feature (128)..(132): n is a, c, g, or t
  misc_feature (135)..(141): n is a, c, g, or t
  misc_feature (144)..(147): n is a, c, g, or t
  misc_feature (149)..(150): n is a, c, g, or t
  misc_feature (152)..(154): n is a, c, g, or t
  misc_feature (156)..(157): n is a, c, g, or t
  misc_feature (159)..(164): n is a, c, g, or t
  misc_feature (167)..(168): n is a, c, g, or t
  misc_feature (170)..(176): n is a, c, g, or t
  misc_feature (178)..(183): n is a, c, g, or t
  misc_feature (187)..(188): n is a, c, g, or t
  misc_feature (191)..(193): n is a, c, g, or t
  misc_feature (195)..(195): n is a, c, g, or t
  misc_feature (197)..(200): n is a, c, g, or t
  misc_feature (202)..(207): n is a, c, g, or t
  misc_feature (209)..(210): n is a, c, g, or t
  misc_feature (212)..(218): n is a, c, g, or t
  misc_feature (220)..(222): n is a, c, g, or t
  misc_feature (224)..(225): n is a, c, g, or t
  misc_feature (228)..(228): n is a, c, g, or t
  misc_feature (230)..(232): n is a, c, g, or t
  misc_feature (234)..(236): n is a, c, g, or t
  misc_feature (238)..(240): n is a, c, g, or t
  misc_feature (242)..(242): n is a, c, g, or t
  misc_feature (246)..(248): n is a, c, g, or t
  misc_feature (250)..(252): n is a, c, g, or t
  misc_feature (254)..(256): n is a, c, g, or t
  misc_feature (258)..(260): n is a, c, g, or t
  misc_feature (262)..(262): n is a, c, g, or t
  misc_feature (265)..(267): n is a, c, g, or t
  misc_feature (269)..(274): n is a, c, g, or t
  misc_feature (276)..(277): n is a, c, g, or t
  misc_feature (279)..(279): n is a, c, g, or t
  misc_feature (283)..(286): n is a, c, g, or t
  misc_feature (288)..(288): n is a, c, g, or t
  misc_feature (290)..(298): n is a, c, g, or t
  misc_feature (301)..(305): n is a, c, g, or t
  misc_feature (308)..(309): n is a, c, g, or t
  misc_feature (312)..(313): n is a, c, g, or t
  misc_feature (315)..(323): n is a, c, g, or t
  misc_feature (325)..(334): n is a, c, g, or t
  misc_feature (336)..(336): n is a, c, g, or t
  misc_feature (338)..(340): n is a, c, g, or t
  misc_feature (344)..(344): n is a, c, g, or t
  misc_feature (346)..(346): n is a, c, g, or t
  misc_feature (348)..(352): n is a, c, g, or t
  misc_feature (354)..(354): n is a, c, g, or t
  misc_feature (356)..(359): n is a, c, g, or t
  misc_feature (361)..(363): n is a, c, g, or t
  misc_feature (365)..(365): n is a, c, g, or t
  misc_feature (369)..(370): n is a, c, g, or t
  misc_feature (374)..(374): n is a, c, g, or t
  misc_feature (376)..(376): n is a, c, g, or t
  misc_feature (378)..(380): n is a, c, g, or t
  misc_feature (384)..(385): n is a, c, g, or t
  misc_feature (387)..(388): n is a, c, g, or t
  misc_feature (390)..(396): n is a, c, g, or t
  misc_feature (398)..(400): n is a, c, g, or t
  misc_feature (403)..(408): n is a, c, g, or t
  misc_feature (410)..(411): n is a, c, g, or t
  misc_feature (413)..(413): n is a, c, g, or t
  misc_feature (415)..(418): n is a, c, g, or t
  misc_feature (420)..(423): n is a, c, g, or t
  misc_feature (425)..(429): n is a, c, g, or t
  misc_feature (432)..(433): n is a, c, g, or t
  misc_feature (435)..(437): n is a, c, g, or t
  misc_feature (439)..(441): n is a, c, g, or t
  misc_feature (443)..(445): n is a, c, g, or t
  misc_feature (447)..(449): n is a, c, g, or t
  misc_feature (452)..(456): n is a, c, g, or t
  misc_feature (458)..(464): n is a, c, g, or t
  misc_feature (466)..(475): n is a, c, g, or t
  misc_feature (477)..(478): n is a, c, g, or t
  misc_feature (482)..(482): n is a, c, g, or t
  misc_feature (484)..(484): n is a, c, g, or t
  misc_feature (491)..(491): n is a, c, g, or t
  misc_feature (494)..(496): n is a, c, g, or t
  misc_feature (500)..(502): n is a, c, g, or t
  misc_feature (506)..(506): n is a, c, g, or t
  misc_feature (508)..(508): n is a, c, g, or t
  misc_feature (510)..(511): n is a, c, g, or t
  misc_feature (513)..(514): n is a, c, g, or t
  misc_feature (516)..(521): n is a, c, g, or t
  misc_feature (523)..(526): n is a, c, g, or t
  misc_feature (529)..(529): n is a, c, g, or t
  misc_feature (1987)..(1987): n is a, c, g, or t
  misc_feature (2932)..(2932): n is a, c, g, or t
  misc_feature (2946)..(2946): n is a, c, g, or t
  misc_feature (2953)..(2953): n is a, c, g, or t
  misc_feature (2957)..(2958): n is a, c, g, or t
  misc_feature (2962)..(2964): n is a, c, g, or t
  misc_feature (2970)..(2972): n is a, c, g, or t
  misc_feature (2976)..(2976): n is a, c, g, or t
  misc_feature (2978)..(2979): n is a, c, g, or t
  misc_feature (2983)..(2984): n is a, c, g, or t
  misc_feature (2988)..(2989): n is a, c, g, or t
  misc_feature (2992)..(2992): n is a, c, g, or t
  misc_feature (2995)..(2999): n is a, c, g, or t
  misc_feature (3001)..(3001): n is a, c, g, or t
  misc_feature (3003)..(3004): n is a, c, g, or t
  misc_feature (3006)..(3010): n is a, c, g, or t
  misc_feature (3012)..(3014): n is a, c, g, or t
  misc_feature (3016)..(3016): n is a, c, g, or t
  misc_feature (3019)..(3019): n is a, c, g, or t
  misc_feature (3021)..(3021): n is a, c, g, or t
  misc_feature (3023)..(3025): n is a, c, g, or t
  misc_feature (3028)..(3028): n is a, c, g, or t
  misc_feature (3035)..(3036): n is a, c, g, or t
  misc_feature (3039)..(3039): n is a, c, g, or t
  misc_feature (3041)..(3041): n is a, c, g, or t
  misc_feature (3043)..(3043): n is a, c, g, or t
  misc_feature (3045)..(3045): n is a, c, g, or t
  misc_feature (3053)..(3054): n is a, c, g, or t
  misc_feature (3057)..(3057): n is a, c, g, or t
  misc_feature (3725)..(3725): n is a, c, g, or t
  misc_feature (3742)..(3742): n is a, c, g, or t
nnnatnnnnnnnnnaataannannnnnnntnnnnnnannnntcnnnnnnannnnnnntnnnnannnanngnaannannnannannnacnnnnnnnaanaannaanananananannnnnnanannnannnnnatnnnnnnnatnnnntnnannnannannnnnnatnnannnnnnntnnnnnngatnnatnnntnannnntnnnnnncnntnnnnnnnannnannaanannnannnannnancaannnannnannnannnanaannnannnnnnanntnaatnnnnantnnnnnnnnnatnnnnnttnnttnntnnnnnnnnncnnnnnnnnnntncnnnctancnannnnntncnnnnannnanaaannaaananannnattnntnntnnnnnnnannnatnnnnnntnnantnnnnannnngnnnnnaannannnannnannnannnacnnnnntnnnnnnnannnnnnnnnnanntaantnaattaantannnattnnntttntntnnannannnnnnannnnatntatatatatataactatctttcaatttaattaatattattttttaataatttaatttaatatataatatttataataataattcattaaattatttatatacgtctctcttacatataatatatatatatatatataaatataaagattcaaagaaaaatatatccaaatatacctgtaacatggctttccatgagtaatgatggttggtgttggtttgtaagatttgctgatggttctatagcttggagaacaacaattgtttctttacatacacttttagaaaaacatcatactaaaggaactgtatcaaaagttactttttgtcgtaataatggatgggttgttattttctgtgatggtcaggtggcttttagtgaaattccatattcattagaagcagaattaagtaattatccacgatacatagaagatgtcacgatttctggaagaaaagaatgggtcattagaagaaatatgataattaataataattatgataataagaatcatatgaaatcatattccatacaaagaaatggttattatacttggagtaatggattatcttcctttttacaagataatttaattcatagaaataagaatattaaaaatattgtattatgttctggaacaaaaaaatcttatttcttacagtataataattatcattcagcattccgtcatcattcctctcttacagacgaaattaatgactttaaaccaggaaggaaaccttatcttaatccatttacagtacgttttacaacaagtactgtttctgttcatataaaaactgatactaatgttagagatcttgttcgaggagttcgaaataaatcaatatcttttaatcaattaccagaattaagagtaattcaagatccaagagatggtcgttggtgggctatagataattactggctttgggtattgaaagaagctggtattcgtagagtaacagttaaaatttttccatggacaaaagaattcttaagaggagttcggggtaaatgggatgttacagtattaaatgaagattataaaccctatgactattaaaattaatttaataataataaattgttattaaaaatattaaaatttaacaattttttaaaaactttatattaaaaaatatatatatgtatattttcttttcattagtttcaaaatataatataatttaattattatgattcaaggatttaatattaaataacattaagatgaactaatataaagtttttattcatatatatttcacatattttaaataatatttgtaaatgtatttaaatattttacaatatatatgtatttataatacatacaaattttgaatgaaaaagtagaaagaaaagaaaatattatatatataatctaaaatctctaaaatctattactattaatatatataaatatatatatatatatatatttttttttttttttntttaattttttttcttcttaatattttctaaataaatcaaaaatattatatatatatagatataaaataattttttaaataatattatatatatataatatttttttttaaataattatttttacttatcattaaatattatcttttttttttatccgttttatctttaaataaaaaatttttgatatatatattaataaaagtttaaatataaattatgtattttgttttttttatataatattaaaatgtattacaagtattattattttaaacctttttgaaatatttatatatataataaaccctaatgtttaaaaaaaaaaatatatatatatatataattactttaataattacattattaaaaatttttgtaattataaataaatattatttagtataattatgttgtataaattagatgaaaaagttaataggtataaaagaaatttaatttcaaagagataaataactttaaaatgaaaagaatttcagtatatatattaactaaatttaatcttttacataaagacttatcataccaaaggtctctggatcgatccccgtcagtatcaaatcttcacgatttttccctctagttttttcgtgaaaggataggggttaaatgatactcaggtaggtatgttttctatatttctaacactttaagaatcccattgcgtaagccttgtctgagaggattacagtgtccagctcctctgggatggcaaggaggtgacctatagggttctgctttcccgcgaggatcatgtagagtacttctatactggagtttcttttgcgagcgtcgacgccgtaccggtttggcagttaatcatacatccatatcaacatatgggggagatataagtcttcaatctataaaaaaaaaatcttttatataaataaaaaaagatataagaaaattaattaaaatatgantaaaataggtaaanaaaaaanaaannaaannnagattnnntttnannttannttannttntcnnnnntnanntnnnnntnnnantanantnnnttnattattnnatnananantatataanntantataataatgtattaataatgtaatatggataattcaacaaaacaaaataattaaattagaattaaaaaaaaagcaactaaaattaattaaatattatatggaatataatatatgaacatataataaattattttttatatgaattttatatttcattaatatattataattttgatatgttaaataataaataaaaactataataaataataatttaatattaaattgtttttatttaaattttaataataatattaatttttaaattttattatattatatttttattttttaattcttttattttttttctttattttaaataatattattttatttaaataatattgtttatttagtttaaaatttaatacaaagaagaagaaaaaataaggtatatatttgaaaagcgaacataaaatttttaattatgatcgtaaaatattaagttcataaacttttaataattgatcatgtataaagaaaagaaaacttttttaaatattataaatcaaataaaataaaataaagaaaaaaaggaaatttgaatgtgttaaattatatatatatatatatatatatatttataaaaaaaagaaaaaaattgtttttatagtaatatatagattcaaattatatatatatatatgaaaaaaaaaatattttnttaaaaatatataattntttttagaaatagaagttaatatataaaataaaagaaattttataaaatattaacattacaaaatatatatactaaacttacatatatataatattattattattatttttttttttaatttttatacatatatattttatttaaaaaattataatataactaaaatgttgaaactgaaaaatttgttttatgacattttaattactcttcattcaataattattacaaaaaaatactattaacaatataatataaaa

SEQ ID NO: 925 - DNA, 4000 bp, Escherichia coli
  misc_feature (407)..(407): n is a, c, g, or t
  misc_feature (731)..(731): n is a, c, g, or t
  misc_feature (1598)..(1598): n is a, c, g, or t
  misc_feature (1601)..(1601): n is a, c, g, or t
  misc_feature (1610)..(1610): n is a, c, g, or t
  misc_feature (1613)..(1614): n is a, c, g, or t
  misc_feature (1616)..(1616): n is a, c, g, or t
  misc_feature (1624)..(1624): n is a, c, g, or t
  misc_feature (1628)..(1628): n is a, c, g, or t
  misc_feature (1762)..(1762): n is a, c, g, or t
  misc_feature (1924)..(1924): n is a, c, g, or t
  misc_feature (3351)..(3351): n is a, c, g, or t
  misc_feature (3367)..(3367): n is a, c, g, or t
  misc_feature (3424)..(3424): n is a, c, g, or t
  misc_feature (3580)..(3580): n is a, c, g, or t
  misc_feature (3651)..(3651): n is a, c, g, or t
  misc_feature (3706)..(3706): n is a, c, g, or t
  misc_feature (3746)..(3746): n is a, c, g, or t
  misc_feature (3754)..(3754): n is a, c, g, or t
  misc_feature (3929)..(3929): n is a, c, g, or t
acgcgcgctcgcacggcaacatgtgggcgacggtctccaccgcgcacgacctccgcgacggcaagatcgggggtgaggcggcccgccagcgagcgaccgacaccggtgagcgctacgacctcatcgtggcgggtggcgggatttccgggcttggcgccgccgcgttcttccagaagctcaagggcggcaaggtgctcgttctcgataaccacccgatggtgggaggcgaagccaagcgaaacgagttcaacgtcgatggcgtgcgcctcatcgggccgcagggctcgaacgacttcggcacgagactgccgcccggatgggccggtgactactggaaggacatcgggcttccgtacggcaatgatgcattcgagcaccaggcatgggccgcgggggtcacgccgctngagatcccgcgcgagcactactacttccagctgtggggcgacgagttcgcgagccatggcttcttcttcaaggagcctaacggttcgctgcgcctcgtccgcgacgcgttcggcgcgggattcaacgagacgccatggtccgagaagctgcgcgccgacttcacgaagtggcgatcgtcgccgaaggtctatgagggaaacgacctcgcgcggtggctcgacagcatgacgtacgaggatctgctcgtcaaacagctgggcctcgacccggcggtggctcgttatgcggacccgattctcgccggcgccgccggcgggctcggnagcgacgtcatatccgcccagtgtgccggccagatcggacttcccggtaccgggaacggacagaccttgcgcattccttcccacaagctcgccgacacgctcggcttcatctcgtcattccccggcgggaacgacggtatcatgcgccacgtgctcaaaaagctcgtgcctgacgcgatcgacgggcagggcttcgctggcgtgttgaacggccccgttcgattcgagaggctcgaccgcccagccaaccccacgcgaatccggctcggcgccaccgtcgtacgggtaacgaacctgcctaacggctcggtcgaggtcgtgtaccaccagggtggcgggttgcacaaaacgaccgccggcagcgttgtcatggccaacggcgcgtggacgtcgcagtacatcgtggccgatgtccccgaatcccatcgggccgcgtttaccgatttcgtccgcgcgccgatgctcgtcgtgaacgtcgcgctcaagcgctggcgcttcatgtacgatctcgggctcacggcggcgagctatcgcgacctgtttggattctcgtgcaacatccgccaatcgatggtcgtcggcgactaccggccaacgctccaccccgacaagccgacgatcctcacgttctacattccgttcgaacggcccggcacaccgatcaagacgcaggcggccgcggcccgcacggagatgctcggcaccagttaccgcgactacgagcgcaggatccgcgagcaactcgtcaggctgttcggtcgcgccggcttcgacccgcgccaggacatcgcgggcatcatcctgaaccgttggggccacgcgtacgtttgcccggcgccggggttctactacggacgtgacgggaanccngcggcaccnganntncttcgccngccnatcgggcgggtagcgttcgcgaactcggagctcaacggtcaccagaactggcgggatgcgaccgcggaggggaagcgcgcggtggagcaattgctcgcctgagctaggtggacaagagtgttgtcgcaaacgantacgtcaaagacctgacacggatgaaccacgatcaccacgatgacgcggatttgttccgaaaccatccgaccatcgcggcgccggaaatcagttcgttggttttctgacaacgcaaccgagtggctgccgggcgtctggaatcgtcagcgtcagcggagccnatccgtgccatcgtcgtgatcgtggttcatccgcgttaggtcttggcggttttgccaccgccggtttggctcggtcaggagatgtcgacagctggcgaggggcgcgatatggcagagtcgccattcgcgcgcgggggaaccaacgcgtatgatgtgagggttgcgtttcctgaaccgaggcctgccatgaaagcgtacctcattaccacagggacggttttcacgctcgtcaccgcagcgcatgtctggcgtgctatcgcggagtccaccgcgctggcgcgagatccctggttcatcctgctcaccgtgttcgcggccgcgctctccgtgtgggcgtggcggttgctgcgagtggcaacgcggtcctgagggtccgctcgccgaggtcgcgttatggagatactgctgatctcgctcggagtggtcggagcctacgtcctctcgagcttgcgcgtactcaaccagtacgagcgcggcgtcatgttcttcctggggaagtacacgggaacgaaagggcccgggctcatcttcgtgccgaccatcctgtcgcgcatgaagcgcgtgtcgatgcgcgtcgtcgcgatcgacatcccggcgcaggaagtcatcacgcgcgacaacatctcggtcaccgtgaacgcggtgctctacttccgcgtttccgaccccgggctcgccatcctggagatacaggactacctctacgccaccggccagctcgcgcagacgacgctgctctcggtgctcgggcaagtagagctggacgagctgctcgctgaccggcgcaaggtgaacgagctgctcaggcagatcatcgacgagcgcacggacttctggggtgtcgagatctccgccgtcgagatcaaggatgtgcagcttccggaaacgatgcggcgcgcgatagcgcggcaagcagaagccgagcgcgagcggcgcgcgaaggtgatcaacgcgcagggcgagttgcaggcgtccgagacgctggccgaagccgcgcgcgtgatgtcgactcagcccgcgtcgctgcagctgcgctatctgcagacggtcaccgagatcgcgaccgagaacaactcgaccacgatctttccggtgccgatcgacatgctgagcgcgttcttcaagcgggctcccgacgcgtcggcgcccgccgcggcgaacaccgagcgaaacaagccggccgttgcatccgagcccgcgccaccactgcttccgcccgcagacccggctgaggcactgccgcagatccgaatcgactcgtcccgacaacccgccgagtgatcgggcgcacgcgcctaacgtgcgctccgtcgcagccgctcggtgtcgaataacccggtgacgtgggggagcattaaacactcttaaaccaggcggccgtttgtcgccgaacgcgcgcgagtcaccgcgcggcgactccaattcgnttgctgtggatcatcngacaatcggaccgcgcgaaccagcgcggcccccaaccttacttcagcctccgccgcncgctgccggagcggagacccgtgtacgacctgttcggcccattcggttcacgccatcccgaaccgagccgatcccgcctccctcgcacgccgaacgcgcgtcggccgagcgagagccacaactgattgcgcgagtcgcggcgtggatcgcgatcgngatcgggtggacgatcttcgtctcctggtgggccatcgtccttcgccaggagactgcgcgctcgctcggcntcgcgtttggcttacttaccgcagcgctggccgtatgcgtggtcgcgatgctggnatggacgagctacaacattcggctcgcgaggaaggccacncgccgccnatcgaatcgcccggtcgtgatacgctgggagcgtgacacgctcggtcgccggctcgagctgccggcgggcgacgtcgcgtggacggcgccggaggtccgtgtcgtactgaaggatggcgtcaaggcgtacatcgccgtcgacccggaggagctgtgatgacgttcgatctctctncggccgtcgacgtttttcgcgccatctcggactcggtgccgtatcgcgctgcgctcgtcttctacggcgca

SEQ ID NO: 926 - DNA, 4000 bp, Escherichia coli
  misc_feature (30)..(30): n is a, c, g, or t
  misc_feature (261)..(261): n is a, c, g, or t
  misc_feature (508)..(508): n is a, c, g, or t
  misc_feature (589)..(589): n is a, c, g, or t
  misc_feature (592)..(592): n is a, c, g, or t
  misc_feature (717)..(717): n is a, c, g, or t
  misc_feature (1283)..(1283): n is a, c, g, or t
  misc_feature (1989)..(1989): n is a, c, g, or t
  misc_feature (2462)..(2463): n is a, c, g, or t
  misc_feature (2465)..(2465): n is a, c, g, or t
  misc_feature (2468)..(2468): n is a, c, g, or t
  misc_feature (2470)..(2470): n is a, c, g, or t
  misc_feature (2474)..(2474): n is a, c, g, or t
  misc_feature (2482)..(2484): n is a, c, g, or t
  misc_feature (2488)..(2488): n is a, c, g, or t
  misc_feature (2490)..(2490): n is a, c, g, or t
  misc_feature (2492)..(2493): n is a, c, g, or t
  misc_feature (2495)..(2499): n is a, c, g, or t
  misc_feature (2502)..(2503): n is a, c, g, or t
  misc_feature (2505)..(2505): n is a, c, g, or t
  misc_feature (2508)..(2510): n is a, c, g, or t
  misc_feature (2516)..(2516): n is a, c, g, or t
  misc_feature (2518)..(2519): n is a, c, g, or t
  misc_feature (2523)..(2524): n is a, c, g, or t
  misc_feature (2526)..(2527): n is a, c, g, or t
  misc_feature (2530)..(2530): n is a, c, g, or t
  misc_feature (2535)..(2535): n is a, c, g, or t
  misc_feature (2538)..(2538): n is a, c, g, or t
  misc_feature (2540)..(2540): n is a, c, g, or t
  misc_feature (2542)..(2547): n is a, c, g, or t
  misc_feature (2550)..(2551): n is a, c, g, or t
  misc_feature (2553)..(2553): n is a, c, g, or t
  misc_feature (2557)..(2558): n is a, c, g, or t
  misc_feature (2560)..(2560): n is a, c, g, or t
  misc_feature (2562)..(2562): n is a, c, g, or t
  misc_feature (2564)..(2565): n is a, c, g, or t
  misc_feature (2568)..(2569): n is a, c, g, or t
  misc_feature (2571)..(2571): n is a, c, g, or t
  misc_feature (2574)..(2575): n is a, c, g, or t
  misc_feature (2578)..(2578): n is a, c, g, or t
  misc_feature (2580)..(2581): n is a, c, g, or t
  misc_feature (2584)..(2584): n is a, c, g, or t
  misc_feature (2586)..(2586): n is a, c, g, or t
  misc_feature (2588)..(2588): n is a, c, g, or t
  misc_feature (2590)..(2590): n is a, c, g, or t
  misc_feature (2592)..(2593): n is a, c, g, or t
  misc_feature (2595)..(2598): n is a, c, g, or t
  misc_feature (2602)..(2602): n is a, c, g, or t
  misc_feature (2604)..(2606): n is a, c, g, or t
  misc_feature (2610)..(2610): n is a, c, g, or t
  misc_feature (2612)..(2614): n is a, c, g, or t
  misc_feature (2618)..(2618): n is a, c, g, or t
  misc_feature (2620)..(2621): n is a, c, g, or t
  misc_feature (2623)..(2623): n is a, c, g, or t
  misc_feature (2625)..(2626): n is a, c, g, or t
  misc_feature (2628)..(2628): n is a, c, g, or t
  misc_feature (2631)..(2632): n is a, c, g, or t
  misc_feature (2634)..(2635): n is a, c, g, or t
  misc_feature (2637)..(2637): n is a, c, g, or t
  misc_feature (2639)..(2639): n is a, c, g, or t
  misc_feature (2643)..(2644): n is a, c, g, or t
  misc_feature (2652)..(2652): n is a, c, g, or t
  misc_feature (2655)..(2657): n is a, c, g, or t
  misc_feature (2659)..(2662): n is a, c, g, or t
  misc_feature (2666)..(2666): n is a, c, g, or t
  misc_feature (2668)..(2668): n is a, c, g, or t
  misc_feature (2671)..(2672): n is a, c, g, or t
  misc_feature (2674)..(2674): n is a, c, g, or t
  misc_feature (2677)..(2677): n is a, c, g, or t
  misc_feature (2680)..(2680): n is a, c, g, or t
  misc_feature (2682)..(2682): n is a, c, g, or t
  misc_feature (2684)..(2684): n is a, c, g, or t
  misc_feature (2686)..(2688): n is a, c, g, or t
  misc_feature (2690)..(2691): n is a, c, g, or t
  misc_feature (2695)..(2695): n is a, c, g, or t
  misc_feature (2698)..(2698): n is a, c, g, or t
  misc_feature (2700)..(2703): n is a, c, g, or t
  misc_feature (2705)..(2705): n is a, c, g, or t
  misc_feature (2710)..(2710): n is a, c, g, or t
  misc_feature (2712)..(2712): n is a, c, g, or t
  misc_feature (2715)..(2717): n is a, c, g, or t
  misc_feature (2721)..(2721): n is a, c, g, or t
  misc_feature (2725)..(2730): n is a, c, g, or t
  misc_feature (2738)..(2739): n is a, c, g, or t
  misc_feature (2741)..(2741): n is a, c, g, or t
  misc_feature (2743)..(2744): n is a, c, g, or t
  misc_feature (2746)..(2746): n is a, c, g, or t
  misc_feature (2748)..(2748): n is a, c, g, or t
  misc_feature (2751)..(2753): n is a, c, g, or t
  misc_feature (2756)..(2756): n is a, c, g, or t
  misc_feature (2764)..(2766): n is a, c, g, or t
  misc_feature (2769)..(2770): n is a, c, g, or t
  misc_feature (2773)..(2775): n is a, c, g, or t
  misc_feature (2779)..(2780): n is a, c, g, or t
  misc_feature (2783)..(2785): n is a, c, g, or t
  misc_feature (2794)..(2794): n is a, c, g, or t
  misc_feature (2796)..(2797): n is a, c, g, or t
  misc_feature (2800)..(2800): n is a, c, g, or t
  misc_feature (2803)..(2804): n is a, c, g, or t
  misc_feature (2807)..(2808): n is a, c, g, or t
  misc_feature (2810)..(2813): n is a, c, g, or t
  misc_feature (2816)..(2818): n is a, c, g, or t
  misc_feature (2823)..(2825): n is a, c, g, or t
  misc_feature (2827)..(2827): n is a, c, g, or t
  misc_feature (2829)..(2829): n is a, c, g, or t
  misc_feature (2832)..(2833): n is a, c, g, or t
  misc_feature (2836)..(2836): n is a, c, g, or t
  misc_feature (2838)..(2839): n is a, c, g, or t
  misc_feature (2842)..(2842): n is a, c, g, or t
  misc_feature (2845)..(2848): n is a, c, g, or t
  misc_feature (2850)..(2851): n is a, c, g, or t
  misc_feature (2853)..(2853): n is a, c, g, or t
  misc_feature (2855)..(2859): n is a, c, g, or t
  misc_feature (2862)..(2862): n is a, c, g, or t
  misc_feature (2864)..(2866): n is a, c, g, or t
  misc_feature (2868)..(2874): n is a, c, g, or t
  misc_feature (2879)..(2880): n is a, c, g, or t
  misc_feature (2883)..(2883): n is a, c, g, or t
  misc_feature (2885)..(2885): n is a, c, g, or t
  misc_feature (2887)..(2887): n is a, c, g, or t
  misc_feature (2889)..(2891): n is a, c, g, or t
  misc_feature (2893)..(2893): n is a, c, g, or t
  misc_feature (2895)..(2899): n is a, c, g, or t
  misc_feature (2901)..(2901): n is a, c, g, or t
  misc_feature (2906)..(2906): n is a, c, g, or t
  misc_feature (2908)..(2908): n is a, c, g, or t
  misc_feature (2910)..(2910): n is a, c, g, or t
  misc_feature (2915)..(2917): n is a, c, g, or t
  misc_feature (2919)..(2919): n is a, c, g, or t
  misc_feature (2921)..(2921): n is a, c, g, or t
  misc_feature (2923)..(2928): n is a, c, g, or t
  misc_feature (2932)..(2936): n is a, c, g, or t
  misc_feature (2938)..(2939): n is a, c, g, or t
  misc_feature (2941)..(2941): n is a, c, g, or t
  misc_feature (2943)..(2944): n is a, c, g, or t
  misc_feature (2947)..(2947): n is a, c, g, or t
  misc_feature (2950)..(2955): n is a, c, g, or t
  misc_feature (2957)..(2958): n is a, c, g, or t
  misc_feature (2960)..(2964): n is a, c, g, or t
  misc_feature (2970)..(2970): n is a, c, g, or t
  misc_feature (2974)..(2974): n is a, c, g, or t
  misc_feature (2979)..(2979): n is a, c, g, or t
  misc_feature (2981)..(2982): n is a, c, g, or t
  misc_feature (2985)..(2986): n is a, c, g, or t
  misc_feature (2988)..(2988): n is a, c, g, or t
  misc_feature (2990)..(2993): n is a, c, g, or t
  misc_feature (2996)..(2996): n is a, c, g, or t
  misc_feature (3008)..(3009): n is a, c, g, or t
  misc_feature (3011)..(3011): n is a, c, g, or t
  misc_feature (3014)..(3014): n is a, c, g, or t
  misc_feature (3016)..(3017): n is a, c, g, or t
  misc_feature (3019)..(3019): n is a, c, g, or t
  misc_feature (3021)..(3022): n is a, c, g, or t
  misc_feature (3024)..(3025): n is a, c, g, or t
  misc_feature (3029)..(3029): n is a, c, g, or t
  misc_feature (3036)..(3037): n is a, c, g, or t
  misc_feature (3039)..(3039): n is a, c, g, or t
  misc_feature (3041)..(3041): n is a, c, g, or t
  misc_feature (3043)..(3046): n is a, c, g, or t
  misc_feature (3049)..(3049): n is a, c, g, or t
  misc_feature (3053)..(3053): n is a, c, g, or t
  misc_feature (3055)..(3059): n is a, c, g, or t
  misc_feature (3062)..(3062): n is a, c, g, or t
  misc_feature (3067)..(3068): n is a, c, g, or t
  misc_feature (3071)..(3071): n is a, c, g, or t
  misc_feature (3073)..(3077): n is a, c, g, or t
  misc_feature (3079)..(3079): n is a, c, g, or t
  misc_feature (3083)..(3083): n is a, c, g, or t
  misc_feature (3085)..(3089): n is a, c, g, or t
  misc_feature (3096)..(3096): n is a, c, g, or t
  misc_feature (3098)..(3099): n is a, c, g, or t
  misc_feature (3105)..(3106): n is a, c, g, or t
  misc_feature (3109)..(3109): n is a, c, g, or t
  misc_feature (3111)..(3111): n is a, c, g, or t
  misc_feature (3113)..(3116): n is a, c, g, or t
  misc_feature (3118)..(3119): n is a, c, g, or t
  misc_feature (3121)..(3122): n is a, c, g, or t
  misc_feature (3126)..(3126): n is a, c, g, or t
  misc_feature (3128)..(3129): n is a, c, g, or t
  misc_feature (3132)..(3132): n is a, c, g, or t
  misc_feature (3134)..(3134): n is a, c, g, or t
  misc_feature (3136)..(3137): n is a, c, g, or t
  misc_feature (3140)..(3142): n is a, c, g, or t
  misc_feature (3147)..(3154): n is a, c, g, or t
  misc_feature (3158)..(3159): n is a, c, g, or t
  misc_feature (3162)..(3163): n is a, c, g, or t
  misc_feature (3165)..(3165): n is a, c, g, or t
  misc_feature (3167)..(3168): n is a, c, g, or t
  misc_feature (3170)..(3171): n is a, c, g, or t
  misc_feature (3174)..(3174): n is a, c, g, or t
  misc_feature (3180)..(3183): n is a, c, g, or t
  misc_feature (3186)..(3187): n is a, c, g, or t
  misc_feature (3189)..(3189): n is a, c, g, or t
  misc_feature (3191)..(3192): n is a, c, g, or t
  misc_feature (3194)..(3194): n is a, c, g, or t
  misc_feature (3196)..(3201): n is a, c, g, or t
  misc_feature (3203)..(3203): n is a, c, g, or t
  misc_feature (3206)..(3206): n is a, c, g, or t
  misc_feature (3210)..(3210): n is a, c, g, or t
  misc_feature (3212)..(3212): n is a, c, g, or t
  misc_feature (3214)..(3215): n is a, c, g, or t
  misc_feature (3219)..(3221): n is a, c, g, or t
  misc_feature (3223)..(3224): n is a, c, g, or t
  misc_feature (3226)..(3227): n is a, c, g, or t
  misc_feature (3229)..(3229): n is a, c, g, or t
  misc_feature (3231)..(3232): n is a, c, g, or t
  misc_feature (3234)..(3236): n is a, c, g, or t
  misc_feature (3242)..(3242): n is a, c, g, or t
  misc_feature (3245)..(3245): n is a, c, g, or t
  misc_feature (3247)..(3247): n is a, c, g, or t
  misc_feature (3251)..(3252): n is a, c, g, or t
  misc_feature (3256)..(3258): n is a, c, g, or t
  misc_feature (3262)..(3262): n is a, c, g, or t
  misc_feature (3265)..(3266): n is a, c, g, or t
  misc_feature (3271)..(3271): n is a, c, g, or t
  misc_feature (3273)..(3274): n is a, c, g, or t
  misc_feature (3278)..(3280): n is a, c, g, or t
  misc_feature (3282)..(3282): n is a, c, g, or t
  misc_feature (3285)..(3285): n is a, c, g, or t
  misc_feature (3287)..(3287): n is a, c, g, or t
  misc_feature (3289)..(3291): n is a, c, g, or t
  misc_feature (3294)..(3295): n is a, c, g, or t
  misc_feature (3297)..(3299): n is a, c, g, or t
  misc_feature (3302)..(3302): n is a, c, g, or t
  misc_feature (3304)..(3305): n is a, c, g, or t
  misc_feature (3307)..(3308): n is a, c, g, or t
  misc_feature (3311)..(3312): n is a, c, g, or t
  misc_feature (3315)..(3317): n is a, c, g, or t
  misc_feature (3319)..(3319): n is a, c, g, or t
  misc_feature (3321)..(3328): n is a, c, g, or t
  misc_feature (3331)..(3334): n is a, c, g, or t
  misc_feature (3336)..(3336): n is a, c, g, or t
  misc_feature (3343)..(3343): n is a, c, g, or t
  misc_feature (3347)..(3347): n is a, c, g, or t
  misc_feature (3351)..(3353): n is a, c, g, or t
  misc_feature (3357)..(3357): n is a, c, g, or t
  misc_feature (3359)..(3359): n is a, c, g, or t
  misc_feature (3361)..(3362): n is a, c, g, or t
  misc_feature (3368)..(3369): n is a, c, g, or t
  misc_feature (3372)..(3373): n is a, c, g, or t
  misc_feature (3376)..(3377): n is a, c, g, or t
  misc_feature (3379)..(3379): n is a, c, g, or t
  misc_feature (3381)..(3381): n is a, c, g, or t
  misc_feature (3383)..(3384): n is a, c, g, or t
  misc_feature (3387)..(3387): n is a, c, g, or t
  misc_feature (3390)..(3391): n is a, c, g, or t
  misc_feature (3393)..(3393): n is a, c, g, or t
  misc_feature (3395)..(3396): n is a, c, g, or t
  misc_feature (3398)..(3398): n is a, c, g, or t
  misc_feature (3400)..(3400): n is a, c, g, or t
  misc_feature (3403)..(3404): n is a, c, g, or t
  misc_feature (3408)..(3408): n is a, c, g, or t
  misc_feature (3410)..(3410): n is a, c, g, or t
  misc_feature (3412)..(3413): n is a, c, g, or t
  misc_feature (3416)..(3416): n is a, c, g, or t
  misc_feature (3418)..(3418): n is a, c, g, or t
  misc_feature (3422)..(3422): n is a, c, g, or t
  misc_feature (3424)..(3424): n is a, c, g, or t
  misc_feature (3426)..(3427): n is a, c, g, or t
  misc_feature (3430)..(3434): n is a, c, g, or t
  misc_feature (3436)..(3437): n is a, c, g, or t
  misc_feature (3439)..(3442): n is a, c, g, or t
  misc_feature (3445)..(3445): n is a, c, g, or t
  misc_feature (3448)..(3452): n is a, c, g, or t
  misc_feature (3454)..(3455): n is a, c, g, or t
  misc_feature (3457)..(3458): n is a, c, g, or t
  misc_feature (3461)..(3461): n is a, c, g, or t
  misc_feature (3463)..(3464): n is a, c, g, or t
  misc_feature (3466)..(3467): n is a, c, g, or t
  misc_feature (3469)..(3470): n is a, c, g, or t
  misc_feature (3472)..(3472): n is a, c, g, or t
  misc_feature (3475)..(3476): n is a, c, g, or t
  misc_feature (3479)..(3481): n is a, c, g, or t
  misc_feature (3484)..(3485): n is a, c, g, or t
  misc_feature (3487)..(3488): n is a, c, g, or t
  misc_feature (3490)..(3491): n is a, c, g, or t
  misc_feature (3493)..(3494): n is a, c, g, or t
  misc_feature (3496)..(3497): n is a, c, g, or t
  misc_feature (3499)..(3500): n is a, c, g, or t
  misc_feature (3502)..(3503): n is a, c, g, or t
  misc_feature (3505)..(3508): n is a, c, g, or t
  misc_feature (3510)..(3512): n is a, c, g, or t
  misc_feature (3515)..(3515): n is a, c, g, or t
  misc_feature (3517)..(3517): n is a, c, g, or t
  misc_feature (3519)..(3521): n is a, c, g, or t
  misc_feature (3524)..(3527): n is a, c, g, or t
  misc_feature (3529)..(3530): n is a, c, g, or t
  misc_feature (3533)..(3536): n is a, c, g, or t
  misc_feature (3538)..(3544): n is a, c, g, or t
  misc_feature (3547)..(3548): n is a, c, g, or t
  misc_feature (3552)..(3555): n is a, c, g, or t
  misc_feature (3557)..(3558): n is a, c, g, or t
  misc_feature (3560)..(3567): n is a, c, g, or t
  misc_feature (3569)..(3572): n is a, c, g, or t
  misc_feature (3574)..(3583): n is a, c, g, or t
  misc_feature (3586)..(3587): n is a, c, g, or t
  misc_feature (3589)..(3591): n is a, c, g, or t
  misc_feature (3596)..(3599): n is a, c, g, or t
  misc_feature (3604)..(3605): n is a, c, g, or t
  misc_feature (3608)..(3608): n is a, c, g, or t
  misc_feature (3614)..(3618): n is a, c, g, or t
  misc_feature (3620)..(3620): n is a, c, g, or t
  misc_feature (3624)..(3626): n is a, c, g, or t
  misc_feature (3631)..(3633): n is a, c, g, or t
  misc_feature (3635)..(3638): n is a, c, g, or t
  misc_feature (3644)..(3649): n is a, c, g, or t
  misc_feature (3651)..(3656): n is a, c, g, or t
  misc_feature (3658)..(3660): n is a, c, g, or t
  misc_feature (3662)..(3666): n is a, c, g, or t
  misc_feature (3669)..(3672): n is a, c, g, or t
  misc_feature (3677)..(3682): n is a, c, g, or t
  misc_feature (3685)..(3686): n is a, c, g, or t
  misc_feature (3688)..(3688): n is a, c, g, or t
  misc_feature (3693)..(3695): n is a, c, g, or t
  misc_feature (3699)..(3701): n is a, c, g, or t
  misc_feature (3704)..(3707): n is a, c, g, or t
  misc_feature (3711)..(3713): n is a, c, g, or t
  misc_feature (3716)..(3716): n is a, c, g, or t
  misc_feature (3718)..(3719): n is a, c, g, or t
  misc_feature (3726)..(3730): n is a, c, g, or t
  misc_feature (3732)..(3732): n is a, c, g, or t
  misc_feature (3734)..(3736): n is a, c, g, or t
  misc_feature (3738)..(3738): n is a, c, g, or t
  misc_feature (3742)..(3746): n is a, c, g, or t
  misc_feature (3748)..(3750): n is a, c, g, or t
  misc_feature (3752)..(3765): n is a, c, g, or t
  misc_feature (3767)..(3780): n is a, c, g, or t
  misc_feature (3782)..(3782): n is a, c, g, or t
  misc_feature (3784)..(3785): n is a, c, g, or t
  misc_feature (3788)..(3790): n is a, c, g, or t
  misc_feature (3793)..(3801): n is a, c, g, or t
  misc_feature (3806)..(3807): n is a, c, g, or t
  misc_feature (3809)..(3809): n is a, c, g, or t
  misc_feature (3812)..(3813): n is a, c, g, or t
  misc_feature (3816)..(3817): n is a, c, g, or t
  misc_feature (3820)..(3820): n is a, c, g, or t
  misc_feature (3823)..(3825): n is a, c, g, or t
  misc_feature (3827)..(3827): n is a, c, g, or t
  misc_feature (3830)..(3830): n is a, c, g, or t
  misc_feature (3833)..(3837): n is a, c, g, or t
  misc_feature (3839)..(3846): n is a, c, g, or t
  misc_feature (3848)..(3851): n is a, c, g, or t
  misc_feature (3853)..(3857): n is a, c, g, or t
  misc_feature (3859)..(3865): n is a, c, g, or t
  misc_feature (3867)..(3867): n is a, c, g, or t
  misc_feature (3869)..(3871): n is a, c, g, or t
  misc_feature (3874)..(3881): n is a, c, g, or t
  misc_feature (3883)..(3884): n is a, c, g, or t
  misc_feature (3886)..(3892): n is a, c, g, or t
  misc_feature (3894)..(3896): n is a, c, g, or t
  misc_feature (3898)..(3900): n is a, c, g, or t
  misc_feature (3904)..(3904): n is a, c, g, or t
  misc_feature (3906)..(3909): n is a, c, g, or t
  misc_feature (3911)..(3912): n is a, c, g, or t
  misc_feature (3914)..(3914): n is a, c, g, or t
  misc_feature (3918)..(3920): n is a, c, g, or t
  misc_feature (3922)..(3922): n is a, c, g, or t
  misc_feature (3924)..(3925): n is a, c, g, or t
  misc_feature (3928)..(3929): n is a, c, g, or t
  misc_feature (3931)..(3932): n is a, c, g, or t
  misc_feature (3934)..(3935): n is a, c, g, or t
  misc_feature (3938)..(3941): n is a, c, g, or t
  misc_feature (3943)..(3943): n is a, c, g, or t
  misc_feature (3945)..(3945): n is a, c, g, or t
  misc_feature (3947)..(3953): n is a, c, g, or t
  misc_feature (3955)..(3957): n is a, c, g, or t
  misc_feature (3959)..(3959): n is a, c, g, or t
  misc_feature (3961)..(3961): n is a, c, g, or t
  misc_feature (3963)..(3964): n is a, c, g, or t
  misc_feature (3967)..(3967): n is a, c, g, or t
  misc_feature (3969)..(3969): n is a, c, g, or t
  misc_feature (3971)..(3974): n is a, c, g, or t
  misc_feature (3977)..(3979): n is a, c, g, or t
  misc_feature (3982)..(3982): n is a, c, g, or t
  misc_feature (3986)..(3986): n is a, c, g, or t
  misc_feature (3989)..(3989): n is a, c, g, or t
  misc_feature (3997)..(3997): n is a, c, g, or t
  misc_feature (3999)..(3999): n is a, c, g, or t
gtattttctttcatcgttgtattcttctanttttttctcagaatccctcttatctattattattatcgtgggatatcctgaaatttcatatttatctattctatccttgcaacttttcatattatattttttaaattctatattattactatactcgctactaagtttatcccatactttcgatttgctaaaatcttcacagtgtctacagccgtccatataataatactcgattctatattttttatcatcatctgaagngcttttaaaagtctccattattttatttttattatacgctaataaaataacaattgctaataataaaaagaatattattgaaatcataataaatatatcgcttttgaaaaaactgctttttacagccatattctaattgtataatcctctaaattattattagataataatatcgttattattggatatttcattatattcgcttttaattttatcggtttcttttatgatatcatattcatcattntcaaaatgtattataattgaattataaaaatacgtcatatttatatcaatattcgcattaatcttatcttcaatgtacctnttnataaaattgataaaatattttttttctattaaaaatatccttacatcaagagtattataatctattgtcatgtcatactcttttaacacatagttatcataattattatcctttagtatatttanatacttgtcttgactactatcgtcgcatacaattatagttctatatacaagatagtttgaatatagttcgtctaatttattaattatctcgctcttcattaatactttattaactattattgtttttgccttatgtatattataacttagatatattcgcgatattatattattatttaatcaatatataagattatttacaataataaaatataatggacgaacaaatcattaagattaatatagagaattttagatatatctataattccatagatataccgcaaaatattttggataaagcagttgatataaaaaatacgtattcgtgctttaattcttattatgaccctaaaatgatatgggctaaaaaaatatataataataaagataagtataataaacctaagaataaatcaagatttcatattataatacccgactttactaagaaatctgaacttaaaaggtgtttgataggtaatttaaataaacttagtattaaaaacaaagataatatatatgaaaaaataaaggaaatcatcagtcttaataataatatagangatgtatttatgataatatggaattatattaaaacaagtgataatgaaatatatattaatttattaagtctatttgataagggatacttagaaacaatgatagataatctttgggataattatataaataataaagaatgggaccctcccaaatatatatatgaaaacaatcttctaatattgaatgatgaatacgaaatgtattgtgaatatactaaatggaagcgtggaataaataatattaataagatatggattaaatataaacaagaacaccttataatattactaaataatattgctgattatatccttattatatataatacctctatctataaatatattatagatattttattagaacaattatataaaatattatctgttataaaatataaatctataattgataaaattaaaagtatcgatattcaaaacttagataattctacaaaattttttatttataatattattgaattataaaaaaattatttctatataatagtatagagtaagaaatagtacaatgaaagaaagcgaaaataacttatctttttatagtagtgccataatccaagcaatttttgctatattattattaataattctcagttatatttataaactcgagaatatggggtgcgaatgttcagaacatcccaacaaagattttatcaagaacttcactattatagctctnggttattttataataacatctataatatctcttaaaagtgtagctaaaagtatgggatatgtcgtagttcaattattatcaatcgctacattcgtattcttcttaatgtttgtagtatatatatattatgcgtttgattatgttagatatttaactaatgaaaaatgcaaatgttcggaagatttaagtcgcgatattatatctgtaggtactatgatatccctcttcctcttcttaactcttctattcactattataataatacctatattattaagtacgctaagcaatcttttatctaaaatagaggtatttgaagaagaagttgaagatacaatccgtaatcccatgaaatctctacgaaagacgccagaaagaatagtcaaatctgttaaagaagtcggtagttttgttaataaatctgctaaaaaaatatcaaatcttagaaaaaatagataaaaatagataataanntnttntnatanattatatnnntttntntnntnnnnnttnntnttnnntttttngnncttnngnnccnttttnatntntnnnnnnccnntntatnntntntnnttnntnttnnttntnngtnantnantnnannnntttntnnnttantnnnagtntnntntnntnatnntnngntntgannatttttanttnnntnnnntatntnttnntnttnttntntntnnntnnattntgntnnnntngtttnanttnnngtanattnnnnnntatttganngnanngnancgnnnttnaaagaacnnnatnnatnnntaannatnnnaaataatcncnnatnatnnttnntnnnnccnnnatttnnngncnttnntgntnnttnttnnnnannantnnnnnttncnnntnnnnnnnctgcnncantntnannntntnnnnntnattcngnantagannntnanannnnnncaannnnngnnantnnttnttnnnnnnanntnnnnnttgttnaatnaaacntnnacnnantnnnnganaaagaaatgaanngnctnanntngnntnncatnttctttnntntngnnnnatntttntnnnnnaantcttnnaanannnnntnatantnnnnnatatttncnnttactnnctntnannnncnntnnaatntnnttnanannggnnnatatnnnnnnnnaatnnatnnantnncnnaantaaaannnnttnncntnntntnnnnnnanctnacantncnntctnnntnntnntncnntnnnattctnttntnttcnnttcnnntctnttnnatatntnnattnnnantgnantnnnaanntnnnttnanncnnttnnatnnnantnnnnnnnnttnnnntnttatttntctntttnnntttntntnntttttnnttnnttnntnangnnttnaannantnntntnttnntaantntnnttntntttntntnnttnnnnncnncnnnntcnttnnnnncnncnnctncnncnncnncnccnnctnnntcnncnncnncnncnncnncnncnnnntnnnctncntnnnctnnnncnnctnnnncnnnnnnnccnncttnnnntnnannnnnnnntnnnntnnnnnnnnnnttnntnnnttttnnnnctttnnaancttttnnnnntntttnnnctttnnncnnnntttttnnnnnntnnnnnntnnntnnnnnttnnnnttttnnnnnnctnncnatttnnntttnnnttnnnntaannntancnnttttttnnnnntnannntntttnnnnncnnnannnnnnnnnnnnnnannnnnnnnnnnnnntnannttnnnttnnnnnnnnntttcnntnttnntannaantcnnnanttnttnnnnntnnnnnnnntnnnntnnnnngnnnnnnnanannnaannnnnnnntnntnnnnnnntnnntnnntaantnnnntnnantaannntntnnttnntnnannttnnnnantnannnnnnntnnnantntnnttngntnnnnaannnttnttanatntttattantnt

SEQ ID NO: 927 - DNA, 4000 bp, Escherichia coli
  misc_feature (1)..(1): n is a, c, g, or t
  misc_feature (3)..(4): n is a, c, g, or t
  misc_feature (6)..(6): n is a, c, g, or t
  misc_feature (10)..(10): n is a, c, g, or t
  misc_feature (13)..(14): n is a, c, g, or t
  misc_feature (16)..(20): n is a, c, g, or t
  misc_feature (22)..(29): n is a, c, g, or t
  misc_feature (31)..(33): n is a, c, g, or t
  misc_feature (36)..(37): n is a, c, g, or t
  misc_feature (40)..(40): n is a, c, g, or t
  misc_feature (42)..(42): n is a, c, g, or t
  misc_feature (44)..(44): n is a, c, g, or t
  misc_feature (48)..(48): n is a, c, g, or t
  misc_feature (359)..(359): n is a, c, g, or t
  misc_feature (541)..(541): n is a, c, g, or t
  misc_feature (548)..(548): n is a, c, g, or t
  misc_feature (965)..(965): n is a, c, g, or t
ncnntnaaantannannnnngnnnnnnnntnnnaannaantnantttnaaaaaattaattatttcttttgatcaatttcttttgaacgtttttcaacaagtttgacaatatgatctaccattttttcattttcaattttatgatcttgcttgcctgcccaatataccataccagaacctgctccaccacctgtgaaaccaacatcagtcataagtgcttcgcctggtccattaacaacacatccaataatcgataatgacataggagtttttatatgttccaatttcttttctaattcagatactgtttttatgacatcaaaaccttgcctggcacatgatggacatgaaataatattnacgccacgatggcgtaatccaagtgattttaaaatttcaaatccaactttaacttcttcaactgggtctgcagataaagaaacacgcaatgtatcacctattcccatccataaaagattacctaaaccgattgcagattttattgttccacttgtaaggcctccagcttcagtaattcctangtgtatnggcgcatctgttgcttccgctaaaccttgatatgctgcagctgacataaatacatcagatgcttttactgatatcttataattctgaaaatcgttttcctctaatatcctgatgtgatttaatccactttcaatcattgcatctggacaaggctcgccatatttatctaataactgcttttcaagggatcctccattaacaccaatgcgaatagaacagccatgatcttttgcagctttaataacctctttgatacgttcactcgatccaatattacctggatttattcttaggcatgctgcaccagcttcagcagcttcaattgcgcgtttataatgaaagtgtatgtcagcaattaatggaacttgactttcttttacaatttcatgcatcgcttttgttgaggcaatatcaggncaactcaccctaaccatatctgcaccagcatccgcacaagagtttatttgatttacagtggcgcgaacatcatgagtgagtgtgtttgtcattgtttgtactgatatgggagaatccccacctacaggaacatttccaacataaatttttctagattttctgcggtaaatattccgccacggccttatagaattcaaactcatgcaaatcttccagattgtgataaaacttacaatacaatttatagtaacaggatcaacagactattgttcaatagattgtactatgatctttgtatttatgggtggctcgagtggcaaagttagactattttcaacaattgtataattttctaatatctttttggcctgcaaatttaccttttttgcaacacctgtggcagttcctaatgggccatagaaatcattgcctatcattaaataaacaaaaccagaattacccgctcgtaaaaaagcagattgtgctgatttaggaacttcgtatctttggccagtatctaaaatattctcaaataatatatttccatttggttcataaatacgtatccaagcaggtttctgagcaacaacataaattgtaggaggttctgtcctagtaacttgtggagtttttttaaattcagcagtatctaaatctttatttttttcggttaaaggtttagtattctcaacataaacacctgatatagatgggtctatcgcagatattggtccgtctcttggcgtcataacaggcaatattaattctgtaggacgataaaattcttcaaggtcagaattacttacaatattaaaattattattatcgatatcttcaaagaaatttttatcatttatagaagtagaagaattagcctgaattgaaggtgattgattaataggagatagatttactttttgaacttcatttaaaactgtaatacccccatatcccaatcctaatatcaaaaataataatgctgttagtgaaaataaacctgaaaaagaaaagtgattaaataaaccactatttattttcttctttcttatttgaggatttagtattggttcatctaaaagtttagttggctttactactttatttctttttgttccatcaatctccgactgtaggccaataaagccactttctttacaaaattgatcaaagcattcttcaggatttaaattcagatgagttgcataagatcttacataccctgcaataaaacttggtgcaggaaatgcattaatatctgcattctctataccaagtaaaaattcaattcgaagccttgtttctttttgtacatcttcgagagttttacccaaagtagcacgttcaccacgcaatttatcacccagtgtaacagtatatgaatcataaccttttaactcaagcttatcagggtgaaagccaggtattattttaccaattttttttcgtgttaaagacaaattgattcgctattcatgtatatgaaatgttgaccaaacatacatataaattttacaatttgcactgctcaattaaaattctatttaagcggtgatttttagcctactcaattcacagtgtgaccacaattcatccattgcatttactagtatatctaccatttcttgagtatgaaccggtgaaggtgtaaacctaagtctttctgtaccacgtggaacagttggaaaatttattggttgcacataaattccataatcatttaacaaccggtcagaaatcattttacatttaactggatcaccaacgtgtattggcacgatatgactgccatgatcatcaaaaggtaaccctaagccacgaaatcgtagttttaattgttttgcaatatcttgatgtttttttctaatttctgtgttttcttttaagagacgcacagatttagtagcagccgcagcaagcgctggtggtaatgaagaagtaaaaataaaacccggggcataagatcttatagcatctacaaagcgaggacttgcagcaatatagccacctattacgccgtaagctttcgcaagtgtaccattaaatatatctattcgacttgatagatttaacatttcacaaacaccaccacctttagctccgtacataccaaccgcatgaacttcatcgatataagtcaaagcattaaactcatctgccaagtcacatatttcttcaattggagcaaaatcaccgtccattgagtataatgactcaaaagcaataatttttggcctacttggatcaatggtttcaagcaactgacgtaaatgtttcacatcgttgtggcgaaaaatttgtttttcacaatttccatgccttatgccttcaatcatagatgcatgatttagctcatctgataatattactaaatttggaaaaagttttggcaatgctgataaagtagcttcatttgcattgtaagctgacgtgaataacaatgctgcgtctttttgatgaagctcagctaattctttttcaagttctttgtgaaatactgtattaccagaaatatttctagtaccaccagatccaacccctgcactatcaatgctcttttttaaagctgatatgacttcagggctttgccccattccaagataatcattaccacaccaaactgttatttcagtttgtgttccgtcagtttggacccagtttgcttttggatattcaccatttatgcggctaatatcctgaaatactcgatatcttccttcagcgtgcaaagcatttaacgctttatctatttgatgatcatagttcattctgtagtccaatttaattataattttttcttaaactaattaccttgaaaaattaagtcccaaaacgccgcagttatataattttttaaatctgtacatatctttcataccaaatgtttcttaattatacaataagaattcaataaatggaatacgttttgatgaaatttatttatttttaaggaaataattagttattctattaattgcagataaaagttcaggaggaatttctgactttccactcacccagttatataaatcatgatc

SEQ ID NO: 928 - DNA, 4000 bp, Escherichia coli
  misc_feature (419)..(419): n is a, c, g, or t
  misc_feature (443)..(443): n is a, c, g, or t
  misc_feature (454)..(454): n is a, c, g, or t
  misc_feature (553)..(555): n is a, c, g, or t
  misc_feature (1985)..(1985): n is a, c, g, or t
  misc_feature (2833)..(2833): n is a, c, g, or t
  misc_feature (2838)..(2838): n is a, c, g, or t
  misc_feature (2846)..(2846): n is a, c, g, or t
  misc_feature (3091)..(3091): n is a, c, g, or t
  misc_feature (3292)..(3292): n is a, c, g, or t
  misc_feature (3807)..(3807): n is a, c, g, or t
  misc_feature (3812)..(3813): n is a, c, g, or t
  misc_feature (3822)..(3822): n is a, c, g, or t
  misc_feature (3829)..(3829): n is a, c, g, or t
  misc_feature (3831)..(3831): n is a, c, g, or t
  misc_feature (3834)..(3836): n is a, c, g, or t
  misc_feature (3842)..(3843): n is a, c, g, or t
  misc_feature (3845)..(3845): n is a, c, g, or t
  misc_feature (3848)..(3854): n is a, c, g, or t
  misc_feature (3856)..(3856): n is a, c, g, or t
  misc_feature (3858)..(3859): n is a, c, g, or t
  misc_feature (3863)..(3864): n is a, c, g, or t
  misc_feature (3867)..(3867): n is a, c, g, or t
  misc_feature (3869)..(3869): n is a, c, g, or t
  misc_feature (3871)..(3871): n is a, c, g, or t
  misc_feature (3873)..(3873): n is a, c, g, or t
  misc_feature (3877)..(3878): n is a, c, g, or t
  misc_feature (3880)..(3880): n is a, c, g, or t
  misc_feature (3882)..(3885): n is a, c, g, or t
  misc_feature (3887)..(3887): n is a, c, g, or t
  misc_feature (3889)..(3890): n is a, c, g, or t
  misc_feature (3892)..(3893): n is a, c, g, or t
  misc_feature (3895)..(3897): n is a, c, g, or t
  misc_feature (3899)..(3899): n is a, c, g, or t
  misc_feature (3902)..(3905): n is a, c, g, or t
  misc_feature (3907)..(3909): n is a, c, g, or t
  misc_feature (3911)..(3911): n is a, c, g, or t
  misc_feature (3913)..(3914): n is a, c, g, or t
  misc_feature (3916)..(3916): n is a, c, g, or t
  misc_feature (3919)..(3919): n is a, c, g, or t
  misc_feature (3921)..(3924): n is a, c, g, or t
  misc_feature (3926)..(3926): n is a, c, g, or t
  misc_feature (3928)..(3928): n is a, c, g, or t
  misc_feature (3932)..(3933): n is a, c, g, or t
  misc_feature (3935)..(3938): n is a, c, g, or t
  misc_feature (3940)..(3941): n is a, c, g, or t
  misc_feature (3946)..(3946): n is a, c, g, or t
  misc_feature (3966)..(3966): n is a, c, g, or t
  misc_feature (3975)..(3975): n is a, c, g, or t
  misc_feature (3981)..(3981): n is a, c, g, or t
  misc_feature (3993)..(3994): n is a, c, g, or t
  misc_feature (3996)..(3996): n is a, c, g, or t
  misc_feature (3999)..(3999): n is a, c, g, or t
tggtagacgaggcaatgaccatcaccgaccgtattttcacggtacaggacgcaagcggtgttcccgcttttcttgacccgtttatcgaagccgtagtaaaaacccctacaaagtaaccaccggcgccagcgtaataccccatgcggggcatgcgtggtgtcctcttcattaaccttcatgccctgcaagggtaaaggctgaggaagaatatcacggagcgttgtcagcttcacgggcaatgcaatactggctacggggcctccccgcctaggcttgttgctctctttctttctgagttttgatgatcttcaaccggagcttgatcgcgtcattcaggcttttgacaatacggtcattggaatccggaaaatgcagtttttggttgaactcatccagtgagtgggtttcaagcactttgncaaatgcttcatccacaaaaggcntggtcatctgnaccacaccctcaaaataaatcgaaagcttttcgtacttgtcccagttttcaagaatgaggcttttgatcgtgtccccggcaggctccccatcctccgannntcttcccgccggagtcgaggtgcccatgattttataaacatcgattttgaattcgtcttccatatttatcctgctctcttaaggaaaaacttttcctcaacggttaacaattttaacggacttcatttccaccctttcatcagggttgtccttggggtcacggggtacaccaacgatcttgtcgacaacatccattcccttaatcaccttgccgaaagcggtgtactgattgtccagaaaatacgaggctttgactacgacgaaaaactgcgaaccggcactgttgggctcctgtgaccgcgccatggatataattccccgatcatgaggtgtgtcattgaactcagcatcgatggagtagcctggcccacccgttccgtgcgtggagcggtcctcactcttggagttggtatctccgccttgaatcataaaaccgggaatcacccggtggaacgtggtgccatcgtaataacccttattggccaggtctttaaagtttttggtatgccccggtgctttatcttccaggaactcaaattcaatgtttcccattgtcgtttctattactgctatctcattactttgcacatcggtcatctatacacctatgaaaaatgggtaggaggccatcagcatcttcagaaaatggaagaaaccaccctcgtccctgttatcgtttttaagcggatgcgttatcaagaactataaaagaacaacatccgctgatttaataagactacatagcaaaacccgcccaaggaacaacttagcggtttacaattttaacagatttcatttctaccttgttattaggattatcccggcggtcacgcggaacattgacgattttatcaacaacatccattcccttaatcaccctgccgaaagcggtatactggttgtccagaaaatgtgaggctttaaccacgatgaaaaactgggaaccggcactgttagggtccgatgaccttgccatagacagaatccctcgatcatgaggtgtgtcattgaattccgctttgatcgtgtaacccggcccacccattccgtgcatggagcggtcctcactcttggagttggagtctccaccttgaatcataaaaccgggaatcacccgatggaatgtggtgccatcgtaataacccttcttggccaggtctttaaagtttttggtatgccccggtgctttatcttccaggaactcaaactcaatgtttccaagcgtcgtctcaatcacagcaatctcaccgccgaacgccgaggttccggtcatcagaacccccatcaggcacacggcaattcctttaacaaacaaattcatgaaacctccagataaaaaagggataatagtcagaactattaatttgtttcccggtctttctcaaaagcttgcgggataattggattcgatcaagatgaattttaagggntgtattctagcaggttgccgggaaagtctcaataattgtcatgacccttaaatccgcattcctcatttgcaattaccttttggctggactggccctggcctgcctggttttgagcgagatttattctcccctaacaggtctgatattcttcgctggcctaatcctctgcttttccttggaacagtcggaacgcattccattccagcccgcgacgcggattctaaactctaactggggtttcttactgctaccttttttatattttgcgttcgacctgcgcctgctggaattggtcaccgggtttctggtttaccttttgtttacccggttcgtctttaaaacagagttcaacgattatttattcggttacctcatagcaatcgtctgcctgctgattggggctattttcgaacaaggtctggcctttggaataatctttctcgctttcaacctggttttaagctggtgcctgattttttataccctgatgtcggaacagaccggaagtagtagcgccaatttcaaagcagcaggaaagaacgaaactccgggcactgccttgctaagttggacaacgggtttggtcattctcagtttcgccatgaccgctgtgatctttatttcttttccccggttcggcctgggtttcatctccctgaatacctcctcttctcctatcagcggattttccgataccgtcactttgggggatgtgggaaaaatcaagcagaacccggcagtggttatgcgtgtggaatacacacggggtggaaaaaactataagccggaatcccgaattttatggagaggggtggtgctggatcatttcaacggcaggacctggaccnccacnttggacanggaatttgaaacccctaaccggcccggaacaggactcagcctttttaaggtgtccaatccaaaagaggtggtacaacaaaatgtgtatatgggaccgttcgacgccccttatttgtttactcacggagtaccgctgtttatagatggcaatttcatccatgtgcagatggataaaaatttcgtgtttaaaaccggcgattcccgttcgggtcccagaaaatatacgttgatttcggaaatttcanatcccgatatcagctacagcctcgatatgcctcatagcgagcctttactgtttccgaacaggtttctccaacttcccagtgtcagtcccaaaatccatgacctggccgaccgcttgacccagggcgtccgctctgacagggatcgggcacaaaacattttgcaccacttcgcggatttcagctacacgctggaaatggagnacgatccgggcaaaaccgcgctggaacattttttatttgaaagaaaggccggccattgtgaatatttcgcttccgccatggtaattcttctccgatccgccggggttcccacccgcctcgtcaacggttttgtcggggttgagtggaacgaatggggaaactacctgatcatccgtcagagccatgcccattcctgggtcgaggcttttattccgggaaaaggctggacggtgtatgaccccactcctccggaccccgctctggttaccccaagcctactccacccactggcaaaatccctggacttcctcagaatgagctggcagagatacgtcgttcgctattccgtacacgaccaggtgcaggtcgtacaatttttccgggccggtggccgtgaccttgtgcaaaaactcaaaggcctgctggcagatctgaactggcaaaccctggttaaagggcagttcagcccggttattctggccctgatcctgatacccatattgctcctcgtcctnaaacnncgctatggngccttcncnccnnncccgcnncnttnnnnnnntntnnatcnnganangntnaganngntnnnnangnnannannngnaannnngnnntncnngnccncnnnngnanttcnncnnnncnncctgncttctgccaaacacgacccnatacgccgnatcacngaattttatgannancanc

SEQ ID NO: 929 - DNA, 4000 bp, Escherichia coli
  misc_feature (1945)..(1945): n is a, c, g, or t
  misc_feature (1947)..(1947): n is a, c, g, or t
  misc_feature (1955)..(1955): n is a, c, g, or t
  misc_feature (1959)..(1959): n is a, c, g, or t
  misc_feature (1967)..(1967): n is a, c, g, or t
  misc_feature (1983)..(1983): n is a, c, g, or t
  misc_feature (1988)..(1988): n is a, c, g, or t
aaagacatgggcggagacggttacggattggactggggtgaccattcaaaacagccgtcagataattgataacgccttgtccttattgaaagaaaaggaaggtgaatccacggtgtacgtatataataccttggctaccgaccggaatgaattggtggcggtggaagttcccgcctcatggagaaactcagattgggtggttcttgataagcgagggaagaaacagccggctcaatggctgacggaagacggcgtttcaaaactcttgtttcgtgcgcaagtcccctctgccggttatgcctcttatgcgatccggaaggcagaggataaacagtccggaaccttgaaggctgagagacagaaagacggtacgtttcgcatggaaagtgatttatacaccttggtgctaaacccctctaaaggaggtgtaatagaaagcttgaaagcgaaagccgtacgaggcaaggaattcgtggataaccggaatgaacgtgggttcaatgagcttcggggatattttatcgatgagggtggtttcctttccagtatggatcaaccggctgaggtgagcgtgttggagcaagggcccttattcgtgaaggtagctgtgaaaggcaagattggaaagtattcatttacccaaacgatccggttaacgcagggagagcctcgcatcgatatgagtgttaagctggattggataggaagccctcgtattggtgagccgggtatcgaattccgtgcggataatcctcgtaagtcattctatgacgaccgttacaaacttctggtatatctgcctatccagatcgccaaccaacagatttataaggatgctccgttcgatgtttgcgagagccggttggagaatacctttttcaatcgttgggatagcatcaagcataatatcatcttgaattgggtggatgtagcgagcaaggataactcttgcggtctgtcattattcacggatcatacgaccagctatgcgcatggtaaggatttcccattggccttgaacgtacaatacgccggtaaaggcttgtggggccgggattatatcatagaccgtccgaccgagatctcgtatgccttgatccctcatgccggaacttgggagaaaagccgtatttggacacaaagcgaacgacgcaatgagcctttggtcgcaaccttggacggcgatgctaccttgacatccggttcccttttccggatagagaataatgcctacgagttggtctccatggtctataaaggtaatgacctttacatccgcctattcaatgcccaaagcgatgcctcccctaaaacgataaccttccaaggacaagacgtgaaagcgagcttggtggaattggataaccgtctggttgaggacttaaccgtcaccgagaagaaaggcgccagttcaatgcgtctctctatccctcgttacgggataaggacattaaaagtaagctgtaagaatatctaatgtagagacggggcatgccccgtctctctttatccctaattaatccccgtttctcttgcctctttcggtggaaagatgttattttgcatcccgaattaaaagaataggcgttatgttgaaattcttcaagacatggacactccctatctccatgttagcgggtgcgatagggtattttgttttcgccaatgttacttttctggagcctacaaagccgttcatgtacactttaatagcgtatctgacgccctttttgatttttgcgcagttgctcttaaccttctgtaagatctctgtccgggaattgatgcccagcccttggcatggttggctattgcttatccaagcggtttccagtttggtgcttgccgccttattgctctggctgccaatgagagaggaataccgggatgtgttcgagggagcgatggtctgcctgatttgcccaaccgctacggcggccgccgngnttacgggnaaantagggggnagcgcctctagtctgnctacntataccttattatcgaatctattggcagcgattgtcgtgccgctggtcttcccattagtggaaccgcatgccgagattactttcttcgccgcattcttgaagatcttgggaaaagtctttccattgctgttattcccgtttttcctcgctttgttcttgcgtagattcataccacctatccatcgcttccttgcggggcttcgagacatggccttttacctctgggccgtcgctctagctatcgtgaccgggcagaccgtgaaatccttggtcaatagcgaggcggagatttatgtagaaatcctgatcgctttaggcggcttgataacctgtatcgcgcagttttattggggaaagcgcatcggcaagaaatacaatgaccgtattagcgctggacaagccttgggacaaaaaaataccgtgttagctatctggatgtcttacacctatttgaaccccttgtcttctgttggcccgggaagctatgtactgtggcaaaatatttttaacagttatcagctgtggaaaaagagaaataaagaattggaaaattaaatatcgatagctgatatataataatttgaccacagaatattttcgtcttcttttttgcgtattcactattttttctataaattgccactgtttatcagtgaggttggttgaatattgttccataacttaatgttttagtaaccactaggttttaaataatatatcggttaattaactgatattcaatatgatatataattatatagtaattgttttaattcatttttaaacagtttcttaatgtctgaaacgattgttgacttgaattttcttgaggctggagttcaatgtttcccaatgtatcactatgaggaacgtaaaattgagagtaaaactttgtttgatgatgccgaggacaccattcagaataattatattcgtcgtgatgccatctccgatttcatttcagaacgttgtcgcaaagcctacggtccacatgtgagtaaagaagatattttttactatgtttacggcattctgcacagcacggaatatcgcaccgcctttgccgccgaccttaaaaagatgttgccccgtattccattagtggatgaagcccttgatttttggagttttagcaaagcaggaagaaacttagcggaattgcatttgaactatgagaatcgtccttcggcaaccggagtcattgtgacctataataccattccgcagagcgaaatagaaaaagtaatgcaatcaggcgagatggagacaatcaattatcaagttgaaaagatgcgctttccctccaaaacggataaaagcaaaattatatacaacagccagataacgattgaaaatataccagccacagcttatgaatacatagtaaatggcaaaagtgctatcgaatggattatggagcgttatgccgtcatcactcacaaagatagcggcatcactaataatcctaatgactgggcaacggaacatgacaatccccgctatatattggatttgctcctcagcgttattttattaagtatagagatgatggagatagtgaatggattaccgaaattaaccttttaaatatggcaaaagaacgttcagcaatagcaacaatcaaaggatattattatcaatttgactattttatccttcagttactaaaatgcaataatgaaactgattccatttgtattgaaggcatcgaggatgttgatttaaaaacagttgatgaaagtactgctattcaatgcaaatattatgcaggaacagaatataatcattctgttatagctcaaccattgcgatatatgttagatcattatctatcaaaagctaataatggtataaaatataagatttatgggtattacaaatcaggtcaagataaacttatattacctattaatatagaattttttaaaagtaactttataagtctaaaagcatttaaaggtctttcgatagaagataaacaaataatatcatttttatcaaatttggagata

SEQ ID NO: 930 - DNA, 4000 bp, Escherichia coli
  misc_feature (93)..(93): n is a, c, g, or t
  misc_feature (109)..(109): n is a, c, g, or t
  misc_feature (128)..(128): n is a, c, g, or t
  misc_feature (134)..(134): n is a, c, g, or t
  misc_feature (218)..(218): n is a, c, g, or t
  misc_feature (231)..(231): n is a, c, g, or t
  misc_feature (301)..(301): n is a, c, g, or t
  misc_feature (409)..(409): n is a, c, g, or t
  misc_feature (655)..(655): n is a, c, g, or t
  misc_feature (1108)..(1108): n is a, c, g, or t
  misc_feature (1219)..(1219): n is a, c, g, or t
  misc_feature (1306)..(1306): n is a, c, g, or t
  misc_feature (1992)..(1992): n is a, c, g, or t
  misc_feature (2241)..(2241): n is a, c, g, or t
  misc_feature (3083)..(3083): n is a, c, g, or t
  misc_feature (3085)..(3086): n is a, c, g, or t
  misc_feature (3088)..(3089): n is a, c, g, or t
  misc_feature (3091)..(3091): n is a, c, g, or t
  misc_feature (3093)..(3093): n is a, c, g, or t
  misc_feature (3095)..(3099): n is a, c, g, or t
  misc_feature (3101)..(3102): n is a, c, g, or t
  misc_feature (3104)..(3104): n is a, c, g, or t
  misc_feature (3106)..(3106): n is a, c, g, or t
  misc_feature (3150)..(3150): n is a, c, g, or t
  misc_feature (3529)..(3529): n is a, c, g, or t
  misc_feature (3968)..(3968): n is a, c, g, or t
tcacaagctgcgatttttcgagtcgtaaacgctcggcgctttcccgaacgatcgcttccaccacgcgctcatcgccgatcgtctggccctgcnccgcgccgtcgcgcancagacatttagcgcctggngcaacnctgatgttcccttgtgtctccaccacggtcgcgagcacggcagccgcgccttgattgttgatttcgaccaattgttccgcaaanggagtcatttttngacagcggtttcctggtccgactctttccaccatggatcgataaacacgttcataatgccgccgcaaacngccgggctgtcggaagaaatgtcgtccaacagatcgacgcgaacggttcttggtttgcgagttcggatgacttcaatcgcttcgcgcttcacatccgcctcgccacanccaccgccaatggtgccgagaatttctccccaggcggtaaccaccatttttgcgccgacttcgcgcggcgtcgatcccttagttgaaacgatcgtggccacagccaaggtttcgcccttgtcgagaaattctttgacttgatgatagatagagtcctgctttttactttcagaatcgccatccgtgtaacaagcaccgggtccagccatattacttcctccgaatcgtagctaaatttctcgccgncgatcgacgattgtcagatccacgaggaaatttcctcgccatcttcaatcctcgattttccattctcgccgtctccgtcacgccaccattttctgcaacgtccggcctaaggacactagactattcacgttgtgcaccgaaagaaacaaatccagatacggcagcgccgcttgcatgcctttgcagagcggttcgtagttttcactcgccagtaaaggattcagccagatgacttttttgcagcgccgcttgaggtcttgcatctcgcgctcgagcacgctgacatcgccgcggtcccagccgtcgctgataatcaccactaccgtgcgatgcgtcaccatgctgggcgcgaaattgcggttaaacgtgtgcagcgaacggccgatattggtgccccccgaccagcccaggatgctcccggaaatcttctctaaagcgttcacgatatctttngtccgaatcaggtgcgtaatgcggctcagcgaggtgctgaagacaaacgtctcgacgccccatagttcattttgcagcccatacatgaactgaatcaaaaaccggctgtancaatccatcgagccgctcacatcgcaaagcagcacgaccttggtttttttaatgcgcttttttcgatgcaccaggtcgatgatttcnccgccatatttcatgctccggcgcatggtccagcgcggatcgacggtgtttcctttacgtccaagtttttttcgccggctgatctgagtcgcaattttggttgcgattagaaggatcgcgcgcgcgatggcgcggctctcttccacgcccatttcgctgaagtctttgcgattcatcagctcctgcggactgtaggttgggatggaaaattcctccaagttctccagcggcagattttccttggccagcgactccgcagaagcttcttcgagaccgccttcttcgtcaccgccttccggggcttgagattcgctcggggttccttcgatctgcattgtttccatcggcatgcgctcatagctgagctcgcgccaaaaacaatcgaacaacatgtcgaaggtcggaaaatcttctttctgcgagatcatattggcgcgcagcagcgtacgaaaatcagacttttccgcgagttcgacgtgttccaccgagcgcgatgcatccagcacctgactcaggctcaccttgacgcccaattcctttagcgcccgggcgaacgccataacattcggcaaggttcctttaccacgcgccgaggagacgctactaaccgccgcagcgaccgtttcgggagtcaactccatgcttatcagctcaccatttccggcgacaccttgagcagcgcgtcnaggtttagctgtcggttatcgacctgatcgcgcaaatggtgcaaatcctcgcgatacttgaacacacatcccatggtttccaccactgtcttatcgtccaagttcttgcggttgagcgcgatcaacgcggaggcccaatcgagagtttccgcgaccccgggccgcttataaaaattcatctcgcgcactttctgcatgaatgcgcaaatttgctgggccattttggtttccacctcgggaaacttcgtngtgatgatctcgtattctttttcaaaggtcggatattcgatccaatggtagagacagcgccgcttgagcgcgtcatgaatttcccgcgtgcgattggaggtcaaaaatacgaagggacgatgtcttgccgcgatcgtaccgagctccgggatggtgatctgaaagtcagacagcacctcgagcaaaaaggcctcgaactccatatcggcgcgatcgatctcatcgatcaggagcaccggagcgttcgcgccattggattgaatcgcctcgagcagcggacgtttgatcaaatagtcttggctgaagatttccgtttccactttttgcttgtcgccatgctccacttcttcgagcttgatgcgcagcatctgcttgggataattccactcataaagagccgtgttggcgtcgagcccttcgtagcactggagacgaatcagcttcgtgtccaaaactttcgccaaaactttcgcgatttcggttttaccgacaccggcttctccttcgagaagcagcggtttgcccatgaccaaagaaagatagacaacggtcgccaatgcgcgatcgcaaacgtatttttcttttaaaagaatctcctggacgctctcaatagtcagttgatttggattcacgcttgcctcaccccatgataattgcttgaacttcgggcccggaaacctgcttgaacgtcaaagccgcacacgtcgagttaacagcaaacccaatcacgatacgccctttgatacccgtgatcaacgtccgaccggcggcgatgaatggcgccgttgagcagccaattcatcataacaaaccgaggttgaataggaaaatcgacaagacgnannannancngnnnnncnntngnattggcggatcaccggttcgaaagtctcaatgctggtttctgangcggagcgctctaattactcgcgacgtatgcttgcttgaattgagcgaggtcggtaagggagttcttcaactgcgtcgccgatcgaacatccgcgaatcttccaactcgcacgcggtgccagatcttgccctgattttcaaaaagcatcacgtaggagtcgtagccggatttacgtaaaaactcagccatcgtttgggcgtccttggccgtggccaacgcagcgacttgcacggcccactcacgcgtcgatctaggagtcacgaacggcggaggagctggagccgccaaaggaggagttgctggccgtgacggcgcggttgggcgcgccggttcgaccgggcgggtcaacgatagtgcatatgccggctgtgcgggggnaacgttctcgggttctcgcgacgattctggaggcatgaacgttcccggcggttgcggcaaattaaaaggaaccggtgaggccgaattgatctggcgcaaaggtacaaccggtttctgcggtgctactggcacagcgctgggagcaggcgccggggcgggagccacatcgcctgacggcccgggtaaagccggtgcctggggctgctccaacggttgctgctggagcttttgtctttcccgggcgatccgatcgagctcattgcgcacggtggctagcgactttttaaaatcttctgtgacttgctgaccctgatcacgagtgtaaattacatggggagtgatcagcatgatcaactccgtccgagtgatatcgtcactgttcgtagcgaaaaaacgtccgatcaccggtatgtccataatatagggaatcccggtccgngaacgagcacggttatccgcgatgattccacc

SEQ ID NO: 931 - DNA, 4000 bp, Escherichia coli
  misc_feature (1)..(1): n is a, c, g, or t
  misc_feature (228)..(228): n is a, c, g, or t
  misc_feature (440)..(440): n is a, c, g, or t
  misc_feature (858)..(858): n is a, c, g, or t
  misc_feature (929)..(929): n is a, c, g, or t
  misc_feature (933)..(933): n is a, c, g, or t
  misc_feature (1350)..(1350): n is a, c, g, or t
  misc_feature (1374)..(1374): n is a, c, g, or t
  misc_feature (1376)..(1376): n is a, c, g, or t
  misc_feature (1379)..(1379): n is a, c, g, or t
  misc_feature (1767)..(1767): n is a, c, g, or t
  misc_feature (1985)..(1985): n is a, c, g, or t
  misc_feature (2045)..(2045): n is a, c, g, or t
  misc_feature (2055)..(2055): n is a, c, g, or t
  misc_feature (2076)..(2076): n is a, c, g, or t
  misc_feature (3691)..(3691): n is a, c, g, or t
nttatatttctatgagaaatttgaagcctctcgcaagagccgccttgccgcttcgaagacctacctttagctaaaatctaatcgcagcaagcactatggaggttctcttaagcccagaaggattattgtccttacttaccctgacttttttagaaattgttttaggaattgacaacattatcttcatttcattgatttcgaatgatttggaggccgctcagcaaccantagcacgccgactaggtttggggctcgcgctaggttttcgggtattaatgctccttggtattacgtggttgataggattgactgaaccaatattccatttaggagagcaccctgtatccggtagagatgcaatcctatttttaggtggtgtgtttttattggccaaatcctcctcagaaattgtgaaaaagacagaagggaagggtcatggngatcgcagcaagaaacacaaatccttgctaggtgtgatcattcaaataggcttgttggatattgtgtttagtttcgacagtgttttaaccgctataggaatgacgcacgaattggtcattatgattgtagctgtaattatttcaatggtaataatgctagtgtttgcgaggccgattgcagagtttattgagcgtcacatgagtctgcaaatccttgctttagcctttcttatcatgattggtacggtgctcattgctgagagcgcccacatagagattccgaagccctacatctattgttccgtaggatttgcgctcatggttcagctgttgagtattcgggctgctgagcgcaataaataattattgaaatcggccgaccagtctgaaatagtccttgagcacttcaatatttgcnttttcattgccttgagtaccataaagaagtaacgaatcctgaccttcgatgataaatgggcggtggtaatntagngcgttttgaaagagtaaggcggccaattggtagtgctgttcaaaatccattttatccaaatagatctttacttcaacagcgtccacacgaatggttaccgtatctctaaaaaactttcttgcgcttggttctgctacaatataggcttgatctgcccgccaattattgactatcgaaaaattcaaaaagggcattgtcgtgtcctttaagcattttaaagaacggtgcgtcttaaacccttgtgaggtaagttcagctctttcgtcggtacggtatttatagatacgtgtgttgttaaagaaaatttcgtcactttctaagacggaataatccgcaggtgcctgccaatcgataagtttgtgctcgtaaggccaaatgatgctaagcaatacgatgacgccaatgaaggcgagggcntaggtatagagtttcttttccacngnaangcaacaatatctgtcccggcttgtttacttattagctcaaagaaaataattcatgtctacatcttctagtactgttgcagtggttggtgcgggaatagctggtctcagtgccgcgattcgcttaagaattgctggaaaagaggttattgtatttgagcaaaactcctacacaggtggtaaggtgacggcttttgaaaaggagggttttcggttcgatatggggccatctttattcacgctaccacatttagtcgacgaattgttcgaattggccgggaaaaatccgcgtgaatattttaattaccacacgcatgatgaggtgtgccggtacttttgggaggatggaacaaagctcactttattcccttccattgagaaaaatgttgcngctgtgtcatcagtatttggaccttctgaagggggaaagttgttcgattattttgaaatggcgcgtagaaagtatgacttaacagcgccgttcttcttagaaaaaagtttgcatagtgcgcgtactttcttgacgccgaaagttttgaaggtgttagcggaaattccaaaacttggattgttttctaccttgaatgaagaaaatgaaaaggtgtttancgcgccgaaattggttcaattatttaatagatacgccacatacaacggatcatcaccctnccaaacgccngggatcatgcagatgatcacncatttagagcatagtctgggcacacattttccggtagggggtatgcacgaaatatcccaaagtctaacccgtttggcggtagaattgggtgttcgttttgaactggacacaagagtagaggagtttattatcgagaatcatgagattacggggttggttgctggtgaaaagatttggaccattgaccaattggtctgtaattctgatgtgaagtacgcttacaaacacctcatgccaaaacaggtgaaaaggcctaaaaagacccttgcgcaagaacctagttctagcgcgctcattttttattggggactttctgagcaattccctgagatggatttacataacatcattttcagtgaagattacagagaggaattcgagaatattcgaacgaacggcccattctgggaggacccgacggtctatatacatatctcaaaccgattagagcctggggatgctccagaaaataaagactgttggtttgtaatggtgaatacaccttacgatcaaggccaagattgggaggctatcgttccgttggtacgcgaaaaagttttggagcgtatctcaaaagcattggggactgctgtagaaccactgattgaagtcgaagaggtattgcgtccacaggatattgaaaaacgtacttcaagcgttggaggcgcgttatacggaaccagttcaaacgaaagaatggcggcatttttacgccattctaataaaagcaactccattaaagggttgtacttttgtggaggatcagcacaccctggtggtggcgtaccgctttgtttacttagtggaaaaattgctgctcaatggttggtaaatgatgagtaatattttgaaaatcaacgaaatcgttaaaaattacgctggatggattttagtgatctttcacgtcgtaggattatttttgctgggtggcgaatggcgtgatgaattagtatacctcaccccgtttaatttattgctgctcgcgggtttgtttcttttgaccaccgaacgtcctttggtaaaatgggcctattaccttcctatactcttgggatttttgatcgaattaattgggactaatacgggttttccatttggcgtatattcttacggttcggcattaggtccaggttttttaggcaccccaataatgatcggcgtattgtggtgggtgcttattcgttcattctatgatttaacagggttcaggtttaaccatgtatggataaggagtattcttaccggtttagccatgcttgcgatggatattttgatcgagcccgtggcgatagaattgaccttttggcaatgggaagcggttgcagtaccttttgagaactacctcgcgtggttcgttttgagtacactttttgcccgtttaactgcatcaggagatgcacgtaatcctttgagtatctgggttattgttgtgctttcggtattcttttttgttttaggctcgttgtacgcgatgcagtaaaaaaggaaacccccgccaaaggcgagggttaacgttcagaattaggccagggtacgagcctaccggtctttcagtttttttaactctagctccagcgcttctagtttctcttcaatggattcctccatttcttcnaggttctcttcgatagattcctcaaagtcatcagcatcgtaatattcaatagtcgcgcagtcggtgcaggataaaccctctggcgtcatttcccattggtgtcccaacatatcaccgtcgtacatatcttgaacgttgcgtatgtcgtacatgatgttttcaatgctctcatctaaatagaccgtcgcacctacaggtaaacgcagcgtgaccttcaaatcttgtcctctgtacaaagattctttaggcactgtgaagtattcgcttagtcgcaatgcttctccttcttgtgccgtagggtagtcaaag

SEQ ID NO: 932 - DNA, 4000 bp, Escherichia coli
  misc_feature (50)..(50): n is a, c, g, or t
  misc_feature (236)..(236): n is a, c, g, or t
  misc_feature (274)..(274): n is a, c, g, or t
  misc_feature (504)..(504): n is a, c, g, or t
  misc_feature (535)..(535): n is a, c, g, or t
  misc_feature (1990)..(1990): n is a, c, g, or t
  misc_feature (2059)..(2059): n is a, c, g, or t
  misc_feature (2374)..(2374): n is a, c, g, or t
  misc_feature (2467)..(2467): n is a, c, g, or t
  misc_feature (2509)..(2509): n is a, c, g, or t
  misc_feature (2983)..(2983): n is a, c, g, or t
  misc_feature (3056)..(3056): n is a, c, g, or t
  misc_feature (3058)..(3058): n is a, c, g, or t
  misc_feature (3076)..(3076): n is a, c, g, or t
  misc_feature (3100)..(3100): n is a, c, g, or t
  misc_feature (3160)..(3160): n is a, c, g, or t
  misc_feature (3199)..(3199): n is a, c, g, or t
  misc_feature (3214)..(3214): n is a, c, g, or t
  misc_feature (3235)..(3235): n is a, c, g, or t
  misc_feature (3238)..(3238): n is a, c, g, or t
  misc_feature (3244)..(3244): n is a, c, g, or t
  misc_feature (3261)..(3262): n is a, c, g, or t
  misc_feature (3265)..(3265): n is a, c, g, or t
  misc_feature (3289)..(3289): n is a, c, g, or t
  misc_feature (3299)..(3299): n is a, c, g, or t
  misc_feature (3301)..(3301): n is a, c, g, or t
  misc_feature (3304)..(3304): n is a, c, g, or t
  misc_feature (3316)..(3316): n is a, c, g, or t
  misc_feature (3322)..(3322): n is a, c, g, or t
  misc_feature (3340)..(3340): n is a, c, g, or t
  misc_feature (3346)..(3346): n is a, c, g, or t
  misc_feature (3352)..(3352): n is a, c, g, or t
  misc_feature (3371)..(3371): n is a, c, g, or t
  misc_feature (3376)..(3376): n is a, c, g, or t
  misc_feature (3379)..(3379): n is a, c, g, or t
  misc_feature (3383)..(3385): n is a, c, g, or t
  misc_feature (3387)..(3390): n is a, c, g, or t
  misc_feature (3394)..(3396): n is a, c, g, or t
  misc_feature (3398)..(3400): n is a, c, g, or t
  misc_feature (3403)..(3404): n is a, c, g, or t
  misc_feature (3406)..(3406): n is a, c, g, or t
  misc_feature (3408)..(3415): n is a, c, g, or t
  misc_feature (3417)..(3418): n is a, c, g, or t
  misc_feature (3421)..(3421): n is a, c, g, or t
  misc_feature (3424)..(3424): n is a, c, g, or t
  misc_feature (3426)..(3426): n is a, c, g, or t
  misc_feature (3428)..(3430): n is a, c, g, or t
  misc_feature (3432)..(3432): n is a, c, g, or t
  misc_feature (3434)..(3434): n is a, c, g, or t
  misc_feature (3436)..(3439): n is a, c, g, or t
  misc_feature (3441)..(3441): n is a, c, g, or t
  misc_feature (3443)..(3446): n is a, c, g, or t
  misc_feature (3448)..(3448): n is a, c, g, or t
  misc_feature (3450)..(3450): n is a, c, g, or t
  misc_feature (3453)..(3461): n is a, c, g, or t
  misc_feature (3463)..(3465): n is a, c, g, or t
  misc_feature (3467)..(3468): n is a, c, g, or t
  misc_feature (3470)..(3470): n is a, c, g, or t
  misc_feature (3472)..(3474): n is a, c, g, or t
  misc_feature (3476)..(3483): n is a, c, g, or t
  misc_feature (3486)..(3489): n is a, c, g, or t
  misc_feature (3491)..(3501): n is a, c, g, or t
  misc_feature (3505)..(3505): n is a, c, g, or t
  misc_feature (3507)..(3510): n is a, c, g, or t
  misc_feature (3512)..(3512): n is a, c, g, or t
  misc_feature (3515)..(3519): n is a, c, g, or t
  misc_feature (3521)..(3522): n is a, c, g, or t
  misc_feature (3524)..(3524): n is a, c, g, or t
  misc_feature (3526)..(3526): n is a, c, g, or t
  misc_feature (3528)..(3531): n is a, c, g, or t
  misc_feature (3533)..(3535): n is a, c, g, or t
  misc_feature (3537)..(3537): n is a, c, g, or t
  misc_feature (3539)..(3542): n is a, c, g, or t
  misc_feature (3544)..(3544): n is a, c, g, or t
  misc_feature (3547)..(3552): n is a, c, g, or t
  misc_feature (3554)..(3554): n is a, c, g, or t
  misc_feature (3556)..(3556): n is a, c, g, or t
  misc_feature (3560)..(3563): n is a, c, g, or t
  misc_feature (3565)..(3565): n is a, c, g, or t
  misc_feature (3567)..(3568): n is a, c, g, or t
  misc_feature (3570)..(3570): n is a, c, g, or t
  misc_feature (3572)..(3574): n is a, c, g, or t
  misc_feature (3576)..(3576): n is a, c, g, or t
  misc_feature (3579)..(3583): n is a, c, g, or t
  misc_feature (3585)..(3585): n is a, c, g, or t
  misc_feature (3587)..(3589): n is a, c, g, or t
  misc_feature (3592)..(3593): n is a, c, g, or t
  misc_feature (3595)..(3596): n is a, c, g, or t
  misc_feature (3598)..(3600): n is a, c, g, or t
  misc_feature (3603)..(3604): n is a, c, g, or t
  misc_feature (3606)..(3609): n is a, c, g, or t
  misc_feature (3611)..(3613): n is a, c, g, or t
  misc_feature (3615)..(3617): n is a, c, g, or t
  misc_feature (3619)..(3620): n is a, c, g, or t
  misc_feature (3622)..(3627): n is a, c, g, or t
  misc_feature (3630)..(3635): n is a, c, g, or t
  misc_feature (3637)..(3637): n is a, c, g, or t
  misc_feature (3639)..(3641): n is a, c, g, or t
  misc_feature (3643)..(3643): n is a, c, g, or t
  misc_feature (3648)..(3651): n is a, c, g, or t
  misc_feature (3653)..(3657): n is a, c, g, or t
  misc_feature (3659)..(3659): n is a, c, g, or t
  misc_feature (3662)..(3662): n is a, c, g, or t
  misc_feature (3665)..(3666): n is a, c, g, or t
  misc_feature (3669)..(3670): n is a, c, g, or t
  misc_feature (3672)..(3674): n is a, c, g, or t
  misc_feature (3676)..(3676): n is a, c, g, or t
  misc_feature (3678)..(3680): n is a, c, g, or t
  misc_feature (3683)..(3683): n is a, c, g, or t
  misc_feature (3687)..(3688): n is a, c, g, or t
  misc_feature (3692)..(3692): n is a, c, g, or t
  misc_feature (3695)..(3695): n is a, c, g, or t
  misc_feature (3697)..(3697): n is a, c, g, or t
  misc_feature (3710)..(3710): n is a, c, g, or t
  misc_feature (3738)..(3738): n is a, c, g, or t
  misc_feature (3742)..(3742): n is a, c, g, or t
  misc_feature (3759)..(3759): n is a, c, g, or t
  misc_feature (3761)..(3762): n is a, c, g, or t
  misc_feature (3764)..(3764): n is a, c, g, or t
  misc_feature (3769)..(3769): n is a, c, g, or t
  misc_feature (3771)..(3771): n is a, c, g, or t
  misc_feature (3801)..(3801): n is a, c, g, or t
  misc_feature (3804)..(3804): n is a, c, g, or t
  misc_feature (3825)..(3825): n is a, c, g, or t
  misc_feature (3837)..(3837): n is a, c, g, or t
  misc_feature (3870)..(3870): n is a, c, g, or t
  misc_feature (3876)..(3876): n is a, c, g, or t
  misc_feature (3881)..(3882): n is a, c, g, or t
  misc_feature (3895)..(3895): n is a, c, g, or t
  misc_feature (3901)..(3901): n is a, c, g, or t
  misc_feature (3919)..(3919): n is a, c, g, or t
  misc_feature (3939)..(3939): n is a, c, g, or t
  misc_feature (3941)..(3941): n is a, c, g, or t
  misc_feature (3944)..(3945): n is a, c, g, or t
  misc_feature (3947)..(3947): n is a, c, g, or t
  misc_feature (3950)..(3951): n is a, c, g, or t
  misc_feature (3953)..(3953): n is a, c, g, or t
  misc_feature (3956)..(3956): n is a, c, g, or t
  misc_feature (3959)..(3959): n is a, c, g, or t
  misc_feature (3964)..(3965): n is a, c, g, or t
  misc_feature (3972)..(3972): n is a, c, g, or t
  misc_feature (3976)..(3976): n is a, c, g, or t
  misc_feature (3978)..(3978): n is a, c, g, or t
  misc_feature (3982)..(3982): n is a, c, g, or t
  misc_feature (3987)..(3987): n is a, c, g, or t
  misc_feature (3992)..(3992): n is a, c, g, or t
  misc_feature (3994)..(3994): n is a, c, g, or t
  misc_feature (3999)..(3999): n is a, c, g, or t
tttgtggggctacctagttctacaaggtaacatcggtattatctggcctntattcggcgtatctaaccaattactaggtaccatgacattggctgtaggtactacagttatcatgcgacttggccgcaaacgttatgcatgggtaacaggtattccttgtatcctcatggctatcgttgctatcgctgccgactttgaaaacgtatttaacagctatgtcccagctggtaaatggnttctagtggcattcagtgctgctatgttcctcatgatncttatcgtattagtagaagctgtacgcagctggattcgcttgtccaatattcctcaagactatcgcactcaagaagaaattgaagctgaaagccttgtaaaatacggtaaacaagtaaaagcataatatttgtttttataacgcataaagtgcactcacctttgtgagtgcacttttagtttataaatttgctgctttttttataaaatagtaaaatatacatataaatntatgtgatattcatttatggttatttgtatntgtgtaatagagaaagtattggagcgtattatgaatattagaatggctataatggcagcaattattggttctactacagtttttactgtacatggtgcagatgtatcgattccaggggcaaaccctaaaatgcctgcagtggtgtatgctgataatatcgtagatcaggctaaggtagagaagacagtaaaacaactcgaatctgcgttagataaaaagtttgcctcagagctatctgtagatgacaaaaatagagtaaaaagaaatatcttaaataaaggtgctctagattataaagcacataattataactcctccatttatgtattatctggagaaaatcgttccattcagtttagcttgcctaccacatctaataggagtttggtggcgaatagaggtgaaggatttacaaaatatgctatgtctaatctaggtatgattggtattgaggttgagccagtaaagaatacaggcatttgggctgaatctggtaaaagttatgatgaacttaccgtagaggatatgaaggctgctttctcaaaacacaatccaggttctagtaatgcttttattgatggtggaaagtttacgtatccaggtattgaaaatggtacgtgggatgtagcaacttcacagggtcgtgctggaaaaaatacaattagtacgattaattttacacttaaaaataagccaaattatatgtaccatattggtattgtgaattctgataaaaatgctaactataagcgtgatttaggcttattagcaaattatacaataccttcaattatggaaaagcctatgattactatacctactacagtagaaactcttggtgattttacatatcataaaattaatggtacagttctaaaacaagatatggttaaagacagtggctctattcgtgtgtacgaaacagagggtttagcacatctgttattggttgaccccattaaaaagggcatctctagaaatgaggttttatcaatggcattagtaaatcatgtctttcctaaacaggatgaaaaagttggaaaagtaaatgtttatactgtatggcataacaatacaccaggtatactattggatgttcagtatccttctcgaaaggctatggaaatatcttatattacacgaaatgacaagaatttatttattcaaactattattgctaatcagcataagaaagatattagtcgagacgatataattaacttgcttattgatgtgaaaatgaatggtgaaacattagactctaccagcgtgatttctcctttgccagaatatgatttctaataatattaaaacaaatatattaataaaaacacgaggtaatcgtctcgtgttttcttttttgtaatgctttatagcactattattaacaggtgctaggtaaaacttacatcctcaacatgatataatagttctatgaaacattacgtgcgttcntattggacaaaatataaacaattgtataagaaaggcttaaaaggcattgctgcttttcttgccattggngcgattatagtctttgtgctcgctacgatagcaagccgtgggatgggcgttatttttaacgaggtaatggctcgtcaaacgatgatgagagggactgtaacggtagagagtttaactgcaacaccgtgggggacattatcctttactgacttggtatggaaggatccagaaggccgagagttgctcacagttccagatggaaagattcgcgttaatatgtgggacgtaataacacgaaattttaaggcctctgctataaacggaatcgagctaaatgatgcgaccattgtagtcgatttagacgataacaaccgncttgactttgtgcctgcttcacctgatgtaaacaagccactcaatgaggtagagccgcgacctaaacctccgaaaaagacgactcaagagcgncaggaggaactgggcaagaaggttcgtaactttaattggganggtcaacatttaaatcttacgattacattgagaaataaccagctggaaatctttcagaaaaatcgtcactatgtaatgaggaacgtgaattctaagatacatcttgatagtaaccgtgctattcgtattgatatggaaacgggtaagttcggtggcacagccattggtgatggtcttacactaaaaggtcgtgttgatctaaaggatgtattaaagcatcgcatgcctcagttagacttgcagtttgatgtaaagggtgtggacccatcatcactcggttttggcgataatatccacgatgcaatgaccttgctgacaaaggtaacaggtgattttaatcgtccattggctaaaggtcgtgtaacgatgcctgttttacgaattcctgcgcttacctttgaaaatgtagtaggcgatgtaacgtaccaagacggcattttgaactttgaaaatgtaaatgccaatgtatacggnggaaagctagaggcaaagggcatatataacttagatactcgggcttatacgattacagggatagcaaaggatntngatagtagtgaggctctnaaaacacctgaatttgttgtaccngtgtcggctaatttgaactttaaaagcgagggccagcctcgtgacatggaggtatggggnaatttctggtctggagaaggccactatatgctcattccnattaaaaatattacngggaactttcacaataaaggncgncatttntcctttagtgatgtganngtnaatacgaatattacgaccatttcnacagatgcgntncgnatcgataatggncagctnaccatggggccactcaanattacntcccangggggcagtaattttatcntctangangaannntnnnntgannngnnngannanannnnnnnnannatnaangngnnnangnannnngntnnnnanantannnnnnnnncnnngnnancnnnannnnnnnntannnncnnnnnnnnnnntgangnnnnanaannnnntnntnangnnnngnnncnannnntngannnnnnanangatnnnntngnnancnnnanaannnnntnannnatnnannannnatnntnnnnannntnnntnntnnnnnnttnnnnnngntnnntnataannnncnnnnntnatnatnnttnntnnnanannnttntgtnntttngangntttttatgaaagnatcaaaacaattctctatcgttttggcngcanctgtacttgcttttggngnngntacantngcaccacaacaagcagacgcttcttatggntanaaatatactgattcccaacgnccaccagtatcnactccaacaggttatgttaatccagccatgggntctacngtaanngttacagatcctncacctnctacaaataaattgactnctcctaaagctagtactacnantgnnancannantgngantaatnntgcaccnaaanantctnattanaatgntnttgcng

SEQ ID NO: 933 - DNA, 4000 bp, Escherichia coli
  misc_feature (1412)..(1412): n is a, c, g, or t
  misc_feature (1459)..(1459): n is a, c, g, or t
  misc_feature (2227)..(2227): n is a, c, g, or t
  misc_feature (2408)..(2408): n is a, c, g, or t
  misc_feature (2424)..(2424): n is a, c, g, or t
  misc_feature (2451)..(2451): n is a, c, g, or t
  misc_feature (2540)..(2540): n is a, c, g, or t
  misc_feature (2645)..(2645): n is a, c, g, or t
  misc_feature (2717)..(2717): n is a, c, g, or t
  misc_feature (3224)..(3224): n is a, c, g, or t
  misc_feature (3447)..(3447): n is a, c, g, or t
  misc_feature (3470)..(3470): n is a, c, g, or t
  misc_feature (3524)..(3524): n is a, c, g, or t
ggtgactccggttttatcaaaggaacagcttggcgcatcatgtttgatcccattaaagctctatttgcatcatcgttttctaaaaaagggatcagtgacgcagctaccgagacaagttgttttggagacacatccacatattcaattacgtctggcttagcaagaataaaattaggtgattttctacatgacaaaagttcttctacaaaattcccattttcgtttataggtgaattagcttgagctatagtatacttttcttcttctacggcagacaaatattctattttatctgtaactttcccatctactacttttctataagggctttcaataaatccgtatttattgattctagagtatgtcgctaaactgtttattaatccaatattaggaccttctggcgtttctataggacatatacgtccataatgagtcggatgaacatctctaacttcaaatccagctctttctcttgtaaggcctccggggcctagtgcagaaactcttcgcttgtgtgttatttcagatagtggatttgtctgatccataaattgagataattgtgatgttgcaaaaaaatctttcatagctgcagatattggtctaggatttattaaatcttgaggcatggcagattctacctctaacagagttgacattttttcttttatgactctttccatccttagaatgccaattctaaactgattttctactaattcacctaccgatcttactctacgatttcctaaatgatctatatcatctacttcacctttgccgtctcttaaatcaagcatatgtttaatgattgctacaatgtcctcgtttcgtagaattgttattgtatcactacattgaaggtgtagtttgctatttattttaactctaccaacatccgaaagatcatagcgctccgaagtaaaaaacaacttattaaagatttcgttagcaacttcaaaagatggcggttctcccggtctcaaaactttgtaaatatcattgattgcttcttctttagaattatttttttcaatatttaaagtatcaagtaagtatgaccctttatttatgggatctacatcagctattgtaagtgtattaatatttagttctaatatattatctaaattttcttttgaaatcgatgagccagtttttaaaaaaatttcatcagttaatggatttgacaaattattttttatatatttgtctaaaaaataatcagacgaaaccaaaatatttttcaaaccttcatcataaatttttttagctataacaaaattaattttagatcctatttttaatactttctttccattggtagaatttataagatcgtttcttaatttaatcggacgtttataatcatctggattaaattttgttttccatttttttgttttttnatcaaaattaaaagttttgaaatcataaaataaatctaatatttctntctttttatagcctaaggcatagagtaaagttgtgactggtagttttctttttctatctattctaaaatatagtatatccttaacatcgtactcaaagtctagccaagaccctctatttggtatcactctacaattaaatagcaatttaccgctggcatgtgtttttcctttatcatgatcaaaaaatactccaggacttctatgcatttgatttacaacaactctttcaataccattaattacaaaagttccgctaggagtcattaatggtatatctcccatgtaaacttcctgttcttttgctgaaagaacttgttttgtattattttcttgatctatatcgtatataactaaacgcaaggttggttttaaagctgaggaataggttaaatctctttgtcgacattcttcaacagaaaattttgatttttctaaacgaaaagacaaatattccaaagtcgctttatcagacaattcttcaataggaaaaatgctattgaaaactttaactaaacccttttgtaaactagattcagaatttttttttgaagataaaaattgattatatgattttttttgaacctctattaaattaggaatagataagatttcttttaatttcccaaaattttttctgatacttttttttccagtaaaagataattgcatgcacaacatttacatcctgcgatgtaaattaaaaatttaaatttaaaaaaattactttaattctactttagctccagcaacctctagctttttctttncttcttcagcatctttctttgctacgccagattttatttcttttggtgctgcctcaactaaatcttttgcttcttttaagcctaatcctgtaaacgctctaacttctttaataacgttaatttttttatctccaaatgctgtaagaaatactgtaaattctgatttttcttctgctggtgntgctgccacgggagcngctgctactggtgctgcagctgtaacnccccatttgtcttctaattgttttgataattccgcagcttctactactgtaagttttgataattggtctacaattttatttaattctgncatggatatcctgatttaagtttttctactctttgcgagcgccaaaatagcaatttttgcgccaggtgcaagtaaaatacttattattttttgtgcaggtgttgntaaaatacctacaattttggctctagcttcatccaaagttggtagtgtggcaattttttccacatcttccanagtaagaggctcttcctgcatgattccaccaataatttttaaatttgaattacttttagcaaacttagttaaaatttttgcagaagttattgcatcatccgaaaatgcaacggctgtaggcccggaaaacaaattttctaattttttaaatttgctcccctctaaagctaattttgtaattctatttttggtaattttaaaaagaattccatgttttctcatttcctctcttaatttatcaatttgatttactgtaagaccttgataatgagttacaaaaacagagcttgtttttttaaagaaacttttcatttcttctatataagtcttttttttatctttgttcatcatgacggttatttgcttaattttaatttataagaaattcccatagtagatgttaaaaaagcagataaaataaaatcgcctttaataccgcttggtttttcttttaatatagtttctaaaatagaattatagttttctttaatttttatatcagaaaancttttctttccaattgaagcaccaacattaccatctttatcatttttaatttctatttgaccagactttatagctttgacgatagattttatattattagttacagttccgagttttggattaggcattaagccctttggtcctaaaatttttcccaattttcccatcttaggcatcattgctggtgttacgacaagtttatcaaagtttatttttccattantaatatcattaactaaactatcngcacctgacaagtcagcaccagcatctttagcctcctggactttactatcctcncagaggactgctaacttaattttttttgcattaccattaggtaaattaactaaagttcttaaggaaaattcttcctttttttgttttaagtttaaattaaaagaaacatcaatagattcatcaaattttgttgtgcagttttttttaaccattttaatagcttcttcaattgtttcaatttttttatctttcgaaacttctaataattttttaaatctttttgatgcttttaatttcattaatcctttacctcgatgcccatggatttagctgatccacaaataatttttgtagcttcttttaaatcaaaagcattcaaatctttcattttttcctgagctattttttctgcctgtttcgtagtaattgaaccaactataactcttccgggttcttttgatccgccctttagcttcgcggcctcctttataaaatacgaagcaggaggagatttaataacaaaatcaaatttttta

SEQ ID NO: 934 - DNA, 4000 bp, Escherichia coli
  misc_feature (11)..(11): n is a, c, g, or t
  misc_feature (47)..(47): n is a, c, g, or t
  misc_feature (394)..(394): n is a, c, g, or t
  misc_feature (550)..(550): n is a, c, g, or t
  misc_feature (820)..(820): n is a, c, g, or t
  misc_feature (1150)..(1150): n is a, c, g, or t
  misc_feature (1352)..(1352): n is a, c, g, or t
  misc_feature (1694)..(1694): n is a, c, g, or t
  misc_feature (2641)..(2641): n is a, c, g, or t
  misc_feature (2700)..(2700): n is a, c, g, or t
gcgatttaganacagctgtcgaccagttgcttgaggatatagccganggaaagaagtatatgaaggtgtatcgtcaaatgaaaatgtataatgatgcagatacaaaccctgtgttatataagaaataaaagacgataaactaaatataaactgctcattagaaaaggccgttggaaagaagaaatgaagccttcggcccagtgttttcatgaaacatcttctccttatccgcttttctgcccttggtgatgtagccatgttggtgcctgttgtggcctcgttgatgaaacaatatcctgatattcatgtgacggtgttaagcaaaccctttgcccgttcgctgtttgaaggactctctcctaacgtgagttttatgagtgccgaccttaaaaangactatcaaggactatcaggtttgaatgcactctatcgcagattggctgccaaaaactttactgcggtggccgatatgcatgatgtgctcagaacaaaatacctgcgtttacgattccatttgtgtggatttcatgtcgcacatattgataaacancgcaaaggaaagcagttattgtgtagtgaaaagaataaggtgaaggtgcaacaacccacttcttttgagaattatgcagccgttttagcgaagttaggctatcccgtgagccttgaatttcactctatttttggtgagaaaggggggaatctgcgtcagcttatgcccctcatcggtgagaaaaagaagtttcagcgttggataggaatagccccctttgcagctcataaggggaagatttatccgttagagaagatggaacaaaccatngaacaactgataaaggcctatccctcatgccgcattttcttctttggaggcggtggaaaggagcgcgaaacactcgactcatgggccaaacgctatgccaattgcacgaatgcttcggcagttctcggtggaatgcgcaacgaattgatactcatgagccatttagatgtgatgataagtatggatagtggcaacatgcatttggcctcgttggtgggcacaaaggttgtaagcatctggggagccacgcatccttacgcagggtttatgggctggaatcaaagtgaggagaatgccgttcagttggatatggcgtgtcgtccatgctcngtttatggcaataaaccctgtttgcgcggtgattatgcctgcatgaacgacattcgtccagagatgattgtagcgaaaatcaaacagcttttcaattgaaacagcttagaaagactttccaaatcctaaataaggaaacacaaatacctttttaaccgagtggctttcgctgaatccaaagataggagagatgcctgcacgnaacatgaaaccatggggtgcttgacggcgataaccaatgttagtaaagagataatagaagccaaaactgcggttttctttgatatgtttgtcaaaaactaacttataagaattatcgggttgttgtactaaattatacgaatcatactcgtatctgccgaaaaccaagctgagatttgcacctacaccaagctctaatttcttgtttttacgaccaataagatagtttaatcgtggcacgaaagaaacgatattaaagtgattaatgtcgttgatgaagttatcagatgacagatatgcccatgccaatcctaccgaatagccaaatcctttgttggccttnaagcgcgaatcaaagtgaatacccagcatgtttgaaggtcccatgagttcaacagagaggttttttacgggcttgttcaatgagtctgaaggcgtctgtgcattcatgttcaagactgaaagcatcagtgcgatagcaataaatgttatttttttcatttcgtttagtgttgatatttattataaaagaggtataagaaacctctttttagcatcaaaattatcggttgcaaagataagatgaaatgacgaaataaaagaaaacgtaaatgaaaaaaagtggagtaaagagcgaatttaattgttaacgcacgtcaatttattacacacttagggggtgtttgtgcagcgtttgacgcttttttgtatgaaaagtttgggaaattgaaaataaattagttcctttgcacccagtttttcatttagaaattaattataaacattttaaaaagtaactattatgtcagaaattgaaagcaaggtaaaggctattatcgtagacaaacttggtgttgacgaggctgaagttaagccagaagcaagcttcactaacgatcttggtgctgactctttggacactgtagagctgattatggaatttgaaaaagagtttggtatctctattccagacgacaaagcagagaccattcagactgtaggtgacgccattaagtacatcgaagagaacgcaaagtaatagctttacttaagttattttgcaaataatacgattagggattagtgattaaggattgggttacaacctgttgtgcccagtcactaatccctaatccctaatcttttttatttatattatggaattaaagagagtagtagtaacaggcctcggtgctgttacacctgttggaaacactcccgaagaaacctggaaaaacttgcttgagggcaagagtggtgctgcaccaattactcatttcgatacaacgntgttcaaaacaaagtttgcctgcgaggtaaaagatttgaatttgaacgattatatcgancgtaaagaggcacgaaagatggaccgttattgccagttggctatggttagtgctgcacaaggcatcaaagatgctggtcttgaccttgagaaagaagacctaaaccgcattggtgtggtttatggtgtaggcattggaggaatcaaaacgttccaggatgaagtggtatattatggacaacatgaagatcaaggacctaaattcaatcctttcttcattccaaagatgatagcagatatagcatctggtcagattagtatacagtatggattccacggaccaaactataccacgacgagtgcatgtgcatcttcaagcaacgctttggctgatgcattcaatcttatccgtcttggtaaggccaatatcattgttagtggtggtgccgaagcagccatttgtgagactggtgtcggtggtttcaacgccatgcacgccctttctacacgcaatgatgacccagaacacgcaagccgtccattcagtgcgagtcgtgatggctttgtaatgggcgagggagctggctgtcttgtgctcgaagaattagagcatgcaaaggctcgtggggctaagatctatgcagagatggtaggcgaaggagcaagtgccgacgcacatcatatcaccgcttctcacccagaaggtcttggcgctaaactcgtaatgcaacgcgctttggaggatgctggcctcaaacctgaggatatcgactacatcaacgtacacggaacatctactccagtgggcgatatttcagaggcaaaagctattaaggacgtctttggtgaacatgcttataagctcaatatcagctcaacaaagagtatgacgggccaccttcttggtgctgccggagctgtagaagccttggcttgtgtgctgagtgtgaagaacgatatcgttcctccaaccatcaaccacactgaaggtgacaacgatgaagcattggattacaagatgaacttcacgtttaacaaagctcagaagcgcgaagtgcgtgccgcattaagcaacactttcggcttcggtggacacaactgctgcgttgttttcaagaagtatgctgaataaaatcattgatagaataaagcttcctttccgtaaggagaaggagctttattcgtctttatacactattttaggcttttatccacgcgacatcagctattataagcttgcgttgatgcataaaagcatcatgaaacgcaatgcaaaaggtaagcccgttaacaacgaacgactcgaatttttgggcgatgccatccttgatgccattgttggtcacattgtctatcaacac

SEQ ID NO: 935 - DNA, 4000 bp, Escherichia coli
  misc_feature (1)..(3): n is a, c, g, or t
  misc_feature (10)..(10): n is a, c, g, or t
  misc_feature (14)..(17): n is a, c, g, or t
  misc_feature (170)..(171): n is a, c, g, or t
  misc_feature (183)..(183): n is a, c, g, or t
  misc_feature (341)..(341): n is a, c, g, or t
  misc_feature (418)..(419): n is a, c, g, or t
  misc_feature (438)..(438): n is a, c, g, or t
  misc_feature (443)..(444): n is a, c, g, or t
  misc_feature (810)..(810): n is a, c, g, or t
  misc_feature (923)..(923): n is a, c, g, or t
  misc_feature (1227)..(1227): n is a, c, g, or t
  misc_feature (1419)..(1422): n is a, c, g, or t
  misc_feature (1450)..(1450): n is a, c, g, or t
  misc_feature (1468)..(1468): n is a, c, g, or t
  misc_feature (1725)..(1725): n is a, c, g, or t
  misc_feature (2252)..(2252): n is a, c, g, or t
  misc_feature (2260)..(2260): n is a, c, g, or t
  misc_feature (2263)..(2263): n is a, c, g, or t
  misc_feature (2344)..(2344): n is a, c, g, or t
  misc_feature (2349)..(2349): n is a, c, g, or t
  misc_feature (2359)..(2359): n is a, c, g, or t
  misc_feature (2396)..(2396): n is a, c, g, or t
nnnatggggnggcnnnnacaagttccccggaccttcgtcaggtgtgaacatggtgaagctctgggtgaaaacttccgccaagaagcctgactcgtgcgcgttaaaataacgcgtgattaaagtgaagcgtttttgtatataaaaatagatgtcattctgtacatgtgttnntctcaaagaaantcgccactttcctttccctattctataaatgccctcgcattaagatacccgcgcatacgtatactattaacgcacacactctctctctgcttctgctttttctgtcgctctcgacgtttttgagggaacgatttattgtttacgacgacgatgcgtantacgatggcggcgagaggaagacaaagaaagcgtgcgtcggcctttttcttctccgtcttgtgcatcgcggtgatgnngatggtcgaagcgcaaacnacgannacgaaagtgaaactcaaatcgccggcaaaatctatgctcaaagcgtacgaaatcgtgcgcgtggaagatgtaattcgcgagaacgagaacgtcgacgtggttaaatcgttcgcgatacgcgcgttcggggaacgattcgaggtcgaattggtgtcgaccaaaaccgcctctactaaggggctgttgcgcgaaaattttcaagtgcttcgattcgacggaaagacgctcgaggaagacgaagagactcgagagttggcgaaaagagcggcgactaagtgccagtataaaggcttcgtgaaatcgggaggaggagacgagggtggtgggtctgccgcgaatgctcgtccttctcgagtgtcggcgaangtgtgcgccaaggaggggttcgcgcacgtcgcgctgctcgcgaagaatatgagtttgagtttaatgatgccgcacgagagttttcgggaggaggtggaggaagcgaagagagngaggaagagaagaaagaagagaaggaagattttgaacaacgctttagatgagaacgaaggggaagaagagagcgctgaaaatgaggatgaggatgagagtttggaaagcgtggattttatcgcgtttaacgccgcggacgaagtcgccgagcacttgattggcacacaaagagaccggattaaatttatgccttcaaaaggagacgaagaagaagaagcaaacgacgacgataacaaaaaacgacgaaagttgcaagcgattgattacgcaaacactcgagttatcgaggtgtacgcgcacaangacgaaacgcgagtgtcgaagtacaatacggcgttcgattgcgtgatggaaaccatctcgattatgaattacgtctctgcgttgtatgaaaatgcgttttacccggacattgaaatcgtactcaaagtaatcggatatacggataaaggtgctacagatccgtggggtacagttcaaaaaggcgtgtcgatnnnntgccccgcgtgcgcgactgatgaggtanatagcgacgacttactcnagaaagcagattattggaaatattcttctggaatctccacgttggctgatgccgacgtgctttcagtgctatccgggcataattttgatggtggaaccatcgggttagcgtatacaggtggcgcgtgcaaaggatatggggtaaacgtgaacgaggtgaaccctgcgaattctttgcgatactccgccgcgacggttgcgcacgaaatcggacacaatctcggatttttgcacgacggcgatgatgacgattgtccngataccggtttaatcatggctgcaaaagctggctacgaactcgaaacggaatggagcacgtgtacggtggccaaatatagcgcctcgtatttcgcatacgggtgtttggcgcaaggcagcgaagcggtgtgcgggaacggtatcgtcgaggaaggcgaggagtgcgattgctttggtaatgactgttccgacgcggatgtgtatggaagtgaaaacacgtgttgcaacgcggcgacttgtatgctcaaccccggtatagcatgttcgagctatcacgacggatgttgcgatagttcttgcgttataaaatcgagcggttcagtatgtcgagacgcggtgtccacgtgcgacgtccaagaaacatgcgacggcgcttccaagtcgtgcgtcgcggacggttggaaaccatacggtacaaagtgccaccatggtacgcatccgaacgatattgggagttgctacaaaaatgagtgccgaaaccaacatttttggtgccaacaaatcgattcgacctcccatggcggatnttgcgtgnctnaaaaagtttcgtttccggaaagcgtatgctcgacaactgcgttcaggtgctacggttccgcctcgtcgtgtaacgggccanacgantattccattnaacccgagaaagggtacccgtgctccagcgttccttngacaaccgacggcgtctttgcgaaagtttgcgacgggtacggcggttgcgttgcgccagacgagttgaacaatttacgaggtccatacatcacgtcttcggtgcctgtaggaagcgagccgaacgttaattttgacgtgaatgaaggatttagaaagctcccatcttacaaagttgttgtcgcatattttgcggctatggtgctgatattcgcagaagtgttgttgtattgacctttttagtttgaggaacgagttgaaatatatgttagaaagtttgtatttttgtagcgattaaacatctctctcttctctctctatctcaacaaaaagcgcatgacgtctgataacgcgatgataccttccaacgctcccgttttttcatccactacgactagacgtttcacgcctggtaatcctaatgcctcgaccgccgctcgcaaggtatccgaacgcgtacaggttgaaaatccgccggcgtacgtgctgatattattattacctttcgaaggcgaccctccaccggaatgaaatgggctgtcgctcataccgctggcgttgaatttcggactcggaggtttgttatttaaaacattgctcggcatcgtgttcattgatgatccgtccatggaggcatcgttaccaccaccgcctaacaacgacgatggtgcgtacccaccgccgcccgaagccattctcgagttttgcaacgctctagctatcgtaaattcgtccatgtttacgttcaaatacgcgttgttcgaggctaatttcacaatgtcacttctcgcgtagacgtcaatcaaaccacctctcccgctgtcgtccacgactggtaagcacgagacaccattcatcatcgtaaacgcttccgccaatgttgtctgaggatagacacacctcaaaggcgctagtctttgcaactcttccggaagattagcgaagaactgttcatccgacgccgcttctaccgcgtccgcttgaccgaacgagtttgtcctccgaagtaaggaatcgctcggcgaccgtcttccgccaaactctttcgtccacgtgccaatgggtaaagcaccaagcggctgcgaaaagagcggcaaggaggaaggtacgcctctaaagtgtctgtgcaaacacgcgaaaatctccgcgagattggtcacgtgaagaagctgcgcggcgttccgattcctacttcccattttgttgttgttattgctatctttgttatcactagtatcacccccaccaccatcgccaccaccaccaccgctactacccgatgacttcttgctctggctgccgccgctttgctggccgccgccgccgccgtacgaaacaaccgggacggagtacatgttgttctttaacaaaaccaaagcgaccaggtgtaacgaatcttccggtcgaaccgaaagtaaactcgaattctccacgctcgcgccgcattcttcccgcgctttcgcgacggtaaacctatctaaatcttcttccgtaacttgcttcacgtctttgaacgcctccgagagcactcgcaacaaatctataaactcgccggcggaaatcatcccggcgaaatccccttttgccggattccaaagcggcgccg

SEQ ID NO: 936 - DNA, 4000 bp, Escherichia coli
  misc_feature (61)..(61): n is a, c, g, or t
  misc_feature (249)..(249): n is a, c, g, or t
  misc_feature (497)..(497): n is a, c, g, or t
  misc_feature (1031)..(1031): n is a, c, g, or t
  misc_feature (1039)..(1039): n is a, c, g, or t
  misc_feature (1181)..(1181): n is a, c, g, or t
  misc_feature (1784)..(1784): n is a, c, g, or t
  misc_feature (1991)..(1991): n is a, c, g, or t
  misc_feature (2033)..(2033): n is a, c, g, or t
  misc_feature (2153)..(2153): n is a, c, g, or t
  misc_feature (2268)..(2268): n is a, c, g, or t
  misc_feature (2351)..(2351): n is a, c, g, or t
  misc_feature (3305)..(3305): n is a, c, g, or t
  misc_feature (3421)..(3421): n is a, c, g, or t
  misc_feature (3596)..(3596): n is a, c, g, or t
  misc_feature (3785)..(3785): n is a, c, g, or t
  misc_feature (3957)..(3957): n is a, c, g, or t
ttaaaacaaaatctgaattaattaaaatttttagtgaaaataatgtagattattttaaacntagtgttttttcttgtggttctggggtaactgcgtgtgttttaggactagcatattctcttataaatgatagatattttcctgctatttatgatggatcttggtctgaatacggcaaataaaaaacaatataaatgaaaaaaacaactaaaattacttcgttaattataatttttttcttaataatanccgcaataatagtgggtcgtcagatgatggcatcgcattttaaaaaaaaatttagtaaaaaaccccctcctggaataatagttgcagtagttaaaaatgaaaaattttcaaataaaattgaatcttttggtacagctctttcaaaaaaaactacttcatttagaataaaaaaagaggaattattaaaaccaataaattttgatgaagaagttaaaaaaggagatgtaattgcccatttaaaaagtggnaatattattgctccctttcctgggacacttggaaagagaggtatctctgaagacactttaggttcagagaaatcaataattttgacattagatgatacttctataatttttagtgatttaaaaattcctgaaaactatgcaagtaatataaaaaaaggattaccagttgaggtggaattctctggatataaaggtaaaatttatgaaggagaagtagaaacggttgccaatcgtattgatgctcagacaagaactatgcttgtaagagttaagattataaataaaaattccgagttaattcctggtgctctattagaggttagaatcaaatataatgaaagagagacatttagtattcctgatacaagtacattgttagaaggaaacaaaatttatgtgtacaaagttttagaagataacactattaataaattagaagttgaaacaggtattagaaatgatgggaatcttgaacttatttcaggtctttctcaaggtgataaaattgtagctgaaggcttatctaaagtgagncccggagnaaaaataaaaccaataattaaaactgattgaaattaataaatcattatgtttattaccgatcttagcattagaagacccgttgtatcttcagttttttcgttgatattagttgtatttggaatatttgttttttggaaattncctgtacgagagttaccttcaggacttcaaccacctgtagttcaaattcaagtagattatcaatctgcatctgcgccaataattgaccaagaaataacgcagataatcgaagatgtaataggaggggcagaaggaattaaaaacattgactcctcatctgaaaatggaagaagtacaataaacattgaatttgatactggtatagatttagattcggcggcaaatgatattcgcgaaagagtttctcgtatagttgataatttgcccgatgaagctaaagcaccacaaattttaaaacaagctgctggattcacgacaacaatgtggctttctttatcctctgcaacatggagtgatttagagcttggagattacgcaagaagatatttggttgataatttttctaatatcaaggatgttggaagaatattggtcggaggacttagagaactaagtattagggtttggattgacccaataaaattagctgctaatgatcttactattcaagaagtagaacaggcattaagaaaagaaaatgtaagtttgcctgctggtactttggaggcaaaaaatatagatttgactattaatttagacaantcatataaagatattgattcattaaaaaaattaccaattaaaaaagcaaaaagtagtgtaattcgattagaaaatgttgcgaaattagaatttggtccagtctctcaaaagactttatttaaagctcaaagcattgatggtttaaatctaaaaacagttggaattggaatttatgcccgaagtggagcatctacagttgaattatcngaacttgtaaagaaaagagttaaggaagttcaaaaaacactncctgacggacttaagctagatgtttcatttaatagggcaacttatattaatgctgcaatctttgaagtttataaaacattaattattgcctttgttttagtagttttaataatttatttntttcttggaaatttaaaagcagttattgtacctgccgttgcactcccagtaagtcttattgcttcttttttgggaatttatttatttggtttatcaataaatatttttgttttgntaagttttattttagcaattggaataattactgatgactctgtaattatgacagatgctatttatcgacgaatagagaatggngagactccattagttgctgcttcaaaaggatcaaaacaaattacatttgctatcattgcaacaacacttgttttgttagctgtttttataccattaatttttattgagggaatttctggaactttatttagagaaaccgctatagcactttcttttgcaatagttgtttcttcttttgttgcactaactctttctccaatgcttggttcaaagtttttaaataaaaaaatgaaaaaaaatataatagttttaaaatttgaaaaaatttttaattcattttcaaatttttattctgaaacattgagctattggattaataaaaaaaaaacaattattacatttattattttaataataataagctctgcactactatataattttagtccaaaagaacttttgccgcttgaagaccgcggagtttacttggtaattggaaaaactgatgaagggagttcttttgaatatacaaaaaaaagagctgaagatgtcgaaaaaagattaattccttttctcaaaaataaagatgaatcttaccagagaattattatgcgtgtacctggttttggaagagctagtaaatcttataatagttttataattattgcattacttgatgagtggaaagatcgaaaaaaaagtgcacaaactataatgagaaatgctattggaaaaattgtaactgtaccacaaactcttgcttttccaatttcacctcaatcaataagagtttcaaattatcaaaaaccagtacagatggttgtgcttggcaagagttacaaagaattagaaaaaattcaaaataatatgattaaagaattaagaaaaaataaaaatttagcggcaattgaatctgattattcaagaaataaaccagaaatggaacttattattaataggaaaaaggcaagtgatttaggtatttcaatccaatctattggtaaaacaataganactctatatggtggaaaaactgtaactaaatataataaattaggtaaggaatatcctattattcttcaacaagacattagcaatcgaaaaaatagtgaaagtttaagcaaaatatntgtaagatctgaaacgactggaaaattaatatctttatccagtctagtggaatttaatgagaaaggttctgcaaaaattttatctagatataatagacaaagagccataactatatcggcaagacttgttggtgattatacacttgctgaagctcttactttcttcgaaaaaacngctcaagaaaatatccctcaaacacaattagaatggaaaggaaaatctgaagaattgaaagaagtatcaaatgaactatttattatttttgcactagcaattttaactgcttatttagtaatggcagctacatttaattcttttattcatccattaataattatgcttacagttcctctttctgtgttnggaggtttaatctttatcttattatttaatagttcaataaacattttttcgcaaattgccctggtaatattaattggcatatcaacaaaaaattctattttaattgtagattggactaatcagttaagaacccaaggtaaaaaaatagaagacgctgtcaaagaagcatgtngtttgagatttcgtgcaataataatgacatctttaagcacaat

SEQ ID NO: 937 - DNA, 4000 bp, Escherichia coli
  misc_feature (1991)..(1991): n is a, c, g, or t
attattccttttggagtaggttcctcttttgaaggccatcttaatgctccctttggcggcatatctattgatatgaataatatgaataaaataattaaagtttatccagaagatcttttagtcgttgttcagcctggtgtaactagagagcagcttaacacacatctaagagatactggattattttttcctattgatccaggtgcaaatgcctcaattggaggtatggctgctacaagggcttctggaacaaatgctgtaagatatggaaccatgaaggacaatgtgattgcattggaagttgttactcctgatggtcaaataattaaaacagctaataaagcaagaaaaagttctgctggttacgacttaactcgtttaatagttggctctgagggaactctaggaattgctacagaaattactctaaaattatatggcatcccagaagtcatagcaggtggaagagtcagtttcccctctgtcaaagatgcaacagatacagttattacaacaattcaggccggaatacctgttgctagaattgaatttatggatgtagctcaggtaaaggcggttaataattattccaaaactaatctaccagaggcacctcttttgttagtagagtttcatggaagtgagtcatcggttaaagaacagtcagagttatttggagaaatttcatccgattttggtggtgttgattttgaatggacctctaacaatgaagatagaaataaactctggaaggcacgtcatgatgcatattggtcatgtagagctgtgagaccagaggcttctctttattcaactgacgtatgcgtacccatttcaaaactgtcagattgtataaccgaaactattgaggatttagaaaataataatttaattggacctatagttagtcacgcaggtgatggaaattttcatgttgcgttgctcatagataaaaataataaagatgagttagataagctagagaatttccttgtaagaatatccgagcgggcaataagaatggatggtacttgtactggtgagcatggcgtaggccaaggtaaaagaaaatatatgctaaaagaattaggaaatgctgttgaaattatgaagcaagttaaaaatgcctttgatcctgataaaattatgaatcctggcaaactgtttttgtaatattgctattttataaataatgatttaactacttcttacctattaatcttcataaatcataattattaaggaatatgtttagaattcaatggttacttacgtaattataagttttttaatgatggttacacctggtccgggtgtgttatctttggcaggtgtgggtgctggttttggctggagagttggaattatgtacttgatcggtttgtttttagggacaaacggtgtcgcactattggttgtacttggttttaagcaatttctttttaatattgatggagttgagttaactttcttatttttgtcgttatcttacttatcatttttatcatggagaatagctacttcagataataaaactggttttaaacaaagttttaaatcaccaaagttatatgaaggagtgtttctacaatttgtaaacccaaaggcttatgtcgttcaaggacatttatttgttgttttatccttaggtatattgccttataatttagaaatcattactaaatttatcattgtaaattctatatggatcccaattcattttttttggttatggttaggaataagtttaaaaaaatggtctttggcctctaataaacaaatatgggttaatagaggtatggggcttgctctttttgctgttgtagttttatcagggataatggaattaaattcgaacatataattgattaattattaatcacatagtgttttttgaaaaataaagtgtataaaaattaaacatttttaatgatacctagctcacaattggtaattcgaatcttcttatctgaaagattcgttataatacncacagttcaataaactcccccgttaattgatcttataaaaaactaattattcctccctaatattagttttattcacggtgcagaggatctccttaaaatcctcaccatcaataagtagcccttcctcctgagatatcaaagacacctgcagtagtaaaactattttccttacttgcaagataagcaattaaagaagctatttcctctactgtaacaaatctatttcttggaattttagaaatcatataatcaataaactcttgtgatacttgatctaaaattcttgttttggccgtggcaggagtaatacaattaactgctatatcttggtttgctgtttcttttcctaatgatttagttaatccaattacggctgctttggaagctgaatatgcaggagcatttgggttaccttctttacctgctatagatgcaatattaataattctcccataccctttttcacgcattttttttactacatatttgttacagtaaaaaacaccgttcacatttacatcaaaaaccctagtccattcatcaactggataatcccaagttgaaaaagttggacctgctataccagcactacatactagaatatcaattttattaattagacttattgttttttcagtagcttcctcaactgctttattatcagtttggtctactttcaaaaaatcacaatttaattttttagcagcttctgatcctaattgctcgtcaatatcccaaatcataactttgcaaccatcaccaattaatctttgtgcagtagccaacccaataccttgagcacccccagttataaccgcagtttgtccatcaaaattagccataaattctccccatttttctttaaaataatagatttataaaaattaaataatcatagatattcttaattatattttatatgtttaatttattcattactagaaaaaacaattcctaaggaacagttttatggacattatacacatagttattattggaattctttcttgcatcgcaatggatttatggcaaagactgctaaagataatgattaatgtaagcccgtctgattggtcagttgttggaaggtggtttatattgtcaataactaaaggaaaagtatataatccaaatatagataacgagtctcctataaaaaacgaattatcaataggctgggttgttcattattctgtagcaattttgtactcattagttttttttatattgtataaatatgaggtatttaatgcctcttatattgatggaattatcttcgggttaattagtgttgtagttccatggtttttctttatgcccattctcggaaagggttttttagcttcaaaaactccagcccccttaatggcttgctctctagcggttggaagtcatgttataattggtttggctataggtttatgttttcaaatttttgggtattaatagctttatggatttttgaaaaatgtcagagactaaattaagagaaaatatatgtcagtttgctacttctttatttgatagaggaataacacatggttcaacaggtaacatttcagttagattaaatgattatgaaattttagtaacaccctcgggatcttcttttggaagattagatcctaatgaaatagtaaaaatttcaaaatctggagaattttctggagtcctacctcctactaaagaattaccacttcatcaggcattttatgagacacgaggattaaagtctggtgcagttgttcatttacattcaactcattcagttgccttgtcaatgttaccagaaattgatgaagacaatgtactgccatcatatacaccttactcaataatgcttttaggaaaagtaaagttactccctttttttgtaccaggggacccagctatgggagatgcaataagaggattggcaggaaaaagatctgcagttttattagccaatcatggtccggttgtatcaggtaaagatcttgaagcatcagtaaatgctatagaagaattag

SEQ ID NO: 938 - DNA, 4000 bp, Escherichia coli
  misc_feature (135)..(135): n is a, c, g, or t
  misc_feature (1933)..(1933): n is a, c, g, or t
  misc_feature (1989)..(1989): n is a, c, g, or t
  misc_feature (2158)..(2158): n is a, c, g, or t
  misc_feature (2248)..(2248): n is a, c, g, or t
  misc_feature (2255)..(2255): n is a, c, g, or t
  misc_feature (2259)..(2259): n is a, c, g, or t
  misc_feature (2377)..(2377): n is a, c, g, or t
  misc_feature (2497)..(2497): n is a, c, g, or t
  misc_feature (2545)..(2545): n is a, c, g, or t
  misc_feature (2547)..(2547): n is a, c, g, or t
  misc_feature (3032)..(3032): n is a, c, g, or t
  misc_feature (3185)..(3185): n is a, c, g, or t
  misc_feature (3461)..(3461): n is a, c, g, or t
  misc_feature (3469)..(3469): n is a, c, g, or t
  misc_feature (3522)..(3522): n is a, c, g, or t
  misc_feature (3569)..(3569): n is a, c, g, or t
  misc_feature (3608)..(3608): n is a, c, g, or t
  misc_feature (3671)..(3671): n is a, c, g, or t
  misc_feature (3673)..(3673): n is a, c, g, or t
  misc_feature (3675)..(3675): n is a, c, g, or t
  misc_feature (3683)..(3683): n is a, c, g, or t
  misc_feature (3690)..(3690): n is a, c, g, or t
  misc_feature (3699)..(3699): n is a, c, g, or t
  misc_feature (3701)..(3701): n is a, c, g, or t
  misc_feature (3704)..(3704): n is a, c, g, or t
  misc_feature (3706)..(3707): n is a, c, g, or t
  misc_feature (3714)..(3714): n is a, c, g, or t
  misc_feature (3717)..(3718): n is a, c, g, or t
  misc_feature (3720)..(3720): n is a, c, g, or t
  misc_feature (3722)..(3722): n is a, c, g, or t
  misc_feature (3749)..(3749): n is a, c, g, or t
  misc_feature (3754)..(3754): n is a, c, g, or t
  misc_feature (3756)..(3756): n is a, c, g, or t
  misc_feature (3772)..(3772): n is a, c, g, or t
  misc_feature (3791)..(3791): n is a, c, g, or t
  misc_feature (3794)..(3794): n is a, c, g, or t
  misc_feature (3816)..(3816): n is a, c, g, or t
  misc_feature (3822)..(3822): n is a, c, g, or t
  misc_feature (3829)..(3830): n is a, c, g, or t
  misc_feature (3854)..(3854): n is a, c, g, or t
  misc_feature (3879)..(3879): n is a, c, g, or t
  misc_feature (3881)..(3881): n is a, c, g, or t
  misc_feature (3886)..(3887): n is a, c, g, or t
  misc_feature (3889)..(3889): n is a, c, g, or t
  misc_feature (3891)..(3892): n is a, c, g, or t
  misc_feature (3895)..(3895): n is a, c, g, or t
  misc_feature (3897)..(3897): n is a, c, g, or t
  misc_feature (3907)..(3907): n is a, c, g, or t
  misc_feature (3915)..(3915): n is a, c, g, or t
  misc_feature (3923)..(3923): n is a, c, g, or t
  misc_feature (3925)..(3925): n is a, c, g, or t
  misc_feature (3927)..(3927): n is a, c, g, or t
  misc_feature (3939)..(3939): n is a, c, g, or t
  misc_feature (3941)..(3942): n is a, c, g, or t
  misc_feature (3945)..(3945): n is a, c, g, or t
  misc_feature (3952)..(3952): n is a, c, g, or t
  misc_feature (3954)..(3954): n is a, c, g, or t
  misc_feature (3958)..(3958): n is a, c, g, or t
  misc_feature (3960)..(3960): n is a, c, g, or t
  misc_feature (3962)..(3962): n is a, c, g, or t
  misc_feature (3965)..(3966): n is a, c, g, or t
  misc_feature (3968)..(3968): n is a, c, g, or t
  misc_feature (3975)..(3975): n is a, c, g, or t
  misc_feature (3992)..(3992): n is a, c, g, or t
tcccaaaggtttatcggaggctgagatgagcgacacgaacatgatcgagactatgcaaagcgctgccgagcagctctcccctgtgctttggaatgcgcactgggaagctctccaagatgccgagcgacgtatgcncgggcttgcccacgaaaagtatccgatgctgcgtccactcgtcgcacgcgcgtgcttgcgtgaggtcctcacggctgggggtgagcttccgaatgggtggcgggtagccggttcgccgcaacgcatgggacagctgctggtggaatcggatggagtctgcgcgcgctttttgaaagagtcttcaactgtctttcctggcggggttccggctgccggtcggaatggggcgcgtcaggccttctggcagccgtcccttcttgaggttgaagacgagggtgctcccgcgttgaatcttctgctcctctgggactatgtggacccgggcagggttgaggagggcttcacattgcgtctcgttcatccgaaagggaagggtgcgttcggcagtcaaacaccgattgatgcaagtattccgctgagtgatgacattggggtcttgaaggcgctgcgattcgtcgataatcaagaaaatccgttggaggacttctttgctcagatcgacgcggaggaggctatagctgatgggttcggtgaataggtgttatgggaggcgtctgtcggcccttctggatttggaagggatgacacagggagaactggcttctcgtttgggtatgacgcagggagccgtctcgaaaattgtgcacggtgtttctccattttccgaggagctggtgacgagactagctctggagttcgatgttccgccttcgttttttgctcgtgctccgcgtgtgtcggatgcggctgccgcaacgttccgaaagaagtcttcaacgcgggcgcgtgaggaacgccgaatcggtgtactcgtgcagcttgcgggtgatctgtggcgcgtgacgtctcttgagtcggggtatcgcacattcgttcctcctcagatgagcgggttggatgctgaggatgcggctgcggcgatccgggaagtcgctggcttgcgtgcggacgcgccggtcggttccatgacaaggctggtggagcgtatgggcgttgcagtcgtggccaacttggatcctgagcgttcttatgggacggacatggctggggtgtctcacccgtccgctagtgaggacaggcctctggttggcactttggctcccaaacgtggagatgtgcagcgtctgactattgcgcacgagttggctcacctgctctttgatcacgatatggctagggcaccccgtgcgaggtcacctcaggaactgaaggcatttgattttgctggtgcgcttcttttgcccgaagctcctcttcgtgagcttgttcatgagcgttctatgctgactgacttattgcgaattaaggcacgttttggagtgtccttaatggcaatcattaagcgtgccagtaggctccatctaatctctgacatgcgggcaaagagtctgtatgggcagattaatgctcgcggttggaggttcgatgagcctgtcgaggtccccatagagactcccgctctgtttttgcaggctgctgagcgcgtttggccgggtttgccggtgcggaggatcgcagaggaaacgggtgttccttcttgcttcatcatgccctggattggcgtcagtcacatgtccggcgcgagggaagaaaggcaggaaggggcgcaggtgatcaatcttgcggcgcgccgcgcagtaatggcgtctaccgggggaatgtaaccctgtgggtgcaggccgctagcgcgtggccgtgtgtatgtcttgggctcgtgactgaggtttccgtgagtttgcggttgctgagttgcccctgggattaggctgtggtttctcggccgcccagggcgacgttncgcagcatcgccccgtaggcgcgcgagtcacggctcatgcgctcgcaatggccccnccccggccacacgaccaactccgcgtcgggatagaggcgcggaaccgtgcgccgtgccagtcgcaggtccgagtctttctgcccgtacgcgaacgtgcagcggcgctgaacgtcgggggacaggtgcggcagtgtgacccgcgagcagtcgcgcacgatcgcccgaatnctctcctcgctcatcgcagcaaggctctcggccatggggcgggcgacctcttcgccgaaaagccgcgcgagcttgcgaactcctgcctcngggtcgngcanggccttgcggtgctttgcgaccatgatgtggctcaggattgcgccgcccgtcctcgagatcggccctcccgagtagaagctcacgccttcgatgaagaggcggtcaaacgacagatcngggaagcgcagtagctcgaagaacacgacgccgccgagcgacgccccgaatcccagagccagacggcggatcccgtggtccaccagccaggagtggatcgccgccgcctcggccgccgcngacacgtagggggccgaggcctcgtccccgtgggcggacaggtccggnangaggaaacgcagcccgtcgcccatgtggtcggcgactgcggccttcatgcgcgaggcagacgacagcattgggtgaataaggaggacggtgggggagtcgtcggcgctggagccgtagacgtgcatgttcatggcgttgccctcgtgcggtgtccttgtggtgggaacggacctactcgtagtttcgagggtctagcgaacccatgaaatgatctcggttcatggaggtcgtccagagccgcgcttcggtttttatacttccaaacgttcgcctgtcggaggggtcgtaccactttgccgcttcaatctttgcggcctgtagtttgtgtgcttcatcaagggcaggggcgaggtcggtatcccgcgaggcgagggtaacgacgtcgtagctgcctgatcgggcgagcctaacgagtgcgagggcgcacataacgtcaatgcccttttctctgcgagatgatcggatcggaatcttatttccctcnatccattcccagttgtacttgagtgggcgcagagttaccgagacggcattgtgatgtccgtactcccattgtgattgttgctcaaggttgcggcggtaaccgtcagggtcgtcgtcggggattgggatgccgcggaagacttcgactcgtganacttcaacctcatgttggccatccttgttacgtgccttcgcaagttgcttcgcgaaccgaaacgggtcgatcaggctctcctcgatagggcggccgggcagaaagagttgggcggctgtgaggtgaacgttctgatagtcgatgacgacggccatacgcacagtcattgtgacgcctccggatagagtaaaccccgccaatccctggggatgacggggagctatggcaggaagcatagcagctgtgcatgccgttatgcaagacaatgtgccgtgnatctgttnaagggtagcgcgtggatgcccgcaaggtagctcccgagaaactcaagacgatnatccggcacccgatcaaactcgcgggcgacgcctaacagtccgaatngcagcggcccggtccgcaccgagctgtcaggtggtcccngcccgcgcgggcgcggacctactagccttcgtgcgggaatgcgggtaatgttggtctgttcanancntaaccaanggagaanatgatgctngnggngnngaccccnacnntngngggtacgccgattaagcgctacatcgncatgntntccggcgagacgttcnccggtgtcaatgtcttcanggnctttggcgccagcctgtccaanatgttnggcggcnncgcctcccagtacgaggaggagancggcaacgccgccgcaacggccgtnancgagnngngnncangngcgcaggcgntgggtgcnaacgcggncntnggcgtgaaggtngnntanttcacgncnggcngngncanngntatgctngccgcaattgcgacggnaaccgccg

SEQ ID NO: 939 - DNA, 4000 bp, Escherichia coli
  misc_feature (70)..(70): n is a, c, g, or t
  misc_feature (237)..(237): n is a, c, g, or t
  misc_feature (405)..(405): n is a, c, g, or t
  misc_feature (416)..(416): n is a, c, g, or t
  misc_feature (473)..(473): n is a, c, g, or t
  misc_feature (487)..(487): n is a, c, g, or t
  misc_feature (491)..(491): n is a, c, g, or t
  misc_feature (495)..(495): n is a, c, g, or t
  misc_feature (500)..(502): n is a, c, g, or t
  misc_feature (504)..(504): n is a, c, g, or t
  misc_feature (510)..(510): n is a, c, g, or t
  misc_feature (513)..(513): n is a, c, g, or t
  misc_feature (515)..(515): n is a, c, g, or t
  misc_feature (524)..(525): n is a, c, g, or t
  misc_feature (534)..(534): n is a, c, g, or t
  misc_feature (540)..(540): n is a, c, g, or t
  misc_feature (545)..(546): n is a, c, g, or t
  misc_feature (554)..(555): n is a, c, g, or t
  misc_feature (558)..(558): n is a, c, g, or t
  misc_feature (575)..(575): n is a, c, g, or t
  misc_feature (582)..(582): n is a, c, g, or t
  misc_feature (585)..(585): n is a, c, g, or t
  misc_feature (588)..(588): n is a, c, g, or t
  misc_feature (597)..(597): n is a, c, g, or t
  misc_feature (600)..(600): n is a, c, g, or t
  misc_feature (602)..(603): n is a, c, g, or t
  misc_feature (822)..(822): n is a, c, g, or t
  misc_feature (1021)..(1021): n is a, c, g, or t
  misc_feature (1024)..(1024): n is a, c, g, or t
  misc_feature (1027)..(1027): n is a, c, g, or t
  misc_feature (1036)..(1036): n is a, c, g, or t
  misc_feature (1038)..(1038): n is a, c, g, or t
  misc_feature (1210)..(1210): n is a, c, g, or t
  misc_feature (1267)..(1267): n is a, c, g, or t
  misc_feature (1269)..(1269): n is a, c, g, or t
aagcaatcccccctcataagcgtcatcatgccactctacaacgcagagcgattcgtcggcgaaagcatcngcaacatcctcggacaaaccgtcggggatttcgagctgatcgttatcgacgacgcctcgacggactcctcgtacgacatcgcaagccgttatgccgcgcaagacgcacggatcgtcctgatgcgcaacgacgcgaaccacggcgccgcctatacccgcaaccggggnctggagacagcgcgcgggagtttcattacgttcatggatgccgacgaccgctgttcgccggaacgtttcgcccgccagacagcattcttcggacagcacccgcagatcgacctgtgcggcagttactatacgatgttcgggccggacgatgcccgggaacagaagatncaggatcccancacgcacgaaggaatccggatccagatgcttttcggctgcccgttcgcaatgtcggnggtcatgatgcgcngcgnggcnttccnnngntcgggngtncngttccgggnnaccatggcngaagantaccnnttctgggnnganctttccgggcacatgcncatggcnaanatnccggaacanctntnnttctaccgcaggtgggaaaaccaactttcgaccagccagttagaccggcaaaccctcagcgcgcaagctatccagcgggatctgctgcgcacaaccctcggcatgacgctcaccgacgaggaatcgcggatatacacgcagatgaacctccgggtcgggacactgcggcgcgacgaacttacgacctaccgcggcctgctcaaacgactctaccgcgcnaactccgaacgcagggcctacgatccgaaactgctgcgcaaacggctggtttaccgttacaagctcgcctgcaaatgtttctatccctcgtggaccgtaaaaatcaggaaacgcctgctgtggctcgaactccggtgatatgaaaaaagtcagcatcataatcccgttgtacaacctcgaaaaactgatcgggaaatgnatngcntcggccctngngcaggatttatctcccgaggagtacgaaattctggtcatcgacgacgggtcgacggacgggtcgctcgcagccgccgaaaaggcggcgcaggggcaccccaacgtacatgtatataccaaacccaacgaggggctgagccgcacgcgcaactacggcaccgaccgcgccgcnggcaggtacgtcatgtatctcgacgcagacgattacctcgaaccgaatgtcctcggncncctggtggaaaccatggagtgcggagggctcgacatgctgtgcttcgaaatagctggaatcgacgaaaacggcaacgacgtcccactctggagcgacgggatttccgcaggaaacggctccgacgtgcagcgcggagtcgatttcctgcaacgcgaccggttcctgccgatggtatacgcctacctctactcgcaggagatgctcgacgccaactcgctgcggatggctccgatctggcacgaggacgaagagttcacaccccgcgcgttgtattacgcacggcggatccaatacctccccgtccgggtttacaactacctgcaacgcagcgattcgttcatgggcaattacaagccgcaaagtcgcttagacctcgtacgcgccatgaaaagcctgacctgtttcgcctcccgcatcggggcggaagacccctcaggcgcccgcctgatgcacctgcatgtgggcaagaccctaagcctggcatgcaaacagaccgtggtgaggcaactcggcaacgcccgcgaaatgctccgggaagcccgccggcaaggcatcatgccgctccaattccgccgccgggacttccggcatttcctgataaaccgcctgccgggcctgtacgtcctctactacaagctgcacaagcgccaaaaataactgcaaactattgccgggacggcagttccgcagatgaaaaaatattgcggcggggagtgatgtccccgccgcaatattttgcggttttgaaagaaatcattacttttgtaagatttacgtacacaaccccgaaataactgaaatcacatatggaaatagttgcaagtttaatcaaacttttcttcggctcgaaagccgacaaagaccgcaagcagatcgagccttacctccagaagatcaaagcggtgtacccttcgatagaagccctttcgaacgacgaactgcgtgacaggagcgaagcgctgaagaaacagatcgccgatttcatcgcccgggacgaggccgacatcgtggaactgaaggccaagcttgaactgcccgaaacctcgctggaggagaaggagcgtatctcgaagcagatcgacgagacgaccaaacgcatcgacgagaagatcgaggagaaactcgacgagatactgcccgaagccttcgccatcatgaaggatacggcacgccgcttcgcgcagaacgacgaggtggtcgtcacggccaacgatttcgaccgggatctggccgccgagaaggatttcgtccgtatcgagggcgataaggccatctacgccaaccactggatggcgggcggcaacgacctgaaatgggacatgatccattacgacgtacagctgttcggcggcgtagtgctccacaaaggtaaaatcgccgagatggcgacgggtgaaggaaagacactcgtggcgacgctccccgtattcctcaacgcactggccaagaagggcgtgcacctggtcacggtgaacaactacctggccaagcgagactcggagtggatgggcccgatgtaccagttccacgggctttcggtagcctgcatcgacgacacgcagcccaactccgacgcccgccgcaaggcatacatggccgacatcacgttcggtacgaacaacgaatacggcttcgactacctgcgtgacaacatggcctcgtcgccggccgatctggtgcagcgcaagcaccacttcgccatcgtcgacgaggtcgactcggtgctgatcgacgacgcccgtacgccgctcatcatctccggcccggtacccaaaggcgacgaccagctcttcgagcagtactgcccggccatcgaccatctctacaacctgcagaaaaacctcgtgacgggcctgctggccgaggcacgccggcttatctcggagggcaagaacgacgagggcggcgtgaagctctaccgtgcccacaagggcctgcccaagtacaagccgctgatcaaatacctctcggaaacgggcgtcaaggcactgatgcagaagaccgagaacacctacatgcaggacaacaaccgccgtatgccggagatcaccgacgacctgttcttcgtcatcgacgaaaaactcaattcggtggaactgaccgacaagggacacgaggtgctgtcgaaatatttcaacgaggacgggttcttcgtgctgcccgacatcggcgccgaggtggccgagctggagaagagcaacctctcggacgaggagcgtgcgcagaagcgcgaccaggtggtcaacgactattcgatcaagtcggagcgcgtgcacacgatccaccagctgctgaaagcctacgccatgttcgagaaagacgtcgaatacgtggtgatggacaacaaggtgaagatcgtcgacgaacagacggggcgtatcctcgacgggcgccgctattcggacggcctgcaccaggccatcgaggccaaggagcacgtgaaggtcgaggctgcgacgcagacctttgcaacgatcacgctgcagaactatttccgcatgtaccacaagctggccggtatgaccggtacggccgaaaccgaggcttcggagttctggagcatctacaaactcgacgtcgtggtgatcccgacgaaccgcccggtgatccgcgacgaccgccaggatttgatttacaagaccaagcgtgagaaatacaacgccgtgatcgaggagatcgtgaagctggtcgaggcgggacgccccgtactggtgggcaccacctcggtcg

SEQ ID NO: 940 - DNA, 4000 bp, Escherichia coli
  misc_feature (82)..(82): n is a, c, g, or t
  misc_feature (139)..(139): n is a, c, g, or t
  misc_feature (928)..(928): n is a, c, g, or t
  misc_feature (1003)..(1003): n is a, c, g, or t
  misc_feature (1225)..(1225): n is a, c, g, or t
  misc_feature (1231)..(1231): n is a, c, g, or t
  misc_feature (1479)..(1479): n is a, c, g, or t
  misc_feature (1626)..(1626): n is a, c, g, or t
  misc_feature (1791)..(1791): n is a, c, g, or t
  misc_feature (1797)..(1797): n is a, c, g, or t
  misc_feature (1991)..(1991): n is a, c, g, or t
  misc_feature (2012)..(2012): n is a, c, g, or t
  misc_feature (2469)..(2469): n is a, c, g, or t
  misc_feature (2497)..(2497): n is a, c, g, or t
  misc_feature (2516)..(2516): n is a, c, g, or t
  misc_feature (2591)..(2591): n is a, c, g, or t
  misc_feature (2594)..(2594): n is a, c, g, or t
  misc_feature (2600)..(2600): n is a, c, g, or t
  misc_feature (2622)..(2622): n is a, c, g, or t
  misc_feature (2630)..(2630): n is a, c, g, or t
  misc_feature (2684)..(2684): n is a, c, g, or t
  misc_feature (2690)..(2690): n is a, c, g, or t
  misc_feature (2693)..(2693): n is a, c, g, or t
  misc_feature (2720)..(2720): n is a, c, g, or t
  misc_feature (2732)..(2732): n is a, c, g, or t
  misc_feature (2756)..(2756): n is a, c, g, or t
  misc_feature (2789)..(2789): n is a, c, g, or t
  misc_feature (2807)..(2808): n is a, c, g, or t
  misc_feature (2816)..(2816): n is a, c, g, or t
  misc_feature (2820)..(2820): n is a, c, g, or t
  misc_feature (2855)..(2855): n is a, c, g, or t
  misc_feature (2873)..(2873): n is a, c, g, or t
  misc_feature (2876)..(2876): n is a, c, g, or t
  misc_feature (2942)..(2942): n is a, c, g, or t
  misc_feature (2951)..(2951): n is a, c, g, or t
  misc_feature (2963)..(2963): n is a, c, g, or t
  misc_feature (2990)..(2990): n is a, c, g, or t
  misc_feature (2996)..(2996): n is a, c, g, or t
  misc_feature (3003)..(3003): n is a, c, g, or t
  misc_feature (3041)..(3041): n is a, c, g, or t
  misc_feature (3044)..(3044): n is a, c, g, or t
  misc_feature (3053)..(3053): n is a, c, g, or t
  misc_feature (3095)..(3095): n is a, c, g, or t
  misc_feature (3107)..(3107): n is a, c, g, or t
  misc_feature (3131)..(3131): n is a, c, g, or t
  misc_feature (3134)..(3134): n is a, c, g, or t
  misc_feature (3158)..(3158): n is a, c, g, or t
  misc_feature (3161)..(3161): n is a, c, g, or t
  misc_feature (3194)..(3194): n is a, c, g, or t
  misc_feature (3200)..(3200): n is a, c, g, or t
  misc_feature (3203)..(3203): n is a, c, g, or t
  misc_feature (3230)..(3230): n is a, c, g, or t
  misc_feature (3236)..(3236): n is a, c, g, or t
  misc_feature (3266)..(3266): n is a, c, g, or t
  misc_feature (3272)..(3272): n is a, c, g, or t
  misc_feature (3278)..(3278): n is a, c, g, or t
  misc_feature (3287)..(3287): n is a, c, g, or t
  misc_feature (3290)..(3290): n is a, c, g, or t
  misc_feature (3317)..(3317): n is a, c, g, or t
  misc_feature (3323)..(3323): n is a, c, g, or t
  misc_feature (3341)..(3341): n is a, c, g, or t
  misc_feature (3356)..(3356): n is a, c, g, or t
  misc_feature (3374)..(3374): n is a, c, g, or t
  misc_feature (3407)..(3407): n is a, c, g, or t
  misc_feature (3419)..(3419): n is a, c, g, or t
  misc_feature (3446)..(3446): n is a, c, g, or t
  misc_feature (3452)..(3452): n is a, c, g, or t
  misc_feature (3542)..(3542): n is a, c, g, or t
  misc_feature (3548)..(3548): n is a, c, g, or t
  misc_feature (3563)..(3563): n is a, c, g, or t
  misc_feature (3581)..(3581): n is a, c, g, or t
  misc_feature (3607)..(3607): n is a, c, g, or t
  misc_feature (3678)..(3678): n is a, c, g, or t
  misc_feature (3680)..(3680): n is a, c, g, or t
  misc_feature (3689)..(3689): n is a, c, g, or t
  misc_feature (3698)..(3698): n is a, c, g, or t
  misc_feature (3719)..(3719): n is a, c, g, or t
  misc_feature (3722)..(3722): n is a, c, g, or t
  misc_feature (3764)..(3764): n is a, c, g, or t
  misc_feature (3824)..(3824): n is a, c, g, or t
  misc_feature (3828)..(3828): n is a, c, g, or t
  misc_feature (3860)..(3860): n is a, c, g, or t
  misc_feature (3886)..(3886): n is a, c, g, or t
  misc_feature (3955)..(3955): n is a, c, g, or t
  misc_feature (3982)..(3982): n is a, c, g, or t
  misc_feature (3988)..(3989): n is a, c, g, or t
caatgacccattgattgacaaccgcgactcaaagaaacgctatcgtgcagatgttctcattgaagatcagatagcaaagtangatgaaaagattgaaaaagaagttgctaaagctgctaaaaagtttggtgacagcttngaagaaggcaagttccgcgagaccaacatacgtgttttggaaaaccaaaagaagcgcgatgcattgcatgaacgctatactcaggccatgcaaggccccgatttggaagctctaaaacaaatcattattgacgaaggaattgtagatcccatcagtggtacaaagaattggacggacgttcgccaatttaacttgatgttttctactgaagttggttctctaagtgaccagacaaacaaaatctatttgcgtccagagacagcgcaaggcatctttgttaattatctaaacgtacagaaaacaggtcgcatgaagcttccttttggcatctgtcaaatcggcaaagcattccgtaacgagatagtagcgagacagtttgtattccgtatgcgcgagttcgaacaaatggaaatgcagttcttttgtcagcctggtactgagatgaaatggttcgaatattggaagaaacaccgtttagcttggcacgaagctcttggtatgggcgacgagaactaccgctttcatgaccatgaaaagctggcacattacgccaacgcggctactgatatagagttccatatgccgtttggtttcaaggaggttgaaggcattcattcgcgtactgactttgatcttagtcagcatgagaagtttagtggtcgttcaattaaatactttgatcccgataagaacgagaattatactccgtatgatgtagagacttctatcggtgttgaccgcatgttcctttctgttctctgtcatagttacacggaagagcagcttganaatggcgagactcgtgtggtattgaagcttccagaggctttagcaccagtgaaatgtgccgtattcccactcganaagaaagacggactgccagaacttgctcaacagattgttgacgacttgaagttccatttcaacacacactatggcgatccaaaggattctatcggtaaacgttatcgccgacaagatgcagttggtacaccattctgtgtcactgtagaccacgatacgccaaaagatcacaaggtaacactgcgctatcgtgacacaatgaagcaggaacgagtagacatngacgcnctacgtggcatcatggaagagcgtgttagcatctcaagtctactgaaaaaacttaatgtaaaagaatgaaacgtaacctattatatatcctgttgctcatgattaccacctgtgtggtaacgtcatgtaaggaagaaggcgactcaaacaacgagttttctaattggcaatctcgtaataacgagtacttcaataaagtctataaggaagctcaaacggcttcatcgacaaactcaaatatcaagatnttacgtagttggtccttaggaaatgaacttcaaaagcctgaagatcacatcgtggttaaggtgttagagaatggtacagggacaaaaacaccagtctacaatgatagtgtttatgtgcatgttcaaaagcgattgattccttctgcnacttatcctgacggcaaaatctttagtcagagctggacaacagaagtctttaatcccagtgttagcgcccctattgagattgcagtaaatgcacaatgcgatggttttgcaaccgctttgcaacacatgcacgtaggagacagatggcgagtatatgtaccttangccctnagtgaaagcaatgcagaaggtcaatacgacctccccagccattcaatgcgcatctatgatgtcacacttgcaggcataaaggcagagaaatagacgataaaacaccgctataaagataggatatataatataaggtgtaatcaacatgcacatgagtcaacttgacttatgtgcatgtttgcattaaaacaaancacgtgtgtacgtacacaatngcttgatttaagtcaaaaaacgacattatttccataatttcgcgttcaaaaatatggcagaaagagaaatcgttcctatctttgcatcgtctaaaagaggtaaaagattgagataacgacaaaggttttaggttagacagacaaagagattaagtttagaataggtatttggttttaggtaaaataaaagatcttcaaaggtattataaggtaaaagattcagggaaacaggatttagagagtcactacaaaaaggacataggttagtcttgaaaggtaaatgaaaagattgtttcagaatagataacacataaagagaaagtaaaagaaaacttgatagatttgagagacagacggtttcataggaatatggaatcgttttttttgtgatttacccgaaaatctattaattttgcatcattaaaataaggtatgttaggaaacaaaaagagtgaancgctattagcaaacatccgtaatggccngcccatgccacagaatganaaactcaaactgattgtaagtttgagtattccctctatattagcccagatcactacagtcatgatgttcttcatngangcctcnatggtgggacatcttggggcanaagcctcngcaagtataggcttagtagagtctacaacatggctaatgggtagtgtaatgagngctgcntcnatgggcttttcggtacaagtttcccanttcattggtgcnaatgacttcttcaaagcacgtcangtctttcggcatggactgctttgtggtctcgcntttagcctcattatagcnnctataggnacgncaattcactccgtacttccattgtggttagggggnggaaatgacattaatcangangcctctcaatactatttggtgttctcattaaccatgcctttcatcctacttttccatctttcggcntccatgatnaagtgttctggnaacatgcaattaccgagtttaatgagngttttnttgtgtnttcttgacgtgattttcaactacttgttcatctatatnttncatttgggngtggtaggtgcggcaatcggcacctcaatggcatatatttcnacttcacttccnatagcttggatggccacaagacgnaanaaaatattagcacttcagcttganaangtgccatttaaatgggtttgggactatgtaacnaaagcnatncgaatcagtcttcccatggcaattcantcggtnttaatgagcggagcacagattgttagcacnctaatngtggcnccattaggnaanattgccatcgcttctaactcctttgcnatcacngcagaaagcctttgttanatgccaggttatggnataggcgacgctgcaacnactttagtgggccagacttatggtgctggacgnaaggacctttgnaagagttttgctcacatgaccgtaggnttaggnatgcttgtcatggcttttatgggactgattatgtatatttttgctcccgaaatgattggactcctaagccctgttgaatctatccgcacnctcggnacaacgattttacgnatcgaagcctttgccgancccttctttgcagcgtcaattgtggnatatagtatatgtgtaggcgccggtgataccctacgtcctgccatcatgaatcttgtttcaatgtggtgtntncgactaacncttgcggcntggcttgcccgagattatggnctnaaaggtgtctggacagcgatggcaatcgaactaaccttccgnggatcaatcttcctttatcgcctattccgaggcaattggttgaaaggaataaaagaaaanccgncaatacaaaccgcataatacatcctaaaatanatattattatgaaaagaatctttttntttttcacggtaatgttgctttcgtcactctcttttgcaacctccgttgacagcacaaatgccgtgacnatgctcgactatgaacaggcgttgaangacgannatgcccgaatc

SEQ ID NO: 941 - DNA, 4000 bp, Escherichia coli
  misc_feature (2200)..(2200): n is a, c, g, or t
  misc_feature (2245)..(2245): n is a, c, g, or t
  misc_feature (2290)..(2290): n is a, c, g, or t
  misc_feature (2326)..(2326): n is a, c, g, or t
  misc_feature (2335)..(2335): n is a, c, g, or t
  misc_feature (2608)..(2608): n is a, c, g, or t
  misc_feature (2852)..(2852): n is a, c, g, or t
gccctgacctcggcgtttctaatatttgccaaccgcactgatcgggcctggggtgccggcatgcgttaccttgtgatccaggtgctttcgggcgtgctactgctcgccggagcgctgatgctgtatcggcacagcggctcgctggcctttaaccatatcggtttgaatggcgcgggaagcttcctgatctttatcgcctttggcatcaagtgcgcctttcccctgctgcacaactggctcacggatgcctaccccgaggccaccccgaccggcacggtttttctcagcgcctttaccaccaaggtcgcggtctacgctctggcgcgtggctttgccggcaccgaggccttggtctacatcggcgcgaccatgacctgttttccgatcttttacgccgtgattgaaaacgacctgcgccgcgtgcttgcctacagcatgatcaaccagatcggcttcatggtcgtgggcattggcctgggtacggcgctggctatgaatggtgcgatcgctcacgcctttaacgatgtgatctttaaaggcctgctgatgatgtcgatgggcgccgtactgcacatgactgggcgcatcaatggctctgatctgggcgggctgtacaaaagcatgcctattaccgccggcctgtgcatcgtcggcgcagcatcgatctcggcctttccgcttttcagcggcttcgtcagcaaatccatggttatggtcgcggtgctggaagaaggtcacccgggggtctggctggcactgctattcgcatcggcaggtgtatttcaccatgccggtatcaagattccttttttcgcttttttctcccacgacagtggtatccggaccaccgagccaccgctaaacatgctggccgcgatgggtctggcggctgtgctttgcgtctttatcggctgttatccgtgggtactttatgaactgctgccattctcgacgggctatgcgcctttcgacggcagccatatattggcgcagatccagttgttggttttttcagccgctgcgtttgcctggctcaaggtttcagggatttacccgcctgaactgcgttccaccaatattgatgtcgagtggctgtatcgccgcctggcgccacgttgggtgcgccactgcactcaaggattaactgccgtcagcgacactctgggccaggccacacaaaacgccagccgtgtcgtgatgcgctcggttgtgcgtcactatggccccgagggcgctctggcgcgatcctggccgaccggctcgatggtattgtgggtggcggtgctgctcgcggcgagcttgatactgtactacctgtaagatcaattaccgacaaccttcgtttataacgatccaatctgatgaatacccctcacaacaacccagtcgatgaagcgattgcttcaagacgctcgatacgggcctttttgccaacgccggtcgagcgggcaacgatccgtgcgatcctcgccaccgcgtcgcgggcaccctcaggtaccaatacccagccgtggcaggtatatgtcctgaccggcaaggccttggccggtatcagtaaaaaaatactatcggtgtacaacaatccggatgaggtggcgcaacacacttctgaatacgcctattaccccaacaaatggatctctccttacctcgaacgccggcgcaaagtcggctgggacctgtatggcctgctgggcatcaccagggacgacaagacggcaatgcaccaacagcatggacgcaactatgtattttttgatgcgccggttggactgattttcagcatagacagagtactggagaagggcagttggctggactacggtatgttccttcagaacatcatggttgctgcccgggcccgtggcttggatacctgcccacaagcagcctttacaccatttcaccgggtgattcattcgtatctcgaaatgaatgataacgaggctctggtgtgtggtatgtctttgggctacgccgataacgccgcggtcgagaaccaattgacgactgagcgtgaagcggttgacgactgggtcagttttatcgactgagtacagtcagcccgaaggtttccggctttgagacagctcagatcgtgctgccctgcaggctttccttgaagtgacgccggcacatcgagatataggtctcattaccgccaatctgaatctgatcaccggcccgcatcggcctgccntcaccgtcaaaacgcaccgtcatgatggctttgcgaccgcagtgncacacggtcttgatctcacgtaattcgtctgccaatgccagcagnaactgcgcaccttcgaacagttctccaagaaaatcngtacgcaanccataggcgagtaccggtatatccaacgtgtcgacgacttcggtaagctgtccgacctgctgggcgctgagaaactgagcttcatccaccaacacacaatgcacggcttgttcctcaccttcgcgaaccaccaactggcgcaggtcgacttcgggacccacatcgatcgcatcggcctcaagaccgattcgtgaacgaacccggctttcccctgcccgattatcgatgcgcggtttcagcaccagcgtgttcatgccacgctcggcatagttntagctcgactgcagtagattcgtcgtcttgccagcattcattgccgaatagtagaaatagagcttcgccaccgtgttcgcctgttcgttaacccatcagcggggattgtagaacatcaccggtagcctcccatcaccaaggatgccgtgctgtctggcgctccatgtataacgatacgagcccgccaagaaaaactatactgtgcccgtgtttttgattaaaggtgaagcgtaaatgaaaaagntccgttattcggcatggctgctccgcgtgctactgggcggcttacttgcactaccggctattgctgaagaagataccaagccggtaatgattacgggcgaactcaaaagtttctccatgactcataacggcgaaactgtcacggtgatgcgcaaccaggaccggtccaatcgcattgtcgaactctaccagccgacctaccgcggcaagatccagcccatgcacccctttgcaccacatcaggtaactacaatcggggctctggagatgatcggctttatgcagcagttggaatcaggggacgaaggtctgctgattatcgactcgcgcacgcgcgactgggcgcggcgcggcacgcttgcgggatcgatcaatatcgctttcaccgagttcaaggatgaggaacgcgcactggaaatcatggaagagtggtttgatgttctgaacacaggtctctcacttgatttttcaaatgcaaagaccctggttctattttgcaacggcatctggtgcggtcagtcaccaacgacaatacgcaccttattgcgaatgggatacccggccgcaaagatccattactttcgcggtggcatgcaaaactggcaatcactcgggctgacggtggtttcgccttgagcacgacgcaactcaccctggcagagattttttcaatagctcaagttgccctgactcaagccggcgccaacaaagaaaacgcggacgctgttgccaatacagtaatgcgggctgagcgtgatggctctcattcccacggactgttccgcataccgggatatgttgcctcgttgcaaagcggcaaagtcaacggtaatgccgacccaaagctgcactcgcgcaccgcggttgcgctacattgcgatggtgatctgggctatgcaccactcgcccatcagcgctgcctggagccactggctgaggctgcccacgaaaacggtgtggcaatactgtcgattacccgaacacatcattttgccgccttgtggcccgaaactgaggcattagcggagcgcggactaactgccatcagttgcgtttcctacatgcccagtgtggcgcctttcggcgcgagcaagcctctttatgggaccaaccccttatctttcgcctggccgcgcgccgacgccctac

SEQ ID NO: 942 - DNA, 4000 bp, Escherichia coli
  misc_feature (1992)..(1992): n is a, c, g, or t
  misc_feature (2047)..(2047): n is a, c, g, or t
  misc_feature (3211)..(3211): n is a, c, g, or t
aaaggcggcagtcaagaaatcttgcgtcgccgcgatgagaatttcaccattcttcggagtgcaaaggttgtgatggactcccatgagctcgagtgcctcggctcgcgcttcttcggtttgaggacaatggatgttcatctcgtcaccgtcgaaatcagcgttatacggcgtacacacgcattcgttgaatcggagtgtacggcacggcatgacgcgagctctgtgagccatgattgacattttgtgcaaactcggttgtcggttaaagagcaaaatatcgccgtcatgaatgtgacgttcgacaatgtcaccaaaacgcaactcactcgcaattttgcgtcggtcaccatacttcaagtattgcataccaccgcccacaaatttgacaaagttggcaccagggtgcgtagacatgccgtttcgcacacgctctctgagcatggcaatgttgtgcttgttgacgacttcggggtacgtcatcgtctttgctatgtgaatgggcacgcccacttcatcgatgcgaaggtttggatccggtgaaatgaccgttcttgcgctgaagtcgacacgcttaccgctcaggttaccccggaaacgcccttgcttacccttcaatctttggacaaaacctcgaagcggcttgcccggaccttggtactgcagagacagtcccgggagctcgctgttgatgtacatggcgcactgaatctgtaaaaagtcccagttttccatgaggttgttgatggccaaacctttctccaaaccttgtcgcagaacgttgttcacttcaataatctgaatcagcttcatggtgatatcatcctcgtttgaccccgaaatgccatccatctccacggacggacgaatgcagcacggtggcacggcgaggtgcgtgagcaacaagttttcagggcgattcgcaatgtccagaagctcgcaatccttatcgctgatgcgctgcatgattcccaaaactctaatcgggttcaagtcatcctgaactcgcggcagcgacgctctgagagactcgttgtactttaacgccgtctcaaattctttcatgaattcctccaagagcgccggatttttgctatacttttcgtgaacaatcttgagcgtctgccccgcgcgcttgaccgccccgttgtaatctccgcagtgcggacacaaacggcaccgcttgcacttgtcggcaaactttttattcaacgccctcctctggttgatctccagctttgggcttctgtacctcttcaaaaacaccgccgcgtcgtcctcattcatcaaaacccccgagcaatttttacacacgcactgtaaaatcgaaatgatattcttgaagtacccgatgtggaaaaccggaagctcgagcttgatgtacccaaagtgccccgcgcagtccaccatactcccccgacacgtcgcgcactccccacctcgtttatccgtcgtccccattcgcggatctagaataccattcggcatcggcgttcgctgcggcatctgatacaagttcctctcgcacacgtgaaacaccccggctcgaccgatctccgcgtcgctcatcagcgagaacctcacgctgcgaatcttcctcggcgtcgtcgccggcacgaacggcgtcttcgtaaactcaatcgccgccgcatcccgcgacgacgtcgccatatcgtctctaaacgtcggcatcgcgtcgcttcgtcgtatccaccggctccgagcgatacaaaagtcgtctcgagtgaaaaagcgctcttcacccggcggcggcagggcaaacctctcttcaacaagaatgcgtcacgagaacgacagacgacgccctctcgcgcgtcccgcgtcggcgcgcgcgcccttctcagagctcgcgggtcgcgcgcggcgtcttacgttcgctcggtcgcgcgcgcggacgaccgaccgactctcgtcttcggtgtgtgacgaccgggcggcgggcgcgtcctgggaacgaacgacgaagcgctccanccagcgcgcccgcgaacgaccgagtccatcgacgacgagtcaaacgacggttcancgttcacgtgtccgaagtgtgcgtgttgaccgtgtgtgactcaaaaaggagtgggatgggtacggatggacttcatttttggaacgcgaagacgcgaaggcgatgggaacggatcggagcgcgagaggtcggcgcggtgtggcgctaacgcgttggagatatcgattcacaacgtgttttcccggggtgtggtggcacccgcgggtgactagtgtacgcggcatgtttctataaaggcatccgagtcggcgcgttgacgctcgggttggacgaaatccgcgctggtgatggcggtggtttgtacggcgagcatcgggctcatgatgacttgttgtgggaatctctggaagacgttaaagtcgatcaccttgttgacggcttttctgctgagcacaggttcgaggaagagagagtacgaatcgcgccccaggatgtaggcgtgcgatcctcgcaaatcgcactgcgctcgagtgacggtgcaaaaggcgtccgatttcgtcaattcagcgttgtagcggcatccgcagccgtaaggacatgcggtaaaaccgacttcaaactcccacgctctgtaacctaatctaataatggtaaacgccgcatcgctcgcttgctctgagttggtgagaagctccgcgacggatcgaatcgcctcgtgggccttgtatttcgggtgctcctccgcaactggatcgatgaaagacgcgtctgcttcgacgacaccgatgtggtggtggttcgcttgctttgcgtgcgccaccacagcgccatgcgagagagtcgcacgcctgaaatgagtcacatgagagtcgagcccgaggcacgcgtccaccttggtgccgtccacgacgtgaactttatctctccaatcaatcggaacgcagagagacttgcaacttcctctcgcgcagatgagataaagcgccttcgccatctgtatcatgcgtttaccgatgagaccagagcccatggttgagtttgaagggcagaattggacatccttgacaaatgcttgttccgcgcacttcgcagccaaatcgacgccgtaggacgcacgcgtttgtctcttgttcaccagagtccctagttccgccgctcgagaagttttgtaatgcgaaatgcctaaattgatgacttgtcgagataagcatccgtgattctcgntcaagcagactcgatcgcgagcttcttgcaactctgcgacaaagccgtcggcttgcgcctcaaacttggtggagcactcttgctcgtcgccttccgcgcactttggagctttcctcggatgcgcgtgcgtatccttcaaagcgtcgttgtaagacgcgctcgactgaagttttggtatgacccaatcgtggatggtttctcgccactgcaaaaactctgaaattctttgattttcgtgccacattcgtagtagacgagcctccgccgctcggtagagtctcgcatcaatcgagttcaatctgttgaatctcttcttgaagccttgactatcgatgtagctgactaattccgcggggagcgccgtcgttaagtcgtcctggaacaacatgcgtttgaagccgtacttgtccaggttgccaaaaccaacctctggcggcgaaagcagttgccgcacggaaatgattctgtagagcatttgcttcatgagcaaacgagccgtgagctcgtgcgtcggcgtaacaaccaaatcgtacatgttcaacacgctgaggatgtcttcgttcgtcaccgacgacggggtcactttgccatccttgtctactcgatccatctttgtcagcagtttggttggcgcgagcaatttgaactgcaagtttgatacatgcgctcgtcttccaaagttgccaaacgcaaactccttgaagttttctacgctaggagaccacccccgtctcgcgatgccgtactgcatgtaggcttcgacgactctatgcaacgggtctcgaacac

SEQ ID NO: 943 - DNA, 4000 bp, Escherichia coli
  misc_feature (910)..(910): n is a, c, g, or t
  misc_feature (2050)..(2050): n is a, c, g, or t
gtaacaacgccggtttctttatccacgcggcggtaaggtgcctcaatgaagccgtacttgttgatcttggcgaaagatgccagataggagatcagaccgatgttggaaccttcgggcgtctcaatcgggcacagacggccatagtgggtataatgaacgtcgcggacttcgaagcctgcgcggtcacgggacagaccgccggggcccaaagcggacagacggcgcttatgggtcagctcagacagcgggttgttctggtccatgaactgagacagtgggctggaaccgatgaactcacggatggcagccacgaccgggcggatgttgaccaggctctgcggggtgatctcgccggattcctggttctgcagggtcatgcgctcgcgcacaacgcgctccatacgggcaaagccgatgcggaactggttctgcagcaattcgccaacgctgcgcacgcggcggttgcccaagtggtcgatttcatcggtcacgccgatgccatggtcaaggcccagcaggtagttgacggaagcaaagatatcgtcaacggtaacggtgcggctgatgagcttatcatgattcttggtcagcagttctttctgctcttccggatcggaggtagcatccagaatcttacggatttcggcgaaggaagcgcgctcgttgatgccgcattccttcacgtcaaagctgaagaaactctgggcatcgacacagccgttggagaacacgatcacattgaccggatcctggcccttgcgctccacgataacagtaacgcgggaaacaccggcgttatcaatttcaacagccttttcgtggttgatgcgctcgcccttggcggccagcagttcgccggtcagcggggcaatgatgtcctcggcagtcttatagcccgcaatacggcggnacaggcacagcttgttgttcatcttgaagcggccaaaacgagccaggtcgtaacggcgcggatcaaagaacagcaggttgatgtggctgcgggagctttccaccgtcggcggctcgccggggcgcagcttgcggtagcactccagcagggcttcctctgtggaatgggtgatatccttttccagggtggcgttgattttgggttcagaatcgccgaagtactggcggatctgctcatcggtgccaagacccagtgcgcgcaggaaggtagtaaccggcagcttgcggtttttatcaatgcgcacataatatacatcggaagaatcggtttcgtattccagccatgcgccgcggttggggttcatggttgcggtgaaaaggtccttgccggtacggtccttgctggaagcatagaacacgccgggcgaacgaaccagctggctgacgataacacgttctgcaccgttggagatgaaagtgccggaatccgtcatgagcgggaaatcgcccatgaaaatttcctgttccttcacttcgccggtgcttttgttcaacaggcgcgcagtgacataaagcggcgcagcatacgttgcgtcacgctctttacattctttaatggtatatttggggtgcttgtccagacggtaatcgacaaattccagcgagagattcccggtgtaatcctcgatcgcgtcaatgtcgtggaacacttcgcgcaggccctcgtccaggaaccagttataagagtttttctggatctcgatgaggttgggcatgccaatcacttcgttgatgcgggaaaagctcattctggaggttcgaccgttttgtacgggcttgacctttaccataaaatgcgaccactcctattccgttcagatttgtttttggcaaaagcgctccgccgaagcaatgattttcttggaacattcgtcgtttttaacaaagtttgaaaaaacgcgaaaaaatcaaaattcctttagggcgctctattccattttgtgatactatgccagtataccagccaaaaagctgattgtcaagggctcttttggcattttgcgtgtttttttatcaggcaattgaacgcccggatgcgtgtcacatttcttttggcaaagtgctatttttgcatttcttntgccacttgacaaatccttgaaatgccgctaattggcacaatgcccaattaccttgtgtgttttttgtatgggttgcagcctgcgttttttctgcattttcccggtttttacgctttgcaaacaaaaagtgcccttcccgccgttatccgtgtgcagggtgggcactcgtctgtttttggtgttatgcgtttgatgccgggcccgccacacgggtatttacaccagctccacccggtatttttgcagccagtaattcagctgcacaaaccaggcaatggtctgcggggtggtcatcagctggccataccagggggtcgcagtctcggcagcggtcaacagctgttccagcgctgccctcttggcaatacgcagcagcggggcatccgggtcctgcatcgcactgcgcagcatggcgctgacagcgttcaaatacgccgggttccatgttttagggtaggggctcttttttcgccacaacacttccgtgggcagcacgccctgcatcgcctggcgcagcaggcctttttcgtggccctcgtaatccttatattcccacggcacgctgtacaggtattccgcaatgcggtaatcgcagaacggcacgcgcacttccagcccgctgtacatactcattcggtccttgcggtccaaaagggtctgcataaaccagttaaagttcagggcaaacatctggcgcatccgttgttccaggggatccagaccggggcggatggaagtttgctccagcgtggcgcggtagccttcatcaatatacgccgccgggtcaatgccgccgaacacctccggcttaaaaaagctgaccctgtatgccgtgctctgcgcccaagggaagccataccgctcccgcacggtcttatccctgtaccaggggtaaccgccaaatatctcgtccgcgcactcgccggaaagtgccacggtggctgttttacggatctcacggcagaacagcagcagcgaggagtccacatccgccataccgggcaggtcgcgggcgtccaccgcttccagcagggcggcggccagtgcttcgctgtccagcgttacccaggtatgctgcgcgttcaagaactggttcatggtgcggatatacggcgcatccgggctgggctggaaatgggtggcgtggaagtactttttgttatcctgataaccgaccgagaaagtctgcagcgttttgccccgcgccgtaaagtgggaatccgcgattgccgaaatcaggctggaatccagcccgccggaaaggaaggttgccaccggcacatccgataccagctgccgcgtgacggcatccatcaccaggtcccgcactttggctgcggtgtgggtaaaatcatcggggtgttcgtggtcggtcagctgccagtagcggcgcacggtgaggcgcggcgcaccaacctgtggcacagtgtattctgcgcagcagccgggcttcaattcctgcacattgcggaacaccccgcaccccggcgtgcggccggggccgagcagcagcacatcggccagcccatgggcatccacctgcggcgggatctccgggtggcagagcagcgttttcagctcggaagcaaagatcaggctgtccccgcgcagggcatagaacagcggcttgaccccgatgcggtcccgcgccagaaagagcttttgcgcccgctgctgccacacagcaaatgcaaaaataccgttcagcttttccagacagtccggcccccactgggcaaaagcatgtaacaaaacctcagtatcggaatggcttacaaagcgatggcccagagccgcaagctgggcgtgcagctccggcgtgttgtacagctcgccgttgtacaccagaatgtatttctccccgccctgatccagcaccatgggctggcagccgttttccagatccaccacagccagccgcgcatggatcagcgccgcatggccgtgca

SEQ ID NO: 944 - DNA, 4000 bp, Escherichia coli
  misc_feature (635)..(635): n is a, c, g, or t
  misc_feature (698)..(698): n is a, c, g, or t
  misc_feature (728)..(729): n is a, c, g, or t
  misc_feature (742)..(743): n is a, c, g, or t
  misc_feature (797)..(797): n is a, c, g, or t
  misc_feature (806)..(806): n is a, c, g, or t
  misc_feature (824)..(824): n is a, c, g, or t
  misc_feature (827)..(827): n is a, c, g, or t
  misc_feature (845)..(845): n is a, c, g, or t
  misc_feature (848)..(848): n is a, c, g, or t
  misc_feature (850)..(851): n is a, c, g, or t
  misc_feature (860)..(860): n is a, c, g, or t
  misc_feature (862)..(862): n is a, c, g, or t
  misc_feature (920)..(920): n is a, c, g, or t
  misc_feature (929)..(929): n is a, c, g, or t
  misc_feature (931)..(931): n is a, c, g, or t
  misc_feature (933)..(934): n is a, c, g, or t
  misc_feature (938)..(938): n is a, c, g, or t
  misc_feature (941)..(941): n is a, c, g, or t
  misc_feature (944)..(944): n is a, c, g, or t
  misc_feature (959)..(959): n is a, c, g, or t
  misc_feature (965)..(965): n is a, c, g, or t
  misc_feature (968)..(968): n is a, c, g, or t
  misc_feature (983)..(983): n is a, c, g, or t
  misc_feature (989)..(989): n is a, c, g, or t
  misc_feature (992)..(992): n is a, c, g, or t
  misc_feature (995)..(995): n is a, c, g, or t
  misc_feature (1005)..(1005): n is a, c, g, or t
  misc_feature (1015)..(1015): n is a, c, g, or t
  misc_feature (1025)..(1025): n is a, c, g, or t
  misc_feature (1028)..(1028): n is a, c, g, or t
  misc_feature (1030)..(1030): n is a, c, g, or t
  misc_feature (1037)..(1037): n is a, c, g, or t
  misc_feature (1051)..(1051): n is a, c, g, or t
  misc_feature (1055)..(1055): n is a, c, g, or t
  misc_feature (1058)..(1058): n is a, c, g, or t
  misc_feature (1070)..(1070): n is a, c, g, or t
  misc_feature (1073)..(1073): n is a, c, g, or t
  misc_feature (1079)..(1079): n is a, c, g, or t
  misc_feature (1097)..(1097): n is a, c, g, or t
  misc_feature (1100)..(1100): n is a, c, g, or t
  misc_feature (1106)..(1106): n is a, c, g, or t
  misc_feature (1112)..(1112): n is a, c, g, or t
  misc_feature (1129)..(1129): n is a, c, g, or t
  misc_feature (1151)..(1151): n is a, c, g, or t
  misc_feature (1157)..(1157): n is a, c, g, or t
  misc_feature (1163)..(1163): n is a, c, g, or t
  misc_feature (1168)..(1168): n is a, c, g, or t
  misc_feature (1175)..(1175): n is a, c, g, or t
  misc_feature (1187)..(1187): n is a, c, g, or t
  misc_feature (1205)..(1205): n is a, c, g, or t
  misc_feature (1394)..(1394): n is a, c, g, or t
  misc_feature (1442)..(1442): n is a, c, g, or t
  misc_feature (1444)..(1444): n is a, c, g, or t
  misc_feature (1457)..(1457): n is a, c, g, or t
  misc_feature (1475)..(1475): n is a, c, g, or t
  misc_feature (1502)..(1502): n is a, c, g, or t
  misc_feature (1547)..(1547): n is a, c, g, or t
  misc_feature (1565)..(1565): n is a, c, g, or t
  misc_feature (1598)..(1598): n is a, c, g, or t
  misc_feature (1607)..(1607): n is a, c, g, or t
  misc_feature (1611)..(1611): n is a, c, g, or t
  misc_feature (1619)..(1619): n is a, c, g, or t
  misc_feature (1622)..(1622): n is a, c, g, or t
  misc_feature (1640)..(1640): n is a, c, g, or t
  misc_feature (1682)..(1682): n is a, c, g, or t
  misc_feature (1742)..(1742): n is a, c, g, or t
  misc_feature (1745)..(1745): n is a, c, g, or t
  misc_feature (1759)..(1759): n is a, c, g, or t
  misc_feature (1764)..(1764): n is a, c, g, or t
  misc_feature (1877)..(1877): n is a, c, g, or t
  misc_feature (1946)..(1946): n is a, c, g, or t
  misc_feature (1948)..(1948): n is a, c, g, or t
  misc_feature (1950)..(1959): n is a, c, g, or t
  misc_feature (1962)..(1964): n is a, c, g, or t
  misc_feature (1967)..(1967): n is a, c, g, or t
  misc_feature (1970)..(1971): n is a, c, g, or t
  misc_feature (1973)..(1975): n is a, c, g, or t
  misc_feature (1978)..(1978): n is a, c, g, or t
  misc_feature (1983)..(1987): n is a, c, g, or t
  misc_feature (1993)..(1993): n is a, c, g, or t
  misc_feature (2006)..(2007): n is a, c, g, or t
  misc_feature (2020)..(2020): n is a, c, g, or t
  misc_feature (2034)..(2034): n is a, c, g, or t
  misc_feature (2249)..(2249): n is a, c, g, or t
  misc_feature (3260)..(3261): n is a, c, g, or t
  misc_feature (3263)..(3264): n is a, c, g, or t
  misc_feature (3266)..(3279): n is a, c, g, or t
  misc_feature (3282)..(3286): n is a, c, g, or t
  misc_feature (3288)..(3293): n is a, c, g, or t
  misc_feature (3295)..(3297): n is a, c, g, or t
  misc_feature (3299)..(3314): n is a, c, g, or t
  misc_feature (3316)..(3316): n is a, c, g, or t
  misc_feature (3318)..(3326): n is a, c, g, or t
  misc_feature (3328)..(3333): n is a, c, g, or t
  misc_feature (3336)..(3338): n is a, c, g, or t
  misc_feature (3340)..(3341): n is a, c, g, or t
  misc_feature (3343)..(3344): n is a, c, g, or t
  misc_feature (3346)..(3348): n is a, c, g, or t
  misc_feature (3352)..(3352): n is a, c, g, or t
  misc_feature (3355)..(3357): n is a, c, g, or t
  misc_feature (3359)..(3366): n is a, c, g, or t
  misc_feature (3368)..(3369): n is a, c, g, or t
  misc_feature (3371)..(3371): n is a, c, g, or t
  misc_feature (3373)..(3375): n is a, c, g, or t
  misc_feature (3377)..(3377): n is a, c, g, or t
  misc_feature (3379)..(3380): n is a, c, g, or t
  misc_feature (3382)..(3383): n is a, c, g, or t
  misc_feature (3385)..(3390): n is a, c, g, or t
  misc_feature (3393)..(3394): n is a, c, g, or t
  misc_feature (3396)..(3402): n is a, c, g, or t
  misc_feature (3404)..(3410): n is a, c, g, or t
  misc_feature (3412)..(3412): n is a, c, g, or t
  misc_feature (3415)..(3415): n is a, c, g, or t
  misc_feature (3417)..(3417): n is a, c, g, or t
  misc_feature (3419)..(3420): n is a, c, g, or t
  misc_feature (3422)..(3425): n is a, c, g, or t
  misc_feature (3428)..(3428): n is a, c, g, or t
  misc_feature (3430)..(3442): n is a, c, g, or t
  misc_feature (3444)..(3448): n is a, c, g, or t
  misc_feature (3451)..(3452): n is a, c, g, or t
  misc_feature (3455)..(3455): n is a, c, g, or t
  misc_feature (3457)..(3457): n is a, c, g, or t
  misc_feature (3459)..(3459): n is a, c, g, or t
  misc_feature (3463)..(3477): n is a, c, g, or t
  misc_feature (3481)..(3482): n is a, c, g, or t
  misc_feature (3487)..(3487): n is a, c, g, or t
  misc_feature (3493)..(3506): n is a, c, g, or t
  misc_feature (3508)..(3510): n is a, c, g, or t
  misc_feature (3512)..(3513): n is a, c, g, or t
  misc_feature (3516)..(3516): n is a, c, g, or t
  misc_feature (3518)..(3520): n is a, c, g, or t
  misc_feature (3522)..(3525): n is a, c, g, or t
  misc_feature (3528)..(3529): n is a, c, g, or t
  misc_feature (3531)..(3534): n is a, c, g, or t
  misc_feature (3536)..(3536): n is a, c, g, or t
  misc_feature (3538)..(3541): n is a, c, g, or t
  misc_feature (3543)..(3543): n is a, c, g, or t
  misc_feature (3545)..(3547): n is a, c, g, or t
  misc_feature (3550)..(3553): n is a, c, g, or t
  misc_feature (3555)..(3559): n is a, c, g, or t
  misc_feature (3561)..(3561): n is a, c, g, or t
  misc_feature (3563)..(3565): n is a, c, g, or t
  misc_feature (3569)..(3572): n is a, c, g, or t
  misc_feature (3574)..(3578): n is a, c, g, or t
  misc_feature (3581)..(3582): n is a, c, g, or t
  misc_feature (3585)..(3587): n is a, c, g, or t
  misc_feature (3591)..(3597): n is a, c, g, or t
  misc_feature (3600)..(3605): n is a, c, g, or t
  misc_feature (3607)..(3607): n is a, c, g, or t
  misc_feature (3609)..(3609): n is a, c, g, or t
  misc_feature (3611)..(3611): n is a, c, g, or t
  misc_feature (3613)..(3625): n is a, c, g, or t
  misc_feature (3627)..(3633): n is a, c, g, or t
  misc_feature (3637)..(3640): n is a, c, g, or t
  misc_feature (3642)..(3645): n is a, c, g, or t
  misc_feature (3648)..(3652): n is a, c, g, or t
  misc_feature (3655)..(3655): n is a, c, g, or t
  misc_feature (3657)..(3660): n is a, c, g, or t
  misc_feature (3665)..(3667): n is a, c, g, or t
  misc_feature (3669)..(3675): n is a, c, g, or t
  misc_feature (3677)..(3680): n is a, c, g, or t
  misc_feature (3683)..(3686): n is a, c, g, or t
  misc_feature (3689)..(3690): n is a, c, g, or t
  misc_feature (3692)..(3696): n is a, c, g, or t
  misc_feature (3698)..(3709): n is a, c, g, or t
cacctactgtaagcgctattgctgatctttcaaaatcatcaacaacatgtaatcttgtacccgttgctatccaaagctgattatttaaatattctatatcatttaatactgacgatgataaaggggagttagaagaattaaatgttgctagagaatcgtttttcgcatcgaacctgtaatagttagaaccagcgatgtaataaatgactgagtcattacctgctgcgatatctgttattgcagccgaaggggctgatgaagaataattagttatcgttcctgttacagggttcatcgaggaaagaccatgtgttccattcgcatgacctaaccaaagaacattgtcatttgaatcgtatttcaaacttttaatattgttatggggaagccctgcacttgtttggtattgcgtgaatgtggttccattaaaaattgataagccggaagttgttgcaatggcgactgctccgtttggcattctttcaaaatcattatgagagtttgttggaatcccggttgtattaaatgatttatacgcagtagcagttgagccatcataatagaccacgccactagagaatccgttcgacactacaaatgaagaatctgtgagggcctctcccaagaaataagangatgtcaatccttgggcagaaccgtagtttgtcattgaactgccattccattttgacatgccngaactggtaagtatccataggttaccgtcnncatcctgacttanntcacgaatactgtttgcaggtaatccagaattttgatccgttaattgggctatnccttgtggncccttcatgaaaataccnttngagtatccagatactatngangnncccattgcngngaggtgcaatggttgattcgaaggcatccctgtgttttctctttcaaaattagaatangttcctgangnanntaanacntgnagtccgttattattncctgcngcntgattgttcgagacnagatanacngangagtcattgncagaataaanggcttgtganagnangttttcngctaacccgttcanagantangaatgcgaaacngtnccatcngtcttaaatgttgttaanccntaggcngtacanataaataaattacctgntggatcttcaacgaatgatctnatgtcntttganactantccaatngtgttggatacnttatattttgtccaattngatccgtcaaattcagaaattccaaataacgttccaatccataatgatccattcgagtcctcgtaaagcgatcttacgtcgttgtttgccagaccattagatgtgctttgtttggtgtatgttgtgcttgagaagactccagattgatctgtaattattgccaaaccatcttttgtagcaacggcaacngagctgtctgataaaactattaagtcctgaatcgaagatgctggcaanangcttgaaggaacntatgaccagttaagtccngtcttgatcgaaacaccagattcagtncctacccaaactcttcctgaagcatcttcagcaatggctcttacngaatcaccctccaaaccngtaaactgttctgtaaacagactggcttccatnagtgagttnatgnacgtgtanccngaagttgttcccacgtanatacctgaaattgttttttcaatagtcaaaacttcttgagangccaatggaaaatccgaggatttaacgaaattaaatgttgagccattgtagagaactaanccnttttcggttcccanaaganattcactagaatcaagctcaataatagcattgtatgccgaagatggaataccgctgttttgtgaatttaaattcgtccaacaatccgattgtgctgacgcgttgattgatacngttaatgcaagcattaaagcgtggcgagtagtcataacttgatggtttaatttttatccctaagacaantnannnnnnnnnnaannnccnaanngnnnttnagtannnnngaaaantacaaattttttnntaaaaaatgtccnaaacttatcatggncgacatagacttatcgtggtatccttttttatgatatcgtaataccgctcaatgttacgaagatgggctatctttaataattcaatacaacatgtcaacaccttgtatcaggattacatcattacagcactgtcgctattagtaattgccctcatcatcgggggtattacggtcagacgctacaacatcccctacctctactttttggctggtanagtgctcaacgcaacctatttaacagacattgcgggtaacgaaatcgtcaaagtaatgtacccttggtttataccattattctttttgattggacctggactttacgggtcatactgttccgttgaggaacggaaagatcggtggcatattattcattacctacctgtcttcttaggttacgtcattttaatccttgaactcggttttttcaacgattacttttataatactgtgcaacttgcacatgacctaaagtgggagagcaccagtgtcttttggccattctcagataaatggattattctagcacagccctttcatacacttctttatgttgtgtttagtgtaagaaagctcaatacgtccaaagcacggcttcctttatttgttttacctattgtccagggtatttcattaatcccgctattggatattaattatcattttttaactggtgactttttaatttttgccaatgaccaggttcttaggtatgcgatgtttggccttgtgttccttattttctgggatgtcgtgaacattcgtccgcgaatgcaaaaacaagaagaagaaaaactcaaggcctacgaggcaaaaaaagaggcagcgcggcaggaggcgttaattcaagaggcgcccaaagaaatctatccaaacgcagggaaagtaaccaatgccgaaatagttctatacatcgaaaggctcattcaaggcgatgaagaattccccttcaataaacattcgaagaagtccgatttcatcaagcacagtccattcaaaaacacagactgggaaagtttcttttccgcgacgagcacaaatttcggtttctttaaaaagtatgcgcgcatccaccgtgcccttcgactcatagaggaaggttacctggacaatcaaagtgtagagacgctcgctaaaaccgtgggctattcctcaagagcacccttctacctggcctttgagcagattatgggggaatctctaaccgcctaccgagagatctagatcanntnnannnnnnnnnnnnnnaannnnnannnnnncnnntnnnnnnnnnnnnnnnnanannnnnnnnnannnnnntgnnntnnanntnnnatanacnnntnnnnnnnnannanannntntnnannannnnnngcnnannnnnnngnnnnnnncnctntntnnannnnaanannnnnnnnnnnnnannnnntannacncncncccnnnnnnnnnnnnnnngggnnttttntgtgtnnnnnnnnnnnnnntnnnannccncnnntnnnncanntnnnngngnnnnanannnttnnnncnnnnntntnnnaaannnntnnnnntcnncannntttnnnnnnntcnnnnnngngngngnnnnnnnnnnnnnannnnnnntttnnnncnnnnaannnnnaanannnnaaaannntnnnnnnngnnnncgnnnncannannnnngnnnnnnnnnnnngcgcaagatgcctcagtagaaacacaagccattggcgtcgtgatcgatgcacacgcattggtagatgtcgttgatgacgagatcgtgtttgacttcagtaatgacgatcccgtggaggccggaggtgcttttgtgcttggtgcgaacaagcaatcgagcacctttttaaattactcattaatgttgagtaatgcaggaatggcagacggttctatttctgtgcgtattgccaatatgaacgaagggatgagcctttcacttttagccgatgggaaccagcctgcaggttta

SEQ ID NO: 945 - DNA, 4000 bp, Escherichia coli
  misc_feature (881)..(881): n is a, c, g, or t
  misc_feature (884)..(884): n is a, c, g, or t
  misc_feature (900)..(900): n is a, c, g, or t
  misc_feature (905)..(905): n is a, c, g, or t
  misc_feature (963)..(964): n is a, c, g, or t
  misc_feature (967)..(967): n is a, c, g, or t
  misc_feature (986)..(986): n is a, c, g, or t
  misc_feature (1004)..(1004): n is a, c, g, or t
  misc_feature (1007)..(1007): n is a, c, g, or t
  misc_feature (1022)..(1022): n is a, c, g, or t
  misc_feature (1043)..(1043): n is a, c, g, or t
  misc_feature (1067)..(1067): n is a, c, g, or t
  misc_feature (1069)..(1069): n is a, c, g, or t
  misc_feature (1073)..(1073): n is a, c, g, or t
  misc_feature (1076)..(1076): n is a, c, g, or t
  misc_feature (1082)..(1082): n is a, c, g, or t
  misc_feature (1084)..(1084): n is a, c, g, or t
  misc_feature (1097)..(1097): n is a, c, g, or t
  misc_feature (1099)..(1099): n is a, c, g, or t
  misc_feature (1106)..(1106): n is a, c, g, or t
  misc_feature (1115)..(1115): n is a, c, g, or t
  misc_feature (1121)..(1121): n is a, c, g, or t
  misc_feature (1127)..(1127): n is a, c, g, or t
  misc_feature (1153)..(1153): n is a, c, g, or t
  misc_feature (1163)..(1163): n is a, c, g, or t
  misc_feature (1169)..(1169): n is a, c, g, or t
  misc_feature (1181)..(1181): n is a, c, g, or t
  misc_feature (1196)..(1196): n is a, c, g, or t
  misc_feature (1199)..(1199): n is a, c, g, or t
  misc_feature (1207)..(1207): n is a, c, g, or t
  misc_feature (1219)..(1219): n is a, c, g, or t
  misc_feature (1226)..(1226): n is a, c, g, or t
  misc_feature (1260)..(1260): n is a, c, g, or t
  misc_feature (1268)..(1268): n is a, c, g, or t
  misc_feature (1280)..(1280): n is a, c, g, or t
  misc_feature (1298)..(1298): n is a, c, g, or t
  misc_feature (1301)..(1301): n is a, c, g, or t
  misc_feature (1325)..(1325): n is a, c, g, or t
  misc_feature (1363)..(1363): n is a, c, g, or t
  misc_feature (1374)..(1374): n is a, c, g, or t
  misc_feature (1388)..(1388): n is a, c, g, or t
  misc_feature (1409)..(1409): n is a, c, g, or t
  misc_feature (1981)..(1981): n is a, c, g, or t
  misc_feature (1985)..(1985): n is a, c, g, or t
agtttgacttcacagtaacgttgtctgtgtcggtcagatacatgtgcgcagcacctggcctgaagaatgtgtttgcttcaatcgaagcgccactcatattttccaagtacaaagatccgccagtgccgccagagacaccacctatcatgttccccttcaggacccagccagtatttgttccgtccgtggtgtcgccagtgtatctgacagaatttgatcccgagaagccggtcacatagctattttgcaatttgaagttatcaatatcattgccgctgaaatccaatccaccattgtatgaatgcaagcgcaacccatctagtacaacattgtcagacgcgactgttatcttaccatcaatccaagtctctaacgctccgcctgtaacaccccgtgccacattatccgtatcgtacaaagtctgaacggtagaagcagctgtagataagcccgttgttatattgccggaaatatcaacggcaagcgatttgccaacgtttgcaccagcgatcgtaacggacgccacacccaaggcatcggcatctagcgtaacattctcactgtaacgccctgaactcagtgagattacaattgtatcggctgaactgctgacttttgcttgtgcagctgtaagcgcggcagaaattgaaccaccagcggccactgtttcagtgattgttgtgccgctagctccaccgccaccgccagcaataggtataacgacatcaccaggaatatctacaccgtcaggtatatctacaccatcgggtatatctggaacagaaatagttccatcttcactaatcaccaccacctggattgttgtatccacatctgacacatcaagttctgccgtgaagtcaaaacccgcatcatccccnagngactcgatgtacacgncaagntctgctgtcgcctcagcaattagcgtatcgattgcagctacatcgacgaccacacccnnagnaatcgacgcaacaaaatcntcctggactgcctgctgngtngcagcgatatctttnagcgaggttgcaacttcgatnttggcgttaacagtctcagcgacngncgcnatnttgtcnancaccgctgccaantnatcaaanccgggcgcntccgcnaatacntccgtcgtggaggaaacagtttctangatcgccttnatttcncttgctttggtnaatacctcggacttnccnccggcagnccccgccgcggnaattttngtcgaaacttccgccatcacggcagctgacgcanctgaaccnccagctgcgganaccattgaaatcaagttngcnacctgcgcagcggctttgctcatnccggcggatcctgtcgctacgaagtctgtcgccatcangtctgcacctncagataggccaagncccttcgcaacttgcgcttgngcttcagccgcagaaacgggggcgccacccgacgctacagctttttggacaacggcatccacaatggtcgtgaggggggttacgactgtagcgccttccggcgcgcgcagctcgcctgtaaatgttttaccagtcgaaatgtccgtaccgccttggacaacaatagacccggatccaaatagtccggagaacgtaccttgctgaccaacttcattgctggtttggacgaagacgtctggattgctcgttagaaagaccttagaattagcgagatatccatcaatcgcccggcccgttacttctgtagccggggtgctgtcgctacccccgcaagctgatagtggtattgcgagcacaagcaacgaaaggccctgctggacccttcgttcatttattgcacggaatttagaaaagagcttgtccagtgaaaattcagaaattttcagttcaaatcctgactcggaaagagtatctccatggttcttagcttcgtcgtaaaccacaacgttcgctgttacgacgttattatttatagcacttttgaacataggcaacctcagaagtttaaaatnattntgatatgataccactatatctatcaagcgcaagtggccccgctgaatccatcaagcgcaagtggccccgctgaatttttgcaagacttgagaccagacatgcgtccctgatatcagcccaaaaaaacaattttcgctacagcgcagtacttagatttacatatctccatacgcaccgcattttttatatttaatcatttaacaacaggaaaataaactgactatttttcgcaaatccgtgcgaatcagttcggttctggtactataggcgtaccaatactcaacaccgccaagcctatcaggttttaaaagcgcagaagccagtcaaaatattgaagctttggacgcattatgaaccactgtatccgatcgtcatgcagtcattatccgtgaattgttgcgccttgtttgttaaaaatcctctggtcacaacaaacaggttcacacaacccgatacacagtgaaaaattataattttactatcaacgacttatataaagtatattttttgcaaatccgtgtacaccggttcgatactgggaccccttcaataaaatcaataacttatctgatgaggcttttgatcgtacacttggtttgcgcaggagaccaatagaaccatcaaagtcagcgaacacattcgactggataccagacctggcagtgcaaagtggcaagcacgggtcgaactggctgatggctcttggcatagattttcaaccaagacagaaagcttggaacgcgccactgaagttgcgatgaagtttttctacacatctgaagatcgtctcaaaaacaacctgccgcaaagcacgcgcaaatttcgtcgtcagtgtaggtgactgccactgtggtgtcgtctattactaaaccagagagatctacgctcgccgagtctagtgtcacgtcgagtgtatcttcagtcccggtacctttgacaatccaggcttcacccgtcacatctgaggcgttcatttccaatgtcacagctccggccgctgtgatagaaactgtttcaaggtcagtgattgagagagttgctcctgtaagatcggctgcagctgcaaacacgagcgtgtcagacccaccgttaccatcaattgtcatgttaccagcgtaacccgtgatggtatcgttaccctcgccacctgtaactattttggagttagccgacattgttgtaacgagtttgccggtcaaagcagaggcatcgatagacttagcggtggcggcggtgctgcccagtgtaagattgacagaaccacttgccacaaatgcggttgtggctgcaccagttaaagtagcaatcgtagcaattccgtcacccgcaacagtggctgatgtatctgaaccgctgatgttaactacctcaaagtcagagacgtcaaaagtggtctggttaccggtatcatcgataatcagatttagcgtttctgttgtaccgttagtggctacggtagaatccaacgtggcggttgttgtcgcagctgttactttcacggttgcattatctgccaagctgtaagtgtcgccaccagtagtcccatcagcaatatcaatcacaatcgaagttgctacctttgataagtcagcggtatcgtccgcattgatccgcactgtcgcggttgcgtcaccagtaaggttattaacaaaagtctctgtggtcgcatcaagcgcagccatcacaagtgtaacgtcttggtcacctgcaaatgtgactttctccggagcgttgcctgcagtcaaagtgtatgtggccgactgtgaattacctgacaaagtaatattctcaacctgatctgttgcagccgtctcaagggacactacgccgttggatgaaactgtcgcaacgtcgttagcaacatcgccgtcaccgtcgacactgatttcgttgtcggttgtgccggaaacgcttgtacccacgttagtttggttaactgttacgccacctgaacccgcgtctgttagagttacgatacgagctgcaccggcctcaatggttgtgttagctgaagt

SEQ ID NO: 946 - DNA, 4000 bp, Escherichia coli
  misc_feature (650)..(650): n is a, c, g, or t
  misc_feature (2002)..(2002): n is a, c, g, or t
  misc_feature (2058)..(2058): n is a, c, g, or t
  misc_feature (2356)..(2357): n is a, c, g, or t
  misc_feature (2361)..(2363): n is a, c, g, or t
  misc_feature (2370)..(2375): n is a, c, g, or t
  misc_feature (2377)..(2380): n is a, c, g, or t
  misc_feature (2383)..(2383): n is a, c, g, or t
  misc_feature (2388)..(2392): n is a, c, g, or t
  misc_feature (2395)..(2402): n is a, c, g, or t
  misc_feature (2406)..(2408): n is a, c, g, or t
  misc_feature (2410)..(2410): n is a, c, g, or t
  misc_feature (2412)..(2413): n is a, c, g, or t
  misc_feature (2415)..(2416): n is a, c, g, or t
  misc_feature (2419)..(2421): n is a, c, g, or t
  misc_feature (2426)..(2428): n is a, c, g, or t
  misc_feature (2432)..(2436): n is a, c, g, or t
  misc_feature (2439)..(2444): n is a, c, g, or t
  misc_feature (2446)..(2447): n is a, c, g, or t
  misc_feature (2450)..(2452): n is a, c, g, or t
  misc_feature (2457)..(2458): n is a, c, g, or t
  misc_feature (2461)..(2471): n is a, c, g, or t
  misc_feature (2473)..(2473): n is a, c, g, or t
  misc_feature (2476)..(2476): n is a, c, g, or t
  misc_feature (2478)..(2489): n is a, c, g, or t
  misc_feature (2491)..(2498): n is a, c, g, or t
  misc_feature (2500)..(2505): n is a, c, g, or t
  misc_feature (2507)..(2509): n is a, c, g, or t
  misc_feature (2512)..(2527): n is a, c, g, or t
  misc_feature (2529)..(2533): n is a, c, g, or t
  misc_feature (2535)..(2542): n is a, c, g, or t
  misc_feature (2544)..(2550): n is a, c, g, or t
  misc_feature (2552)..(2555): n is a, c, g, or t
  misc_feature (2557)..(2558): n is a, c, g, or t
  misc_feature (2560)..(2561): n is a, c, g, or t
  misc_feature (2563)..(2563): n is a, c, g, or t
  misc_feature (2565)..(2585): n is a, c, g, or t
  misc_feature (2589)..(2590): n is a, c, g, or t
  misc_feature (2594)..(2599): n is a, c, g, or t
  misc_feature (2601)..(2615): n is a, c, g, or t
  misc_feature (2618)..(2618): n is a, c, g, or t
  misc_feature (2620)..(2621): n is a, c, g, or t
  misc_feature (2623)..(2626): n is a, c, g, or t
  misc_feature (2628)..(2643): n is a, c, g, or t
  misc_feature (2645)..(2651): n is a, c, g, or t
  misc_feature (2653)..(2661): n is a, c, g, or t
  misc_feature (2663)..(2670): n is a, c, g, or t
  misc_feature (2672)..(2675): n is a, c, g, or t
  misc_feature (2677)..(2685): n is a, c, g, or t
  misc_feature (2687)..(2694): n is a, c, g, or t
  misc_feature (2696)..(2703): n is a, c, g, or t
  misc_feature (2705)..(2714): n is a, c, g, or t
  misc_feature (2716)..(2716): n is a, c, g, or t
  misc_feature (2718)..(2723): n is a, c, g, or t
  misc_feature (2726)..(2734): n is a, c, g, or t
  misc_feature (2737)..(2745): n is a, c, g, or t
  misc_feature (2747)..(2748): n is a, c, g, or t
  misc_feature (2750)..(2751): n is a, c, g, or t
  misc_feature (2753)..(2762): n is a, c, g, or t
  misc_feature (2764)..(2765): n is a, c, g, or t
  misc_feature (2767)..(2770): n is a, c, g, or t
  misc_feature (2772)..(2772): n is a, c, g, or t
  misc_feature (2775)..(2780): n is a, c, g, or t
  misc_feature (2782)..(2788): n is a, c, g, or t
  misc_feature (2791)..(2791): n is a, c, g, or t
  misc_feature (2793)..(2796): n is a, c, g, or t
  misc_feature (2798)..(2799): n is a, c, g, or t
  misc_feature (2802)..(2802): n is a, c, g, or t
  misc_feature (2804)..(2806): n is a, c, g, or t
  misc_feature (2809)..(2815): n is a, c, g, or t
  misc_feature (2817)..(2817): n is a, c, g, or t
  misc_feature (2820)..(2820): n is a, c, g, or t
  misc_feature (2822)..(2822): n is a, c, g, or t
  misc_feature (2828)..(2828): n is a, c, g, or t
  misc_feature (2830)..(2831): n is a, c, g, or t
  misc_feature (2833)..(2835): n is a, c, g, or t
  misc_feature (2837)..(2842): n is a, c, g, or t
  misc_feature (2845)..(2847): n is a, c, g, or t
  misc_feature (2851)..(2851): n is a, c, g, or t
  misc_feature (2854)..(2854): n is a, c, g, or t
  misc_feature (2856)..(2857): n is a, c, g, or t
  misc_feature (2859)..(2859): n is a, c, g, or t
  misc_feature (2861)..(2861): n is a, c, g, or t
  misc_feature (2863)..(2865): n is a, c, g, or t
  misc_feature (2867)..(2870): n is a, c, g, or t
  misc_feature (2874)..(2878): n is a, c, g, or t
  misc_feature (2880)..(2895): n is a, c, g, or t
  misc_feature (2899)..(2903): n is a, c, g, or t
  misc_feature (2905)..(2919): n is a, c, g, or t
  misc_feature (2921)..(2923): n is a, c, g, or t
  misc_feature (2926)..(2931): n is a, c, g, or t
  misc_feature (2933)..(2934): n is a, c, g, or t
  misc_feature (2936)..(2938): n is a, c, g, or t
  misc_feature (2940)..(2943): n is a, c, g, or t
  misc_feature (2945)..(2953): n is a, c, g, or t
  misc_feature (2956)..(2956): n is a, c, g, or t
  misc_feature (2958)..(2964): n is a, c, g, or t
  misc_feature (2966)..(2969): n is a, c, g, or t
  misc_feature (2971)..(2976): n is a, c, g, or t
  misc_feature (2978)..(2978): n is a, c, g, or t
  misc_feature (2980)..(2981): n is a, c, g, or t
  misc_feature (2983)..(2988): n is a, c, g, or t
  misc_feature (2990)..(2997): n is a, c, g, or t
  misc_feature (2999)..(3000): n is a, c, g, or t
  misc_feature (3004)..(3006): n is a, c, g, or t
  misc_feature (3008)..(3011): n is a, c, g, or t
  misc_feature (3013)..(3030): n is a, c, g, or t
  misc_feature (3032)..(3035): n is a, c, g, or t
  misc_feature (3037)..(3038): n is a, c, g, or t
  misc_feature (3040)..(3044): n is a, c, g, or t
  misc_feature (3046)..(3054): n is a, c, g, or t
  misc_feature (3056)..(3065): n is a, c, g, or t
  misc_feature (3067)..(3071): n is a, c, g, or t
  misc_feature (3073)..(3074): n is a, c, g, or t
  misc_feature (3077)..(3078): n is a, c, g, or t
  misc_feature (3080)..(3082): n is a, c, g, or t
  misc_feature (3086)..(3087): n is a, c, g, or t
  misc_feature (3089)..(3097): n is a, c, g, or t
  misc_feature (3099)..(3105): n is a, c, g, or t
  misc_feature (3107)..(3131): n is a, c, g, or t
  misc_feature (3133)..(3135): n is a, c, g, or t
  misc_feature (3138)..(3143): n is a, c, g, or t
  misc_feature (3145)..(3153): n is a, c, g, or t
  misc_feature (3155)..(3156): n is a, c, g, or t
  misc_feature (3158)..(3174): n is a, c, g, or t
  misc_feature (3177)..(3177): n is a, c, g, or t
  misc_feature (3179)..(3182): n is a, c, g, or t
  misc_feature (3184)..(3185): n is a, c, g, or t
  misc_feature (3187)..(3191): n is a, c, g, or t
  misc_feature (3193)..(3194): n is a, c, g, or t
  misc_feature (3198)..(3200): n is a, c, g, or t
  misc_feature (3202)..(3203): n is a, c, g, or t
  misc_feature (3205)..(3207): n is a, c, g, or t
  misc_feature (3210)..(3210): n is a, c, g, or t
  misc_feature (3214)..(3216): n is a, c, g, or t
  misc_feature (3221)..(3221): n is a, c, g, or t
  misc_feature (3223)..(3223): n is a, c, g, or t
  misc_feature (3226)..(3234): n is a, c, g, or t
  misc_feature (3236)..(3236): n is a, c, g, or t
  misc_feature (3238)..(3255): n is a, c, g, or t
  misc_feature (3257)..(3259): n is a, c, g, or t
  misc_feature (3261)..(3267): n is a, c, g, or t
  misc_feature (3269)..(3270): n is a, c, g, or t
  misc_feature (3273)..(3277): n is a, c, g, or t
  misc_feature (3279)..(3280): n is a, c, g, or t
  misc_feature (3282)..(3283): n is a, c, g, or t
  misc_feature (3285)..(3286): n is a, c, g, or t
  misc_feature (3288)..(3292): n is a, c, g, or t
  misc_feature (3294)..(3294): n is a, c, g, or t
  misc_feature (3296)..(3297): n is a, c, g, or t
  misc_feature (3299)..(3305): n is a, c, g, or t
  misc_feature (3308)..(3313): n is a, c, g, or t
  misc_feature (3315)..(3319): n is a, c, g, or t
  misc_feature (3321)..(3325): n is a, c, g, or t
  misc_feature (3327)..(3335): n is a, c, g, or t
  misc_feature (3337)..(3340): n is a, c, g, or t
  misc_feature (3342)..(3352): n is a, c, g, or t
  misc_feature (3355)..(3357): n is a, c, g, or t
  misc_feature (3359)..(3366): n is a, c, g, or t
  misc_feature (3368)..(3370): n is a, c, g, or t
  misc_feature (3372)..(3372): n is a, c, g, or t
  misc_feature (3374)..(3375): n is a, c, g, or t
  misc_feature (3377)..(3379): n is a, c, g, or t
  misc_feature (3381)..(3384): n is a, c, g, or t
  misc_feature (3386)..(3386): n is a, c, g, or t
  misc_feature (3388)..(3390): n is a, c, g, or t
  misc_feature (3393)..(3394): n is a, c, g, or t
  misc_feature (3396)..(3399): n is a, c, g, or t
  misc_feature (3401)..(3415): n is a, c, g, or t
  misc_feature (3419)..(3420): n is a, c, g, or t
  misc_feature (3422)..(3434): n is a, c, g, or t
  misc_feature (3436)..(3445): n is a, c, g, or t
  misc_feature (3447)..(3454): n is a, c, g, or t
  misc_feature (3456)..(3463): n is a, c, g, or t
  misc_feature (3465)..(3468): n is a, c, g, or t
  misc_feature (3470)..(3475): n is a, c, g, or t
  misc_feature (3477)..(3478): n is a, c, g, or t
  misc_feature (3480)..(3484): n is a, c, g, or t
  misc_feature (3486)..(3487): n is a, c, g, or t
  misc_feature (3489)..(3493): n is a, c, g, or t
  misc_feature (3495)..(3497): n is a, c, g, or t
  misc_feature (3499)..(3508): n is a, c, g, or t
  misc_feature (3511)..(3515): n is a, c, g, or t
  misc_feature (3517)..(3530): n is a, c, g, or t
  misc_feature (3532)..(3534): n is a, c, g, or t
  misc_feature (3536)..(3540): n is a, c, g, or t
  misc_feature (3543)..(3543): n is a, c, g, or t
  misc_feature (3547)..(3548): n is a, c, g, or t
  misc_feature (3550)..(3553): n is a, c, g, or t
  misc_feature (3556)..(3558): n is a, c, g, or t
  misc_feature (3560)..(3573): n is a, c, g, or t
  misc_feature (3575)..(3575): n is a, c, g, or t
  misc_feature (3577)..(3578): n is a, c, g, or t
  misc_feature (3580)..(3583): n is a, c, g, or t
  misc_feature (3585)..(3588): n is a, c, g, or t
  misc_feature (3590)..(3591): n is a, c, g, or t
  misc_feature (3593)..(3599): n is a, c, g, or t
  misc_feature (3602)..(3602): n is a, c, g, or t
  misc_feature (3604)..(3605): n is a, c, g, or t
  misc_feature (3607)..(3611): n is a, c, g, or t
  misc_feature (3613)..(3613): n is a, c, g, or t
  misc_feature (3615)..(3617): n is a, c, g, or t
  misc_feature (3619)..(3620): n is a, c, g, or t
  misc_feature (3622)..(3622): n is a, c, g, or t
  misc_feature (3624)..(3624): n is a, c, g, or t
  misc_feature (3626)..(3627): n is a, c, g, or t
  misc_feature (3629)..(3631): n is a, c, g, or t
  misc_feature (3634)..(3635): n is a, c, g, or t
  misc_feature (3637)..(3639): n is a, c, g, or t
  misc_feature (3642)..(3649): n is a, c, g, or t
  misc_feature (3652)..(3666): n is a, c, g, or t
  misc_feature (3668)..(3676): n is a, c, g, or t
  misc_feature (3678)..(3678): n is a, c, g, or t
  misc_feature (3680)..(3686): n is a, c, g, or t
  misc_feature (3688)..(3692): n is a, c, g, or t
  misc_feature (3694)..(3696): n is a, c, g, or t
  misc_feature (3698)..(3699): n is a, c, g, or t
  misc_feature (3701)..(3713): n is a, c, g, or t
  misc_feature (3715)..(3732): n is a, c, g, or t
  misc_feature (3734)..(3735): n is a, c, g, or t
  misc_feature (3737)..(3739): n is a, c, g, or t
  misc_feature (3741)..(3749): n is a, c, g, or t
  misc_feature (3752)..(3762): n is a, c, g, or t
  misc_feature (3764)..(3803): n is a, c, g, or t
  misc_feature (3805)..(3825): n is a, c, g, or t
  misc_feature (3827)..(3842): n is a, c, g, or t
  misc_feature (3844)..(3848): n is a, c, g, or t
  misc_feature (3850)..(3853): n is a, c, g, or t
  misc_feature (3856)..(3869): n is a, c, g, or t
  misc_feature (3872)..(3885): n is a, c, g, or t
  misc_feature (3887)..(3909): n is a, c, g, or t
  misc_feature (3911)..(3932): n is a, c, g, or t
  misc_feature (3934)..(3938): n is a, c, g, or t
  misc_feature (3940)..(3948): n is a, c, g, or t
  misc_feature (3950)..(3956): n is a, c, g, or t
  misc_feature (3958)..(3961): n is a, c, g, or t
  misc_feature (3963)..(4000): n is a, c, g, or t
ctttccatgccgatgatacttatgttccgcttgaaaagcaaaagcttatgatgaaaaccattcttcatcttcatgccaaagctaaggatatagttgctcagaatattccgctttccaagattcttaaccttggtctgtttgataagcttacaaagatgaagtatgatattcctaacagcaagcctgaaatgtttgacgattacattaaggaaattgacgaaaagcttgctgcaatttcttaataaggagggaacgcaataatgattatagattatgtaggcgttaaagaaattaacggctctcttatagttatggacggtgttaagggcgtttccaacgaggaaattgttgacattcgtcttgataacggtacaatgcgtcagggtcgtgtcgttcagattgagggcgaaagaatagttgttcaggtttttgagggtacaagaagaatcagccttaaaaacacaagaacaagacttacaggtcatcctatggagatgcctctttcccctgaaattatcggccgtgtacttgacggtgcgggcaaacctattgacggactcggagatattttccctgttaaaaaggctaatatcaacggtactcctatcaaccctgtttcccgtgtttatcctaaaaactacatcaacacnggtatttcaaccattgatacgcttatgactcttatcagaggtcagaagctgcctatcttctccggctcaggtatgaaacataatgaccttgccgttcagattgtaagacaggctaaaatcagcggtgcaaacagctctaacttcggtgttgtatttgccgcaatgggtgttcaaaaagatgttgcagaatactttaagaagagctttgaagaaagcggcgtactttcaagagttgtaatgcttttgaacctttcaaacgatcctatcattgaaagaactcttacaccgagatgtgctcttacaattgctgaatatcttgcatttgagcttgatatgcacattctcgttattatgaccgatatgacatcttatgccgaggctcttcgtgagttctcgtcatcaaaaggtgaaattccgggcagaaagggttaccccggctatctttattctgaccttgcatcactttatgagcgtgcaggtatgattaaaggtcacaacggttctgttacacagattccgattttgacaatgcctaacgacgatattactcatcctatccccgaccttacaggttacattacagagggacagattgttcttgaccgttcacttcagggacagggattgtatccgcctgttaatgttcttccttccctttcccgtcttatgaaggacggtatcggtgagggttatacaagagccgatcaccagcctcttgcaaaccagcttttcgcttcttatgcaaaggtaattgacgcaagatcgcttgcatctgttatcggtgaagaggagctttctcctactgataagaagtacattgagtttggcagattgtttgaatcaaagttcgttaatcagggctttaatgaaaacagaagtattgaacagagtcttgaccttggttgggaattgctttcaacattgccgagagcagaacttgaccgtgttgacgatgctttacttgatcagtactataagggtgacaaataatcgtttgaagaaaggagtgtgagcatttatggcagtacagacagtacctaccaagggtaatcttatgaatactaagaaatcccttgcactcgccaaaaacggctatgaactgttggacagaaagcgtaacattctcatcagagaaatgatgacgcttatcgaccatgcaaacgcaatccagcagaaaattgatgacgcttatgcagaggcttacacagcacttcaaacggcaaatgttaccaacggcttttgtgaagatatttctaacgctattccctatgagaacggcttgaagcttgattcaagaagtgttatgggtgttgaaattccgattctcactattgaggaacgagaggaccatnactacctacactacggtctgcgcacaacaaattcggcaattgataaggtttatacnaaatttaccgaagttaaaaatcttacagttgagcttgccgagattgagaacagcgtttaccgccttgccgattcaatcaagaaaactcagaagagagcaaacgctctcaagaacattatgattccccgttttgaggaaacagttaagttcatttccgacgcacttgacgaaaaggatcgtgaggaattcagccgactcaaggtaatcaagaagaaaaagcaaaaagatgctgctttgaaaaaagctaaagaattaagtgctgaaagcgcataaattatcagcccgaccgtaatttggnngggnnnttttaannnnnnannnnaanaaaannnnnggnnnnnnnntttnnncnanncnnttnnnttttnnntttnnnnnttnnnnnntnnttnnnttttnnttnnnnnnnnnnnanttncnnnnnnnnnnnntnnnnnnnnannnnnnannnaannnnnnnnnnnnnnnnannnnnannnnnnnntnnnnnnntnnnnannannantnnnnnnnnnnnnnnnnnnnnntttnnttgnnnnnntnnnnnnnnnnnnnnnttntnngnnnnannnnnnnnnnnnnnnncnnnnnnnannnnnnnnncnnnnnnnncnnnnannnnnnnnncnnnnnnnntnnnnnnnntnnnnnnnnnnanannnnnnaannnnnnnnnaannnnnnnnnannannannnnnnnnnntnnannnnanttnnnnnnannnnnnnttngnnnnannaanannnaannnnnnnanaananaaaaanannannnannnnnnttnnntttnttntnntntncnnntnnnntttnnnnnannnnnnnnnnnnnnnntttnnnnntnnnnnnnnnnnnnnntnnnttnnnnnntnntnnntnnnntnnnnnnnnntgnannnnnnntnnnntnnnnnnanannannnnnnannnnnnnntnnaaannncnnnncnnnnnnnnnnnnnnnnnncnnnngnntnnnnngnnnnnnnnngnnnnnnnnnntnnnnntnnccnnannncacnncnnnnnnnnncnnnnnnncnnnnnnnnnnnnnnnnnnnnnnnnnannnaannnnnntnnnnnnnnncnntnnnnnnnnnnnnnnnnnatntnnnntnntnnnnntnntttnnntnntnnnaanttannntttananaannnnnnnnnantnnnnnnnnnnnnnnnnnntnnngnnnnnnncnnttnnnnntnngnncnnannnnntntnncnnnnnnnaannnnnncnnnnntnnnnncnnnnnnnnnannnntnnnnnnnnnnngannntnnnnnnnntnnntncnntnnnannnncntnnnttnngnnnncnnnnnnnnnnnnnnnaaannannnnnnnnnnnnncnnnnnnnnnnannnnnnnnannnnnnnnannnnannnnnnannannnnnanntnnnnntnnncnnnnnnnnnnttnnnnnannnnnnnnnnnnnntnnntnnnnncanattnngnnnnaannncnnnnnnnnnnnnnntncnncnnnncnnnntnncnnnnnnnttnanntnnnnnantnnntnnanantnntnnnttnnannnttnnnnnnnnaannnnnnnnnnnnnnngnnnnnnnnntngnnnnnnngnnnnntnnntnntnnnnnnnnnnnnngnnnnnnnnnnnnnnnnnntnntnnntnnnnnnnnnaannnnnnnnnnntnnnnnnnnnnnnnnnnnnnnnnnnnnnnnnnnnnnnnnnnannnnnnnnnnnnnnnnnnnnntnnnnnnnnnnnnnnnnannnnngnnnnttnnnnnnnnnnnnnnaannnnnnnnnnnnnngnnnnnnnnnnnnnnnnnnnnnnnannnnnnnnnnnnnnnnnnnnnntnnnnncnnnnnnnnntnnnnnnngnnnncnnnnnnnnnnnnnnnnnnnnnnnnnnnnnnnnnnnnnn

SEQ ID NO: 947 - DNA, 4000 bp, Escherichia coli
  misc_feature (55)..(55): n is a, c, g, or t
  misc_feature (137)..(137): n is a, c, g, or t
  misc_feature (334)..(334): n is a, c, g, or t
  misc_feature (349)..(349): n is a, c, g, or t
  misc_feature (367)..(367): n is a, c, g, or t
  misc_feature (466)..(466): n is a, c, g, or t
  misc_feature (589)..(589): n is a, c, g, or t
  misc_feature (614)..(615): n is a, c, g, or t
  misc_feature (741)..(741): n is a, c, g, or t
  misc_feature (754)..(754): n is a, c, g, or t
  misc_feature (867)..(867): n is a, c, g, or t
  misc_feature (1924)..(1924): n is a, c, g, or t
  misc_feature (1987)..(1987): n is a, c, g, or t
  misc_feature (2150)..(2150): n is a, c, g, or t
cttgacgaaatagacgaacttgacgactttgagtacattgatgaataagcccganttacattattatgagcttgcaagcaatgtcgttgccttctcatctacacggtacggaggcgtgagcaaaggcaattatgctnctttcaacattaataaatattgcggtgatgtgccagaagacatagaacaaaaccgcagaaacttagccaacagtttaggaattgatattgacaagcttattgttccacaccaaattcacggtgattgttcacaaatcattgcccacgaatattttaatttgcctgcaaacattcgtgaacaaattatagaaggtgtngatgcggtaatgacnaatgagccagacgtttgnatcggagtatcgactgccgattgcattcctgttctattatacgataccaagcaccatgctgccgccgcaatacatgcaggttggcgtggaacagcgaancatatagtgcagaaaaccatcagggagatgggcattgtctaccaaaccaaaccgcaagaactgcgagcagtgattggtccaggcatctctttgcagaacttcgaagtaggcgatgaagtctangaacagtttgccaatgcgcaattcnntatggaacgaattgccaaacgctttcgtgttttgcaaactaaagagggagaactccctttgaaatggcatttagatttgaagctttccaaccgtatagatatggaaacaatgggtattctgccgcnaaatataattgangagaaaatctgtacctacgataatacaagcgattacttctctgctcgtaagctcggaataaactctggacgtatctataacggaattatattgaggtaagaagtatttccttncccatttattctattgttttgccacgaccgtaaaactattcttggcgtgccaaacggtttctgttatatattcaaagtacctctaatatattaaggtgtaagcaaaccgcttacactaagccgctgagctgtgctttcaattcttttagctggtcgcgtaccgacatcaggctctcaagcactttctgactcttatcggcaccactgcggttctcttgcaacatttttcttgctgcagctatcttaaatccacgcacttttacaagattgtagataatctttatatgctcaatatctttaacggtatactgtcggacacggtttcctgtggtcttggggcggagatggggaaattctgtttcccagtaacgaagtaaactttccgacacacctatcatctgtgccacctccttaatggaataatatagtttgcgcgaattatctgccatagcttaatcaatctacaattcgtttgcaaaaatagtgaaaagtcagtatctttgcaacacttttagatgaattttataaaataaagtatatgaaaatgatgactgcgaatgaaatccgcgactctttcaagaagttctttgagtcgaaaggacatgtcattgtaccgtccgcgccaatggttatcaaggacgatccaacgctaatgtttaccaacgctggtatgaaccagtggaaagatataatacttgggacgaaagatccggagccacgccgccgtacagactcacagaaatgtttgcgtgtaagtggcaaacacaacgacttggaagaggttggacacgacacttaccaccatacaatgtttgaaatgctcggcaactggagctttggagactacttcaaggaaggtgccatcgactatgcgtgggagtatttggttgatgttctgaagttaaatccagccgatctgtatgttacagtgttcgaaggcagtcctgaagatggtattcctcgcgatgacgaagctgccaaatactgggctaaacacctaccggcagaccacattatagatggaaacaagcacgacaacttctgggaaatgggcganacaggtccgtgcggtccatgttcggagatacatgtagactctcgcagcaacgaagaaaaggcncaaatacccgggcgtgaacttgtaaacaaagacaacccgcaggtgattgagatatggaacatcgtcttcatgcagttccaacgcaagtccgacggttcgctctcacccctttcaatgcacgtcatcgacacgggtatgggcttcgaacgccttgtacgcatgntgcagggaaagaactcaaactacgacaccgacatcttccagcctaccattaaggagatagaacgcctgagcggaaagaagtacggcttcactacgccatcgggcaagaacggagaagcgaagaccgaacaagagaagatagacattgcaatgcgcgttattgccgaccacatgcgtgccgttgccttctcgattgccgacagccagttgccgggcaacgcgaaagcaggctacgttatccgccgtatcttgcgccgtgccgtgcgctatgcctacactttcttgaaccagaaagaggcgtttatttacaagttgctcaacacgtttatccacgaaatgggtggtgcttatcccgaacttacggctcagcgcgagcttattgtccgagttattaaggaagaggaagactcgttcctgcgcactttggagaagggtatcaaccttttaaccaacacaatggacgaaatgaaagcgcaaggaaagaccgaactcagcgggaaagaggcgttccgcctgttcgatacctacggtttcccactcgatttgactgaattgatttgtcgcgaacacggcttcagtgtagacgaaaggcagttcgaggaagaaatggcacagcaaaaggcacgtgcccgcaatgctgcagctgtggaaaacagcgactgggtggtactgcgcgagggcgaacaaaagtttgtcggctacgactacaccgaatacgaatgccacattctgcgttacagaaaggttacccagaagaagaatactttctatgaattggtgttggaccacacgccattctatggcgagatgggtggacaggttggcgaccagggagtcttggtaagcgaagacgagaccatcgacattgtggatacgaagcgagagaataaccaaagcattcatatagtaaagcaactgccaaagaatgtggaggcagactttatggcgtgcgtagacaccgacaagcgcgacgcatcggctgccaaccatactgcaacccacttgttagactatgcgctgaaacaggtgctgggggagcattgcgaacaaaagggttcgtacgtcagtccagacactttgcgtttcgatttctcacacttccagaaggtaaccgacgaggaactacgccaggtagagcgtcttgtgaacgacatgatacgtcaggacttcccatgcggagagtatcgcgacacaccgttggaggaagctaaggaaatgggagcggtggcactgttcggcgaaaagtatggcgacaaggtgcgtgtcattaagtttgggccgtcgtgcgagttctgtggcggcattcacgctacgtccacagggcgcataggcttcttcaagataatcagcgagagcagcgtggctgcaggtgtccgccgtatagaagcgcttaccggcaagcgatgcgaggagactatctacctgctcgaagacaccgtacgcgatttgaaggcgatgttcaacaatgcaaaagacttgcgtggcgttgtagagaaatacattcaggagcacgatgcaatgaggaaacagatggagaacttccgtcagcaaaccgttgcccgcctcgcaaacagcttggtggaaggtgccgaaaccgtgaatggagtgaaagtagtgaaggctgtgctgcccgtggaacctgcttcggcaaaagacatcgtctttaaagtgcgtgctgcaatccccgaaaagctcgtctgcgtattgggttccacctacgaaaacaagccgttgctctccattatgctgagcgatgacatggtgaaagaccacgacttgaacgccgggacgattatccgcgaagctgcaagactgataaaaggcggcggaggcggacagccacactatgca

SEQ ID NO: 948 - DNA, 4000 bp, Escherichia coli
  misc_feature (2344)..(2344): n is a, c, g, or t
tgctactttaactgaaggtaagttaaatgttgtaaagttagtcagttcatctgtttgatttgcaagtttactccaactaacacctccatttgtagaatactgataaaataaccttgctggcttgtatggttccatatgggttacagttgtatcttcaaacttgaattctacttgacccttattttcgagacatgttaactgtgttgttgtaagagtaactggttggacgtcgttgctatcacaatcagggtcggcagctactgtaatagttgaataatttccagtaaagttttgcatatatttttgtgatgtgttacttgaataatatctatatctaatttgatactcgtgtgatgagtcaagcaagataacaccagagacagactggcttgtcatgttaaagtaatgcggcttccagtatccaaaatatgtagcttcatcaccaccaaaaccaccataattatggtttttgggccagtaattactttgttctgaatactgcatttgtccaaaaggtttccaggaatttccatcatgtgaaatctcaacttgaaagtgaacatgcgtggcattgcttacgctactacgtctcttgagtttcaattcaaatttatcagggccatatgcactacaagatacataatcagtttggaagtaaatagggtcatcacttgaatcgccgactgaaaccccacagtcaatagttattggtgttgcttcaacagcagtgtagtaagaaccacctgtagtaccttctatatgatacttaattgttactatgtctccatcgccataggttccaaacagattgataggacttgtcccagaagtacccataagcgtagccgttctctcaactgaatatgctccgtcatttacttttatttgatagattatgtaattagctctagtggtgtttccactataagtaattctaattgtttgttcattgttataacaggtgctcgctgcgtgtaattgggagaaactatgagatgtaatatcgtttgcacaatcaacaagaagagttcctgtagtagtaaagcttccactagtaacaggtgaagtagcagcatacctatacctcatggcaatagttgttccctggggaactgtatcttgaatagtaaaagttttaacttcaccaggaagtagcatcttgtaaatcactgcattgccattactggcatcatagaatgcctcattccatgtggtgcccaaatcagttgagtactgtacgtgaaaataacctgatgcccaaccgttgttgcccactgtaatagatggtttagaaccaccagagacacaagtacctaaaccaatagtcgctgtagttgcgcctactgtaggacagttcactgttcttactgctgagtagtacagttttgagttagtaaaattaccacttgtgtaagaaaacttaaacttatactgcactgttcctgcgtggttgacagttgaagaatctgtatatgaggtgcctactgcaagattagtctcaatatcagtccaggtacttccaccatccgtcgtttttgcaaggtacagataatactgcgtaccagcaggtcttgtgacagtaaatgttgcagttgcaaatcctcctgtttctaaagtattttgacactccccaatagtgacaagatcgctgtacgtatcatcagtagaatcagtagttgtcgctgtcccccatccagtagtggtgatgactggatcacaatttgttgtacgttgttcaacagttttattgtaatttccaaaaacaatccaatctgttgaggcaagttcatctgcactgtatgtaactttatatctaattttcattatggagccagataatgcccgagttgaaagataaatataatctttattgccgctttgctcctgatttatatagtttgttgtttgaactgccgtatagccatctgttgccagacttccagtaacactattgtcagtaactgcattattatcgttataactatccgtattattgaccttgtagaataagtcatttttagtccacgtagaaccattatcaagagagatttcaaatgcataccacaatgctgttctattgatgtcgctatagtttgagttatataatacccaacccatccactgtttattatcaacacagctgtttactacattggatgcttccgtttcatactgatacgactgatttgctgggttaatatttaaatcacaatcgtgatgcctactaattccatttgatggggaagttaaatattgatattcgtaaatacttgaattccatgaagggttttcagtgtaggacttctgaatcctccaatgcatatacgagtctgcttcgtttgtntatgtttttgctcctgctgtataggttaaagtttgaccagcggcaatggaaaatgttgttgtatcagtactgaggtagccagacgagctggtggaggaggagccggcgcctacttttgaaggagtcaccttaaaatacactgtctctgactcgttgttggtaagaattaaagtagaggtttggcctgcagaactacacgctgtcacttcataacttgctgtaactgatggggtgcagtcgttgtattgatggtttgtgtacttataagggtacccagatgtattagaccaatcaggattctcaatataagaaccttgtacaatccactgcatataaccttcagtatcatcagggtatagttttctcatgtttgggctatttgtagcatcatatgttagagtttccccagcagggactgaaaaagttattgcactggaccaatctatgtagtttgaagagttttgattgacattattagatgtagttaaagtaggtgccgctttgaagtacaacgtctgtgcttcattattagttacagaaagtgttgagtatcttccaacagaggaacaggtactaaaagttgctgactgtgtaaaatcggcaacacagttggcttgtttactaaagactgcccatgcagcgtttgctgtggaatctgtagggtttgcctcagcaacacgatatctgaaatatcctgttgaagatgaggaaatggttactggtgatgaaaaagtaagggattgagcatcggcaatggcctgtccgtctacgacctctgtccaggtaacattatctgtagaaaactctacatcaataaaaccaccgtaactatcgttgcttgcattaaagttagttactgtaagccttattgttgcgttaccagagccatcacagatttgagaagtgctttgattgattaaagaataattactactgctatttgttgattctccaccattgccccaccagttgcaatctacagcgctacttgcagtccatcgaatccaggaatctcctgattttagataatttccacgatatcttgaagtgaatgttccttcaacattacttgaactatgtaaatctgttggataataaacaaggtaactagttccgtacaccattttaaattctggtgtaactccgtgatatacatctgttgtaaatgtatatgttccaccagcactgataggtctattttgatcctgccatgaaaattgagaacttcctcttgtgttacgtcttgctacagcaaactccattgacgtatttccagtatttgttactgtcaccgtatatgacatcttgtcttggttacatgtactgttcgtggttgcagtaatagtacctgtatatgttttacaatcaatagttctactcgcagctgatgtgaacccagtcgtagctgatgggtttgcatctgccacaatatactgaaaataaactgtctgagcatttgctactggggatggcatactgatagtctctggtgttcctgagacaactaactcaccatctataaaggttatccaagtaccacttgagccaatcttgtactgcacatcaaaatatgcattaactgttcctgtgttggttagggtgactgtaggtgttgaagaaccaccactacaagttcctggagccgtatcaactgta

SEQ ID NO: 949 - DNA, 4000 bp, Escherichia coli
  misc_feature (2867)..(2867): n is a, c, g, or t
  misc_feature (2879)..(2879): n is a, c, g, or t
  misc_feature (2891)..(2891): n is a, c, g, or t
  misc_feature (2909)..(2909): n is a, c, g, or t
  misc_feature (2911)..(2911): n is a, c, g, or t
  misc_feature (2913)..(2914): n is a, c, g, or t
  misc_feature (2920)..(2920): n is a, c, g, or t
  misc_feature (2924)..(2925): n is a, c, g, or t
  misc_feature (2927)..(2934): n is a, c, g, or t
  misc_feature (2939)..(2940): n is a, c, g, or t
  misc_feature (2942)..(2942): n is a, c, g, or t
  misc_feature (2944)..(2945): n is a, c, g, or t
  misc_feature (2947)..(2947): n is a, c, g, or t
  misc_feature (2949)..(2949): n is a, c, g, or t
  misc_feature (2951)..(2951): n is a, c, g, or t
  misc_feature (2953)..(2954): n is a, c, g, or t
  misc_feature (2959)..(2959): n is a, c, g, or t
  misc_feature (2963)..(2963): n is a, c, g, or t
  misc_feature (2965)..(2965): n is a, c, g, or t
  misc_feature (2967)..(2967): n is a, c, g, or t
  misc_feature (2969)..(2971): n is a, c, g, or t
  misc_feature (2974)..(2975): n is a, c, g, or t
  misc_feature (2978)..(2978): n is a, c, g, or t
  misc_feature (2980)..(2980): n is a, c, g, or t
  misc_feature (2983)..(2983): n is a, c, g, or t
  misc_feature (2985)..(2986): n is a, c, g, or t
  misc_feature (2988)..(2989): n is a, c, g, or t
  misc_feature (2992)..(2993): n is a, c, g, or t
  misc_feature (2996)..(2998): n is a, c, g, or t
  misc_feature (3002)..(3006): n is a, c, g, or t
  misc_feature (3009)..(3012): n is a, c, g, or t
  misc_feature (3014)..(3014): n is a, c, g, or t
  misc_feature (3016)..(3017): n is a, c, g, or t
  misc_feature (3021)..(3021): n is a, c, g, or t
  misc_feature (3025)..(3025): n is a, c, g, or t
  misc_feature (3027)..(3027): n is a, c, g, or t
  misc_feature (3029)..(3030): n is a, c, g, or t
  misc_feature (3033)..(3035): n is a, c, g, or t
  misc_feature (3037)..(3038): n is a, c, g, or t
  misc_feature (3041)..(3041): n is a, c, g, or t
  misc_feature (3044)..(3044): n is a, c, g, or t
  misc_feature (3047)..(3054): n is a, c, g, or t
  misc_feature (3060)..(3061): n is a, c, g, or t
  misc_feature (3065)..(3066): n is a, c, g, or t
  misc_feature (3069)..(3070): n is a, c, g, or t
  misc_feature (3076)..(3076): n is a, c, g, or t
  misc_feature (3080)..(3081): n is a, c, g, or t
  misc_feature (3085)..(3086): n is a, c, g, or t
  misc_feature (3088)..(3088): n is a, c, g, or t
  misc_feature (3091)..(3091): n is a, c, g, or t
  misc_feature (3093)..(3095): n is a, c, g, or t
  misc_feature (3098)..(3098): n is a, c, g, or t
  misc_feature (3101)..(3101): n is a, c, g, or t
  misc_feature (3103)..(3103): n is a, c, g, or t
  misc_feature (3105)..(3106): n is a, c, g, or t
  misc_feature (3109)..(3112): n is a, c, g, or t
  misc_feature (3115)..(3115): n is a, c, g, or t
  misc_feature (3117)..(3117): n is a, c, g, or t
  misc_feature (3120)..(3121): n is a, c, g, or t
  misc_feature (3123)..(3123): n is a, c, g, or t
  misc_feature (3125)..(3125): n is a, c, g, or t
  misc_feature (3129)..(3134): n is a, c, g, or t
  misc_feature (3137)..(3137): n is a, c, g, or t
  misc_feature (3141)..(3143): n is a, c, g, or t
  misc_feature (3145)..(3146): n is a, c, g, or t
  misc_feature (3148)..(3148): n is a, c, g, or t
  misc_feature (3150)..(3150): n is a, c, g, or t
  misc_feature (3153)..(3157): n is a, c, g, or t
  misc_feature (3161)..(3162): n is a, c, g, or t
  misc_feature (3169)..(3169): n is a, c, g, or t
  misc_feature (3172)..(3177): n is a, c, g, or t
  misc_feature (3185)..(3186): n is a, c, g, or t
  misc_feature (3189)..(3191): n is a, c, g, or t
  misc_feature (3193)..(3194): n is a, c, g, or t
  misc_feature (3196)..(3197): n is a, c, g, or t
  misc_feature (3199)..(3199): n is a, c, g, or t
  misc_feature (3203)..(3203): n is a, c, g, or t
  misc_feature (3205)..(3207): n is a, c, g, or t
  misc_feature (3209)..(3209): n is a, c, g, or t
  misc_feature (3211)..(3219): n is a, c, g, or t
  misc_feature (3221)..(3221): n is a, c, g, or t
  misc_feature (3225)..(3227): n is a, c, g, or t
  misc_feature (3229)..(3229): n is a, c, g, or t
  misc_feature (3231)..(3233): n is a, c, g, or t
  misc_feature (3236)..(3240): n is a, c, g, or t
  misc_feature (3242)..(3244): n is a, c, g, or t
  misc_feature (3246)..(3251): n is a, c, g, or t
  misc_feature (3253)..(3253): n is a, c, g, or t
  misc_feature (3256)..(3256): n is a, c, g, or t
  misc_feature (3260)..(3261): n is a, c, g, or t
  misc_feature (3263)..(3269): n is a, c, g, or t
  misc_feature (3278)..(3284): n is a, c, g, or t
  misc_feature (3287)..(3288): n is a, c, g, or t
  misc_feature (3290)..(3294): n is a, c, g, or t
  misc_feature (3296)..(3296): n is a, c, g, or t
  misc_feature (3299)..(3300): n is a, c, g, or t
  misc_feature (3302)..(3302): n is a, c, g, or t
  misc_feature (3307)..(3307): n is a, c, g, or t
  misc_feature (3310)..(3310): n is a, c, g, or t
  misc_feature (3314)..(3314): n is a, c, g, or t
  misc_feature (3316)..(3318): n is a, c, g, or t
  misc_feature (3322)..(3322): n is a, c, g, or t
  misc_feature (3324)..(3324): n is a, c, g, or t
  misc_feature (3328)..(3329): n is a, c, g, or t
  misc_feature (3334)..(3334): n is a, c, g, or t
  misc_feature (3337)..(3337): n is a, c, g, or t
  misc_feature (3341)..(3342): n is a, c, g, or t
  misc_feature (3344)..(3346): n is a, c, g, or t
  misc_feature (3349)..(3350): n is a, c, g, or t
  misc_feature (3353)..(3353): n is a, c, g, or t
  misc_feature (3355)..(3358): n is a, c, g, or t
  misc_feature (3360)..(3363): n is a, c, g, or t
  misc_feature (3365)..(3365): n is a, c, g, or t
  misc_feature (3367)..(3370): n is a, c, g, or t
  misc_feature (3373)..(3373): n is a, c, g, or t
  misc_feature (3375)..(3375): n is a, c, g, or t
  misc_feature (3377)..(3377): n is a, c, g, or t
  misc_feature (3379)..(3380): n is a, c, g, or t
  misc_feature (3382)..(3384): n is a, c, g, or t
  misc_feature (3387)..(3387): n is a, c, g, or t
  misc_feature (3389)..(3390): n is a, c, g, or t
  misc_feature (3392)..(3392): n is a, c, g, or t
  misc_feature (3394)..(3395): n is a, c, g, or t
  misc_feature (3397)..(3400): n is a, c, g, or t
  misc_feature (3402)..(3403): n is a, c, g, or t
  misc_feature (3405)..(3406): n is a, c, g, or t
  misc_feature (3408)..(3409): n is a, c, g, or t
  misc_feature (3411)..(3412): n is a, c, g, or t
  misc_feature (3414)..(3416): n is a, c, g, or t
  misc_feature (3419)..(3419): n is a, c, g, or t
  misc_feature (3421)..(3421): n is a, c, g, or t
  misc_feature (3424)..(3424): n is a, c, g, or t
  misc_feature (3426)..(3426): n is a, c, g, or t
  misc_feature (3428)..(3428): n is a, c, g, or t
  misc_feature (3436)..(3436): n is a, c, g, or t
  misc_feature (3438)..(3438): n is a, c, g, or t
  misc_feature (3440)..(3442): n is a, c, g, or t
  misc_feature (3444)..(3444): n is a, c, g, or t
  misc_feature (3446)..(3448): n is a, c, g, or t
  misc_feature (3453)..(3457): n is a, c, g, or t
  misc_feature (3460)..(3460): n is a, c, g, or t
  misc_feature (3464)..(3471): n is a, c, g, or t
  misc_feature (3476)..(3478): n is a, c, g, or t
  misc_feature (3480)..(3480): n is a, c, g, or t
  misc_feature (3484)..(3488): n is a, c, g, or t
  misc_feature (3490)..(3493): n is a, c, g, or t
  misc_feature (3497)..(3500): n is a, c, g, or t
  misc_feature (3502)..(3508): n is a, c, g, or t
  misc_feature (3511)..(3513): n is a, c, g, or t
  misc_feature (3515)..(3515): n is a, c, g, or t
  misc_feature (3520)..(3520): n is a, c, g, or t
  misc_feature (3522)..(3523): n is a, c, g, or t
  misc_feature (3525)..(3525): n is a, c, g, or t
  misc_feature (3530)..(3545): n is a, c, g, or t
  misc_feature (3550)..(3555): n is a, c, g, or t
  misc_feature (3557)..(3563): n is a, c, g, or t
  misc_feature (3565)..(3567): n is a, c, g, or t
  misc_feature (3570)..(3574): n is a, c, g, or t
  misc_feature (3576)..(3593): n is a, c, g, or t
  misc_feature (3597)..(3598): n is a, c, g, or t
  misc_feature (3600)..(3602): n is a, c, g, or t
  misc_feature (3604)..(3607): n is a, c, g, or t
  misc_feature (3609)..(3610): n is a, c, g, or t
  misc_feature (3613)..(3613): n is a, c, g, or t
  misc_feature (3615)..(3616): n is a, c, g, or t
  misc_feature (3618)..(3618): n is a, c, g, or t
  misc_feature (3621)..(3623): n is a, c, g, or t
  misc_feature (3627)..(3627): n is a, c, g, or t
  misc_feature (3630)..(3634): n is a, c, g, or t
  misc_feature (3638)..(3639): n is a, c, g, or t
  misc_feature (3643)..(3646): n is a, c, g, or t
  misc_feature (3648)..(3648): n is a, c, g, or t
  misc_feature (3650)..(3650): n is a, c, g, or t
  misc_feature (3652)..(3652): n is a, c, g, or t
  misc_feature (3654)..(3659): n is a, c, g, or t
  misc_feature (3661)..(3661): n is a, c, g, or t
  misc_feature (3664)..(3666): n is a, c, g, or t
  misc_feature (3668)..(3668): n is a, c, g, or t
  misc_feature (3671)..(3672): n is a, c, g, or t
  misc_feature (3675)..(3675): n is a, c, g, or t
  misc_feature (3677)..(3678): n is a, c, g, or t
  misc_feature (3680)..(3680): n is a, c, g, or t
  misc_feature (3687)..(3687): n is a, c, g, or t
  misc_feature (3689)..(3694): n is a, c, g, or t
  misc_feature (3696)..(3698): n is a, c, g, or t
  misc_feature (3700)..(3703): n is a, c, g, or t
  misc_feature (3708)..(3709): n is a, c, g, or t
  misc_feature (3712)..(3712): n is a, c, g, or t
  misc_feature (3714)..(3718): n is a, c, g, or t
  misc_feature (3720)..(3720): n is a, c, g, or t
  misc_feature (3724)..(3726): n is a, c, g, or t
  misc_feature (3728)..(3728): n is a, c, g, or t
  misc_feature (3730)..(3730): n is a, c, g, or t
  misc_feature (3732)..(3734): n is a, c, g, or t
  misc_feature (3737)..(3752): n is a, c, g, or t
  misc_feature (3754)..(3754): n is a, c, g, or t
  misc_feature (3756)..(3764): n is a, c, g, or t
  misc_feature (3767)..(3771): n is a, c, g, or t
  misc_feature (3773)..(3778): n is a, c, g, or t
  misc_feature (3780)..(3781): n is a, c, g, or t
  misc_feature (3783)..(3783): n is a, c, g, or t
  misc_feature (3786)..(3790): n is a, c, g, or t
  misc_feature (3793)..(3793): n is a, c, g, or t
  misc_feature (3796)..(3796): n is a, c, g, or t
  misc_feature (3798)..(3799): n is a, c, g, or t
  misc_feature (3801)..(3803): n is a, c, g, or t
  misc_feature (3805)..(3814): n is a, c, g, or t
  misc_feature (3816)..(3821): n is a, c, g, or t
  misc_feature (3823)..(3833): n is a, c, g, or t
  misc_feature (3835)..(3842): n is a, c, g, or t
  misc_feature (3844)..(3845): n is a, c, g, or t
  misc_feature (3847)..(3851): n is a, c, g, or t
  misc_feature (3853)..(3861): n is a, c, g, or t
  misc_feature (3863)..(3865): n is a, c, g, or t
  misc_feature (3868)..(3870): n is a, c, g, or t
  misc_feature (3872)..(3872): n is a, c, g, or t
  misc_feature (3876)..(3877): n is a, c, g, or t
  misc_feature (3880)..(3881): n is a, c, g, or t
  misc_feature (3884)..(3887): n is a, c, g, or t
  misc_feature (3892)..(3893): n is a, c, g, or t
  misc_feature (3896)..(3899): n is a, c, g, or t
  misc_feature (3902)..(3902): n is a, c, g, or t
  misc_feature (3904)..(3904): n is a, c, g, or t
  misc_feature (3906)..(3907): n is a, c, g, or t
  misc_feature (3909)..(3911): n is a, c, g, or t
  misc_feature (3913)..(3915): n is a, c, g, or t
  misc_feature (3917)..(3917): n is a, c, g, or t
  misc_feature (3919)..(3920): n is a, c, g, or t
  misc_feature (3922)..(3925): n is a, c, g, or t
  misc_feature (3927)..(3928): n is a, c, g, or t
  misc_feature (3930)..(3930): n is a, c, g, or t
  misc_feature (3933)..(3935): n is a, c, g, or t
  misc_feature (3939)..(3941): n is a, c, g, or t
  misc_feature (3945)..(3945): n is a, c, g, or t
  misc_feature (3947)..(3947): n is a, c, g, or t
  misc_feature (3949)..(3951): n is a, c, g, or t
  misc_feature (3953)..(3953): n is a, c, g, or t
  misc_feature (3955)..(3956): n is a, c, g, or t
  misc_feature (3959)..(3962): n is a, c, g, or t
  misc_feature (3965)..(3965): n is a, c, g, or t
  misc_feature (3967)..(3969): n is a, c, g, or t
  misc_feature (3972)..(3973): n is a, c, g, or t
  misc_feature (3975)..(3977): n is a, c, g, or t
  misc_feature (3983)..(3983): n is a, c, g, or t
  misc_feature (3986)..(3987): n is a, c, g, or t
  misc_feature (3991)..(3994): n is a, c, g, or t
  misc_feature (3998)..(3998): n is a, c, g, or t
  misc_feature (4000)..(4000): n is a, c, g, or t
ttaaaagttctttttcagttgttaactttgaaatattccataaataaattatacctttatgcttatgtttgtgatcattattattacttttatttgacttatcagaatttttcttttttgaattaataccaatattatccttgtgatcatttttattgtaagccattaaatcatttttatcatgatttttatttttttttatcgtaatatttttagtatcatctttaattttatttttaccactaattacagtattatcttcattattaatttcattattaatttcatcgttggatttaatattgatacttgaatttatgtttaaatttatatttgaattagttttaatgaaagattcatcattaatatatatattactgcttgaatcagtttcaatattagatctaatattattatctgtattaatggttgattgagttttgatgtttgattcacttttattacttgaatcaatatttgaactagtttcaatattaaatttaatattagtatccgtttcaatgtttgaattcgtttcattaattgctgtattatcatcagtaaagaattccttagtaatttcaatattggattcattatcaggtttatcatcatttttaacgattgtttcattatcaatgtcagtattgttattatcatttttaatacctttcataatttttgtatcattttttgccattgtattaatatctattgtatttatttctttttctttattttcaatattatattttatattattttgtttttctttattttggtctttcacatctaaattatcattattaggtttaggtatatttgtcttaaggatacaagagctatcaattttttcattgatattagattttagattattattatttaatttaatattcgtttttaaatttttattattaatatttgaattaattttggaattaaaatcaatttcaatattaatgtttttattactttcattgcttgctattgctttttcatttatttcattatgaacattttctactacgtcatttacaacttttaaatcattttttaatttagaatcttctttaacaattattaatttattaatttcttcaatactatctattgtaatatttctatcattttcaatcttattaccatttctactactcttagtttctaaattaaatatatcaataacattttcttcaatagtatttgtttcattatcagggatggaatttatttcattagaagatgttttatcttttttaacagaagtttctgaaataatattatcaatattagcatttttactattaatttcttcattttctttatttattatatcttcatttttattccttaaagaattttttttttgattcttatctgtatttttatcgtttaaatcatttttatctttaattacgtttaattttgtttttctgacagaataaatattgtcaatctccttagtaaaattggtttcaattagttttgattgtgattttggggaagatggttcacttaatgatttttttaaattattcttagtatttggattattctgtacaagattatttaatgaatttgctcttgatatacttcgaaaagattcctctaaattttttatcctgcttataattttattattagatgatatatatttttttatattatttttatcattttttttcttatttctatttttattcttattcttaaatttcttggataatttaccaatcttcatattacttatcacttgaatttttatatataatttatatttctttaatcaattaaaataattataccttattacttttaaacttgtattttaatttatttattactattttttttaatactaaattaagaagttatgagctttctttaaatttctttaaaatataaaatttatttaatttaatattgtattatcttcataacataaataatatatatataactttaaaaaaaaaaaaaaaatcaaaaatcaaaaatcaaaaaatactttatttatatatttaataattaattaactttaaatttttattaaattttaaatgaaaaaattattcaacaatttaaaaaatatttttttatatatgtatactttattctctaaaaaatataattggactaaattctattaaaaaacattattttcgttttatatgtttttttaatgttaatttaaagaactacaaaaccattttgaaacactaattatcgaagcaaaaattttagtgtttattaaaaaaaataataaaaagtactattataataaataaaatgaaaatgatcttttataatatttttaagcattaaaaaataattaaaaaaaaaaagaaaaattattgtatctttaaaataaaaataattaaaataattaaaatttgatataaaatgcttttaaataattgatataaacttgaaatatattatctgaaatatattaatactcaaaaaaatatttattattttaattaagaataaatttcaacaaatttcaagtttaactgtaaagatattattagtaatatgtataataccaaagacggaaattatatttattcataaacaataatattaatattaatattgtaatatcatttatattttataaaaattaattttataaaaaaaaatgtttaatttcatttaaaaaaaaatttttttataaaattaattttaaactagtaaaatcaatttaaaaataaaatttttaatgagatataaaaaaggtataaataaataaataaataaataaataaataaataaataaataaataaataaataaataaataaataaataaataaataaataaataaataaataaataaataaataaataaataaataaatanataaataaatanataaataaatanataaataaataaataaananannaataantaannannnnnnnnaatannananntnantntnnattantatnantnannntanntantnatntnnannatnnttnnnaatnnnnntannnntnannaaanttangnannaannnanntantanttnnnnnnnnatatanntatnnttnnaaatanttanntatnnantanannnatnaananannaannnnatntnaannananaaannnnnnttnaatnnnanntnanttnnnnnaaanntatattnaannnnnnatatttannatnnntnntnnantttntnnntntnnnnnnnnntntttnnntntnnntannnnnannnannnnnntntanaatnnannnnnnnaataaaaannnnnnnatnnannnnntnttnnanttaanatntatntnnntaantntttnntttantanatanntnnnttnnatntnnnnannnntntnnnnaananananntnnntanannantnncnnnnanntnnanntnnannnatnanttnananatatatananannnanannnatttnnnnnaanaaannnnnnnnaaaannnanaaannnnnannnnaaannnnannnnnnntannnanaattntnntnaaatnnnnnnnnnnnnnnnnttatnnnnnntnnnnnnnannnatnnnnntnnnnnnnnnnnnnnnnnntaanngnnntnnnntnngtngnntngtnnntggnatnnnnntttnnttannnntntntntnnnnnnanttnnntnaannaantnntnataaaantnnnnnnannnannnnaaaanntanannnnnanttannnananannntannnnnnnnnnnnnnnntntnnnnnnnnntannnnnannnnnnannanatnnnnnatnganannannntnnnnnnnnnnannnnnngnnnnnnnnnnnannnnnnnnannannnnnannnnnnnnnannnaannnanaatnnaannaannnntaaannaannnntantnanntnnntnnnanannannnntnnanttnnntttnnnttananannnantnnatnnnnaantnnnttnnannnaaattnaanncaannnnaaanan

SEQ ID NO: 950 - DNA, 4000 bp, Escherichia coli
  misc_feature (140)..(140): n is a, c, g, or t
  misc_feature (193)..(197): n is a, c, g, or t
  misc_feature (206)..(217): n is a, c, g, or t
  misc_feature (220)..(226): n is a, c, g, or t
  misc_feature (229)..(231): n is a, c, g, or t
  misc_feature (234)..(234): n is a, c, g, or t
  misc_feature (236)..(241): n is a, c, g, or t
  misc_feature (244)..(246): n is a, c, g, or t
  misc_feature (248)..(260): n is a, c, g, or t
  misc_feature (262)..(263): n is a, c, g, or t
  misc_feature (265)..(266): n is a, c, g, or t
  misc_feature (268)..(271): n is a, c, g, or t
  misc_feature (274)..(274): n is a, c, g, or t
  misc_feature (302)..(302): n is a, c, g, or t
  misc_feature (319)..(319): n is a, c, g, or t
  misc_feature (325)..(325): n is a, c, g, or t
  misc_feature (362)..(365): n is a, c, g, or t
  misc_feature (396)..(396): n is a, c, g, or t
  misc_feature (558)..(558): n is a, c, g, or t
  misc_feature (560)..(560): n is a, c, g, or t
  misc_feature (1992)..(1992): n is a, c, g, or t
cccatgtccccggcgagtcgccacggcagcgcgttctccctcccgatccctccctcgcgcgtcgccgcgacgacgacttgaaactttccatcgttcatcgcgctcgcgcggtctcgtttcattcctcgcgccgccgtcgncgtcgtcgtcgtcccgcgtcgcgtcgcgttcgaattcaaagtcgcgttcgcgnnnnncgtcgtcgnnnnnnnnnnnnttnnnnnnnccnnncgncnnnnnnccnnncnnnnnnnnnnnnnanngnngnnnnccnccgcgcgtcgcgtcgcgcgcgtcgtcgntcgcgcgcgtcgtcgtncgtcgncgtcgcggtccgacgcgcgcgttcgaattttcaaacnnnngacggaaagacgccgctgactgtttgcgcanacgcgtcgcagaaacaagacttgggtacaacacggagcatcgcgcggtttagggtttagggttgcgtctcgcgcgcgacgattccgcgcggcgtcgacgccgcacacgcgcgcgcgcgatgcggcgcgcgccgccgccgccggacgacgcgcgacgcgcggngncgacgccgatggtcccgctcgcgcgcgccgcggtgacgcacgcgccgatcggcgcgggcgggacgacgatgggcgcgccgccgcggttcggcggaggcgcgccgccgcgcggcgggccgggcgcgatcgggatgggaccgccgatcgcgggcggcgcgccgttcggcgcgccgccgatgggcggcggcgcgccgttcgggatgggaccgccgttcgggatgggcgcggcgacggggatggggacgggaccgccgccgatgggcggacgaccgacgccgggacagtttcgagggatggcgatcacgcacccgagcggactgtcgccggatttgttgcggatgttcgcgccgagggcgccgctgaagtggtgcgcgccgccggcgaaaccgaaaaagacgcagcggatgcagggggtggcggcgtgcgtgaaggagtttgaaacggcgtcgaagacggcgacgcagaagcggaaggcgtcgaagaagaggaatgaggacgcggacgagggcgagattgaggtggacgaggacgatgatgggcgaaaaccgagcggggtgtacgtcgtggtgaccaaggaggaacgcgcggcgcgcaagcgcgccgccgccgaacggaaatctcgcgagttgatcgaggcgggtttggacggatatcgtccgaacgaaaacccgaacgcgacgagcgatccgtatcgcacgctgtttatcgcacggttggcgtacgacgtagatgaagacaagctcaggcgcgaggcggagtactacggcgccgtgtccgacgtcaagttggttcgcgacgagaaggggaaatctcgcggctacgccttcatcgagttcgagcgcgagggcgacatgcgcgcggcgtacaggggcatggatgatcgtcgcatcgaagatcgaagggtgatcgcggacgtcgagcgtgggcgcacaaataaagggtggttacctcgccgtctcggcggcggcgtcggtcgcacgcgtgcggggtcaaaacgtgaaaacgtcgaggcgcgcggtcgcgatcgaacgtatgatgatcgtcgcgaacgcgagcgtagagagatgccgcgctcgccgccgcgctcgccgccgcgcggcggtcgcgccgcgccgccgccgccgcgctcgccctcctctgaggaagagggcgaactcggcgagcgcgcgccggcgcctccaccgccgcccgaggatagaagacgcgatcgttcgcccagtcgcgacagacacgacgacagatacgacggccgaagtcgtggtcgtttcggcgacgatagatacgatcgcgacagataccgcgaccgcgacggctcgcgagaacgcaaacgcggccgcgactcgcgctcgccgtccccgcgcgatcgcagggacaagcgcgatcgcagagactaccgttagcgcaccgatgcgtcgcgcgccgtaaacaccgnaataacaacatttagacgatttagtttacccaatcttcgtttggcccgtcgaacaccagtccggaagcggcattcgtcgactcgccgctcagcatcaccgcgagacgtccgacgaacgcctctcgcgcgtcaccgccgacgtgcgcgtgaactctcgcaggtccgtgcgacgcgtcgccgcgatcgcgtcgatcgtcgcgtcaatcgtccgtctcggtcgtgatgagcaattgttggtaaaaggtctgaatccaccgccctcgcggcgtgtcgaccaccgcgcgcgatatcgagcgcgcacacgcctcacgatgcgcgtttgacgcgcgcggcatgtgagacccatcccaagaaagcgaccctgggatgggcaaaggcgccgcgcgacaacgcgctcgcgaacaaccgactcgagcgtccgtcagatacgcgtcgacggtgtagaaatccgtcggtgtcccttgtgacgctcatagtgatgtcaaacgcgcgcaaataatcggtggcgtgtgcgcgcgtgcaagaggtggatgcgttggataagtgaatgatcaaagcaagtgcagctgaaccgacgacggaacgaagctaacgatggaaagcgaagcgaagcgctcctcgagggtcgactgaccgatgcataactcgcgtgatcgcagcatggtcactgaatcaacatcaggacgctcgaaggttcgtatcggcggtcaatgcgagccgttttggcgacatttcaacactgccgaatgggagccagaatggcgagcgctcgtgggcgtgttggagcacgagcatgtgtccgtagattggcggcttgcgatcgaacgtttgcggcacgacgtgcacgaaaaatccgcgaacttgaggttgagtgcttacaaagattggctgggtcacttggaggatatgcttcatcacgaaagaagcgaacagctgcgtgacgttctccaagagctcctcgaacatggcaaatgggacgttatggacgcgttattcgtgaacgcgacgacccaacgtgacgcgggcgagtcgtgtttatgcttacgcgttttgcgagggctttgtctattcatcccgaagatgcgcgagaagtttgtcggggagaaaatggaatcgctgttggcgcgtttactcgacgagacagaggatcagaagaacaaagtggaaattctcgagttattgctcgtcgtcgtcgctgatgatcagaattctcagcgcgacttcatgagacgtaacggcgtgtcgacggtatgcgcgatgtacacgtccgacgcgagctcgagtgagttgctagagggggcaaaaacgttcatcagcgtcttcatcgagtacatcctccccggcggcaaaaaagcagcgctgagtagcgctctcaccgctgaagcgcgcgaaacggttgcggaattgatcggagcgcacacaaaagatgtatacgtagttaagctatagcggattagggaatagtgattcattagaggttgtcatgatattgcattatgtacagatacagcgcgatgcatgcgatgctgcgacggcgtaaccggagttactcgtcttcggggtaaatggacgtgcagtcttcgtcgaacaaatcgcacgacgtcacaggattcttcagatcatttgcgtcgtcgtcgtctcgacgtgcgggcgttcgcgcggggaccttcgggcggttcgccggtccaaagttagcggtacgcaggacgtacgccgagctgatggcgtcgtagagctcctcgcccatgctactgtcggtcacttcgcattcgacatcgacgaggacgcagtgagagtcttggtctaaccaagcgcgctcgtgaacgatgtgcttgatcgaagcacccacgtcggcaatcttgttgcacacgccagcgataccacccggtctgtcgggaacgacgcacgcgaagcgcacgagtcgcccgtccgagaccaagccgcgctcgagcactttaccgagcgtgctcgtatcgatgttaccaccgcacatggcgaccactacttt

SEQ ID NO: 951 - DNA, 4000 bp, Escherichia coli
  misc_feature (3)..(4): n is a, c, g, or t
  misc_feature (6)..(7): n is a, c, g, or t
  misc_feature (9)..(12): n is a, c, g, or t
  misc_feature (14)..(18): n is a, c, g, or t
  misc_feature (20)..(20): n is a, c, g, or t
  misc_feature (24)..(24): n is a, c, g, or t
  misc_feature (26)..(26): n is a, c, g, or t
  misc_feature (28)..(28): n is a, c, g, or t
  misc_feature (30)..(30): n is a, c, g, or t
  misc_feature (34)..(38): n is a, c, g, or t
  misc_feature (41)..(41): n is a, c, g, or t
  misc_feature (43)..(45): n is a, c, g, or t
  misc_feature (48)..(53): n is a, c, g, or t
  misc_feature (55)..(57): n is a, c, g, or t
  misc_feature (59)..(59): n is a, c, g, or t
  misc_feature (61)..(64): n is a, c, g, or t
  misc_feature (66)..(66): n is a, c, g, or t
  misc_feature (69)..(69): n is a, c, g, or t
  misc_feature (71)..(72): n is a, c, g, or t
  misc_feature (76)..(76): n is a, c, g, or t
  misc_feature (80)..(80): n is a, c, g, or t
  misc_feature (86)..(86): n is a, c, g, or t
  misc_feature (88)..(90): n is a, c, g, or t
  misc_feature (93)..(94): n is a, c, g, or t
  misc_feature (96)..(97): n is a, c, g, or t
  misc_feature (99)..(103): n is a, c, g, or t
  misc_feature (109)..(109): n is a, c, g, or t
  misc_feature (113)..(114): n is a, c, g, or t
  misc_feature (117)..(118): n is a, c, g, or t
  misc_feature (120)..(121): n is a, c, g, or t
  misc_feature (124)..(124): n is a, c, g, or t
  misc_feature (127)..(128): n is a, c, g, or t
  misc_feature (130)..(130): n is a, c, g, or t
  misc_feature (132)..(133): n is a, c, g, or t
  misc_feature (137)..(137): n is a, c, g, or t
  misc_feature (142)..(145): n is a, c, g, or t
  misc_feature (147)..(147): n is a, c, g, or t
  misc_feature (149)..(149): n is a, c, g, or t
  misc_feature (151)..(151): n is a, c, g, or t
  misc_feature (153)..(153): n is a, c, g, or t
  misc_feature (155)..(156): n is a, c, g, or t
  misc_feature (162)..(162): n is a, c, g, or t
  misc_feature (165)..(166): n is a, c, g, or t
  misc_feature (168)..(168): n is a, c, g, or t
  misc_feature (171)..(172): n is a, c, g, or t
  misc_feature (174)..(174): n is a, c, g, or t
  misc_feature (178)..(179): n is a, c, g, or t
  misc_feature (181)..(181): n is a, c, g, or t
  misc_feature (183)..(184): n is a, c, g, or t
  misc_feature (186)..(186): n is a, c, g, or t
  misc_feature (188)..(191): n is a, c, g, or t
  misc_feature (199)..(204): n is a, c, g, or t
  misc_feature (208)..(209): n is a, c, g, or t
  misc_feature (211)..(211): n is a, c, g, or t
  misc_feature (214)..(215): n is a, c, g, or t
  misc_feature (217)..(219): n is a, c, g, or t
  misc_feature (221)..(221): n is a, c, g, or t
  misc_feature (224)..(228): n is a, c, g, or t
  misc_feature (230)..(231): n is a, c, g, or t
  misc_feature (233)..(233): n is a, c, g, or t
  misc_feature (235)..(239): n is a, c, g, or t
  misc_feature (242)..(242): n is a, c, g, or t
  misc_feature (244)..(246): n is a, c, g, or t
  misc_feature (248)..(250): n is a, c, g, or t
  misc_feature (258)..(261): n is a, c, g, or t
  misc_feature (265)..(266): n is a, c, g, or t
  misc_feature (270)..(273): n is a, c, g, or t
  misc_feature (276)..(277): n is a, c, g, or t
  misc_feature (281)..(283): n is a, c, g, or t
  misc_feature (285)..(285): n is a, c, g, or t
  misc_feature (288)..(288): n is a, c, g, or t
  misc_feature (290)..(293): n is a, c, g, or t
  misc_feature (295)..(296): n is a, c, g, or t
  misc_feature (298)..(299): n is a, c, g, or t
  misc_feature (301)..(305): n is a, c, g, or t
  misc_feature (309)..(309): n is a, c, g, or t
  misc_feature (312)..(312): n is a, c, g, or t
  misc_feature (314)..(316): n is a, c, g, or t
  misc_feature (318)..(318): n is a, c, g, or t
  misc_feature (320)..(323): n is a, c, g, or t
  misc_feature (325)..(326): n is a, c, g, or t
  misc_feature (328)..(330): n is a, c, g, or t
  misc_feature (333)..(334): n is a, c, g, or t
  misc_feature (343)..(343): n is a, c, g, or t
  misc_feature (345)..(345): n is a, c, g, or t
  misc_feature (348)..(348): n is a, c, g, or t
  misc_feature (351)..(352): n is a, c, g, or t
  misc_feature (354)..(354): n is a, c, g, or t
  misc_feature (357)..(358): n is a, c, g, or t
  misc_feature (361)..(361): n is a, c, g, or t
  misc_feature (367)..(367): n is a, c, g, or t
  misc_feature (369)..(370): n is a, c, g, or t
  misc_feature (372)..(372): n is a, c, g, or t
  misc_feature (375)..(375): n is a, c, g, or t
  misc_feature (379)..(379): n is a, c, g, or t
  misc_feature (381)..(381): n is a, c, g, or t
  misc_feature (383)..(384): n is a, c, g, or t
  misc_feature (386)..(386): n is a, c, g, or t
  misc_feature (389)..(389): n is a, c, g, or t
  misc_feature (391)..(393): n is a, c, g, or t
  misc_feature (397)..(398): n is a, c, g, or t
  misc_feature (401)..(401): n is a, c, g, or t
  misc_feature (403)..(407): n is a, c, g, or t
  misc_feature (409)..(412): n is a, c, g, or t
  misc_feature (414)..(414): n is a, c, g, or t
  misc_feature (418)..(418): n is a, c, g, or t
  misc_feature (425)..(425): n is a, c, g, or t
  misc_feature (427)..(428): n is a, c, g, or t
  misc_feature (431)..(432): n is a, c, g, or t
  misc_feature (434)..(436): n is a, c, g, or t
  misc_feature (440)..(442): n is a, c, g, or t
  misc_feature (444)..(446): n is a, c, g, or t
  misc_feature (448)..(450): n is a, c, g, or t
  misc_feature (453)..(453): n is a, c, g, or t
  misc_feature (455)..(457): n is a, c, g, or t
  misc_feature (459)..(459): n is a, c, g, or t
  misc_feature (461)..(463): n is a, c, g, or t
  misc_feature (467)..(468): n is a, c, g, or t
  misc_feature (471)..(471): n is a, c, g, or t
  misc_feature (474)..(476): n is a, c, g, or t
  misc_feature (478)..(478): n is a, c, g, or t
  misc_feature (481)..(481): n is a, c, g, or t
  misc_feature (486)..(487): n is a, c, g, or t
  misc_feature (491)..(492): n is a, c, g, or t
  misc_feature (494)..(495): n is a, c, g, or t
  misc_feature (498)..(498): n is a, c, g, or t
  misc_feature (500)..(501): n is a, c, g, or t
  misc_feature (503)..(504): n is a, c, g, or t
  misc_feature (507)..(508): n is a, c, g, or t
  misc_feature (511)..(511): n is a, c, g, or t
  misc_feature (513)..(514): n is a, c, g, or t
  misc_feature (518)..(518): n is a, c, g, or t
  misc_feature (521)..(521): n is a, c, g, or t
  misc_feature (523)..(524): n is a, c, g, or t
  misc_feature (527)..(528): n is a, c, g, or t
  misc_feature (530)..(534): n is a, c, g, or t
  misc_feature (539)..(539): n is a, c, g, or t
  misc_feature (541)..(543): n is a, c, g, or t
  misc_feature (549)..(549): n is a, c, g, or t
  misc_feature (553)..(553): n is a, c, g, or t
  misc_feature (555)..(556): n is a, c, g, or t
  misc_feature (559)..(562): n is a, c, g, or t
  misc_feature (564)..(566): n is a, c, g, or t
  misc_feature (568)..(568): n is a, c, g, or t
  misc_feature (570)..(570): n is a, c, g, or t
  misc_feature (572)..(572): n is a, c, g, or t
  misc_feature (574)..(575): n is a, c, g, or t
  misc_feature (577)..(578): n is a, c, g, or t
  misc_feature (581)..(581): n is a, c, g, or t
  misc_feature (583)..(584): n is a, c, g, or t
  misc_feature (588)..(588): n is a, c, g, or t
  misc_feature (591)..(593): n is a, c, g, or t
  misc_feature (595)..(596): n is a, c, g, or t
  misc_feature (598)..(598): n is a, c, g, or t
  misc_feature (600)..(600): n is a, c, g, or t
  misc_feature (602)..(605): n is a, c, g, or t
  misc_feature (608)..(608): n is a, c, g, or t
  misc_feature (615)..(616): n is a, c, g, or t
  misc_feature (619)..(619): n is a, c, g, or t
  misc_feature (623)..(624): n is a, c, g, or t
  misc_feature (626)..(626): n is a, c, g, or t
  misc_feature (633)..(637): n is a, c, g, or t
  misc_feature (639)..(640): n is a, c, g, or t
  misc_feature (642)..(643): n is a, c, g, or t
  misc_feature (649)..(649): n is a, c, g, or t
  misc_feature (651)..(654): n is a, c, g, or t
  misc_feature (656)..(657): n is a, c, g, or t
  misc_feature (660)..(660): n is a, c, g, or t
  misc_feature (664)..(664): n is a, c, g, or t
  misc_feature (668)..(669): n is a, c, g, or t
  misc_feature (672)..(672): n is a, c, g, or t
  misc_feature (674)..(675): n is a, c, g, or t
  misc_feature (678)..(679): n is a, c, g, or t
  misc_feature (683)..(684): n is a, c, g, or t
  misc_feature (686)..(688): n is a, c, g, or t
  misc_feature (690)..(691): n is a, c, g, or t
  misc_feature (694)..(696): n is a, c, g, or t
  misc_feature (698)..(698): n is a, c, g, or t
  misc_feature (704)..(704): n is a, c, g, or t
  misc_feature (710)..(710): n is a, c, g, or t
  misc_feature (712)..(719): n is a, c, g, or t
  misc_feature (721)..(723): n is a, c, g, or t
  misc_feature (725)..(725): n is a, c, g, or t
  misc_feature (727)..(728): n is a, c, g, or t
  misc_feature (730)..(731): n is a, c, g, or t
  misc_feature (735)..(737): n is a, c, g, or t
  misc_feature (739)..(739): n is a, c, g, or t
  misc_feature (744)..(744): n is a, c, g, or t
  misc_feature (746)..(747): n is a, c, g, or t
  misc_feature (750)..(752): n is a, c, g, or t
  misc_feature (754)..(755): n is a, c, g, or t
  misc_feature (757)..(761): n is a, c, g, or t
  misc_feature (764)..(766): n is a, c, g, or t
  misc_feature (768)..(768): n is a, c, g, or t
  misc_feature (770)..(774): n is a, c, g, or t
  misc_feature (776)..(777): n is a, c, g, or t
  misc_feature (780)..(780): n is a, c, g, or t
  misc_feature (783)..(784): n is a, c, g, or t
  misc_feature (786)..(792): n is a, c, g, or t
  misc_feature (794)..(796): n is a, c, g, or t
  misc_feature (799)..(800): n is a, c, g, or t
  misc_feature (803)..(805): n is a, c, g, or t
  misc_feature (809)..(809): n is a, c, g, or t
  misc_feature (815)..(815): n is a, c, g, or t
  misc_feature (817)..(819): n is a, c, g, or t
  misc_feature (824)..(825): n is a, c, g, or t
  misc_feature (828)..(828): n is a, c, g, or t
  misc_feature (838)..(839): n is a, c, g, or t
  misc_feature (841)..(842): n is a, c, g, or t
  misc_feature (845)..(846): n is a, c, g, or t
  misc_feature (851)..(852): n is a, c, g, or t
  misc_feature (855)..(856): n is a, c, g, or t
  misc_feature (860)..(865): n is a, c, g, or t
  misc_feature (867)..(867): n is a, c, g, or t
  misc_feature (870)..(888): n is a, c, g, or t
  misc_feature (890)..(890): n is a, c, g, or t
  misc_feature (892)..(893): n is a, c, g, or t
  misc_feature (896)..(896): n is a, c, g, or t
  misc_feature (898)..(898): n is a, c, g, or t
  misc_feature (903)..(903): n is a, c, g, or t
  misc_feature (906)..(906): n is a, c, g, or t
  misc_feature (908)..(909): n is a, c, g, or t
  misc_feature (912)..(912): n is a, c, g, or t
  misc_feature (915)..(915): n is a, c, g, or t
  misc_feature (920)..(921): n is a, c, g, or t
  misc_feature (923)..(924): n is a, c, g, or t
  misc_feature (928)..(928): n is a, c, g, or t
  misc_feature (930)..(930): n is a, c, g, or t
  misc_feature (932)..(932): n is a, c, g, or t
  misc_feature (935)..(935): n is a, c, g, or t
  misc_feature (937)..(937): n is a, c, g, or t
  misc_feature (939)..(940): n is a, c, g, or t
  misc_feature (942)..(942): n is a, c, g, or t
  misc_feature (944)..(945): n is a, c, g, or t
  misc_feature (947)..(949): n is a, c, g, or t
  misc_feature (952)..(952): n is a, c, g, or t
  misc_feature (954)..(954): n is a, c, g, or t
  misc_feature (958)..(960): n is a, c, g, or t
  misc_feature (962)..(962): n is a, c, g, or t
  misc_feature (964)..(966): n is a, c, g, or t
  misc_feature (968)..(968): n is a, c, g, or t
  misc_feature (970)..(972): n is a, c, g, or t
  misc_feature (976)..(976): n is a, c, g, or t
  misc_feature (978)..(983): n is a, c, g, or t
  misc_feature (987)..(987): n is a, c, g, or t
  misc_feature (989)..(989): n is a, c, g, or t
  misc_feature (992)..(993): n is a, c, g, or t
  misc_feature (997)..(997): n is a, c, g, or t
  misc_feature (999)..(999): n is a, c, g, or t
  misc_feature (1004)..(1006): n is a, c, g, or t
  misc_feature (1009)..(1010): n is a, c, g, or t
  misc_feature (1013)..(1014): n is a, c, g, or t
  misc_feature (1016)..(1018): n is a, c, g, or t
  misc_feature (1020)..(1021): n is a, c, g, or t
  misc_feature (1024)..(1024): n is a, c, g, or t
  misc_feature (1027)..(1027): n is a, c, g, or t
  misc_feature (1031)..(1032): n is a, c, g, or t
  misc_feature (1035)..(1035): n is a, c, g, or t
  misc_feature (1037)..(1037): n is a, c, g, or t
  misc_feature (1039)..(1044): n is a, c, g, or t
  misc_feature (1046)..(1052): n is a, c, g, or t
  misc_feature (1054)..(1055): n is a, c, g, or t
  misc_feature (1058)..(1058): n is a, c, g, or t
  misc_feature (1060)..(1061): n is a, c, g, or t
  misc_feature (1063)..(1063): n is a, c, g, or t
  misc_feature (1067)..(1067): n is a, c, g, or t
  misc_feature (1071)..(1071): n is a, c, g, or t
  misc_feature (1074)..(1074): n is a, c, g, or t
  misc_feature (1080)..(1089): n is a, c, g, or t
  misc_feature (1093)..(1093): n is a, c, g, or t
  misc_feature (1097)..(1099): n is a, c, g, or t
  misc_feature (1101)..(1102): n is a, c, g, or t
  misc_feature (1106)..(1106): n is a, c, g, or t
  misc_feature (1108)..(1109): n is a, c, g, or t
  misc_feature (1112)..(1114): n is a, c, g, or t
  misc_feature (1117)..(1118): n is a, c, g, or t
  misc_feature (1120)..(1123): n is a, c, g, or t
  misc_feature (1128)..(1131): n is a, c, g, or t
  misc_feature (1134)..(1136): n is a, c, g, or t
  misc_feature (1138)..(1138): n is a, c, g, or t
  misc_feature (1140)..(1140): n is a, c, g, or t
  misc_feature (1143)..(1143): n is a, c, g, or t
  misc_feature (1145)..(1149): n is a, c, g, or t
  misc_feature (1152)..(1152): n is a, c, g, or t
  misc_feature (1155)..(1158): n is a, c, g, or t
  misc_feature (1161)..(1162): n is a, c, g, or t
  misc_feature (1164)..(1164): n is a, c, g, or t
  misc_feature (1166)..(1166): n is a, c, g, or t
  misc_feature (1169)..(1169): n is a, c, g, or t
  misc_feature (1176)..(1176): n is a, c, g, or t
  misc_feature (1178)..(1180): n is a, c, g, or t
  misc_feature (1183)..(1183): n is a, c, g, or t
  misc_feature (1185)..(1190): n is a, c, g, or t
  misc_feature (1192)..(1202): n is a, c, g, or t
  misc_feature (1204)..(1204): n is a, c, g, or t
  misc_feature (1206)..(1207): n is a, c, g, or t
  misc_feature (1209)..(1212): n is a, c, g, or t
  misc_feature (1217)..(1217): n is a, c, g, or t
  misc_feature (1219)..(1222): n is a, c, g, or t
  misc_feature (1224)..(1224): n is a, c, g, or t
  misc_feature (1226)..(1226): n is a, c, g, or t
  misc_feature (1230)..(1237): n is a, c, g, or t
  misc_feature (1239)..(1243): n is a, c, g, or t
  misc_feature (1250)..(1250): n is a, c, g, or t
  misc_feature (1252)..(1253): n is a, c, g, or t
  misc_feature (1255)..(1255): n is a, c, g, or t
  misc_feature (1259)..(1260): n is a, c, g, or t
  misc_feature (1264)..(1266): n is a, c, g, or t
  misc_feature (1270)..(1270): n is a, c, g, or t
  misc_feature (1274)..(1277): n is a, c, g, or t
  misc_feature (1280)..(1280): n is a, c, g, or t
  misc_feature (1282)..(1284): n is a, c, g, or t
  misc_feature (1484)..(1484): n is a, c, g, or t
  misc_feature (1973)..(1973): n is a, c, g, or t
  misc_feature (1988)..(1988): n is a, c, g, or t
  misc_feature (1998)..(1998): n is a, c, g, or t
  misc_feature (2000)..(2000): n is a, c, g, or t
  misc_feature (2241)..(2241): n is a, c, g, or t
  misc_feature (2279)..(2279): n is a, c, g, or t
  misc_feature (2334)..(2334): n is a, c, g, or t
  misc_feature (2392)..(2395): n is a, c, g, or t
  misc_feature (2404)..(2404): n is a, c, g, or t
  misc_feature (2424)..(2424): n is a, c, g, or t
  misc_feature (2433)..(2433): n is a, c, g, or t
  misc_feature (2436)..(2436): n is a, c, g, or t
  misc_feature (2466)..(2466): n is a, c, g, or t
  misc_feature (2509)..(2510): n is a, c, g, or t
  misc_feature (2561)..(2562): n is a, c, g, or t
  misc_feature (2565)..(2565): n is a, c, g, or t
  misc_feature (2568)..(2568): n is a, c, g, or t
  misc_feature (2570)..(2570): n is a, c, g, or t
  misc_feature (2573)..(2578): n is a, c, g, or t
  misc_feature (2580)..(2580): n is a, c, g, or t
  misc_feature (2582)..(2582): n is a, c, g, or t
  misc_feature (2585)..(2585): n is a, c, g, or t
  misc_feature (2587)..(2587): n is a, c, g, or t
  misc_feature (2591)..(2592): n is a, c, g, or t
  misc_feature (2594)..(2594): n is a, c, g, or t
  misc_feature (2604)..(2604): n is a, c, g, or t
  misc_feature (2607)..(2607): n is a, c, g, or t
  misc_feature (2609)..(2613): n is a, c, g, or t
  misc_feature (2615)..(2615): n is a, c, g, or t
  misc_feature (2617)..(2618): n is a, c, g, or t
  misc_feature (2623)..(2626): n is a, c, g, or t
  misc_feature (2628)..(2630): n is a, c, g, or t
  misc_feature (3232)..(3232): n is a, c, g, or t
  misc_feature (3567)..(3567): n is a, c, g, or t
  misc_feature (3888)..(3888): n is a, c, g, or t
  misc_feature (3890)..(3895): n is a, c, g, or t
  misc_feature (3903)..(3903): n is a, c, g, or t
  misc_feature (3905)..(3905): n is a, c, g, or t
  misc_feature (3914)..(3914): n is a, c, g, or t
  misc_feature (3917)..(3917): n is a, c, g, or t
  misc_feature (3919)..(3920): n is a, c, g, or t
  misc_feature (3929)..(3929): n is a, c, g, or t
  misc_feature (3933)..(3933): n is a, c, g, or t
  misc_feature (3936)..(3937): n is a, c, g, or t
  misc_feature (3939)..(3939): n is a, c, g, or t
  misc_feature (3944)..(3945): n is a, c, g, or t
  misc_feature (3950)..(3950): n is a, c, g, or t
  misc_feature (3952)..(3952): n is a, c, g, or t
  misc_feature (3955)..(3955): n is a, c, g, or t
  misc_feature (3961)..(3962): n is a, c, g, or t
  misc_feature (3966)..(3966): n is a, c, g, or t
  misc_feature (3975)..(3975): n is a, c, g, or t
  misc_feature (3978)..(3978): n is a, c, g, or t
  misc_feature (3981)..(3981): n is a, c, g, or t
  misc_feature (3994)..(3994): n is a, c, g, or t
  misc_feature (3997)..(3997): n is a, c, g, or t
  misc_feature (4000)..(4000): n is a, c, g, or t
aannannannnntnnnnntngtgntnangncgannnnnccngnnncgnnnnnnannnanannnngnacnanngggncgangaggangnnnttnntnntnnnnncttttnttcnnctnntnntanttnnantnnttgntattnnnncnancnancnncgccgncgnngnggnngntggnncntnncncnnnngcgacggnnnnnntttnnangtnntnnnangannnnnannanannnnnatnannntnnnacgaccgnnnngagnnggannnntgnnattnnngnaancnnnngnngnnannnnngtgnagntnnngnannnngnngnnncgnnggcgccggngnagncgnngnagnnganggagantnngnggngttngnanntntanannntgtnnttntnnnnnannnntntaanaaataananncannannngtannncnnngnnnccncnnnanannnactnnctnctnnntntgnttatnnggannannagnannanncgnnggntnnggangtngnnganntnnnnnaacanannncgccgncggngnngannnngnnnancncncnncnntancnncagnacnnncnncncncnnnntcntcttccnnctnttcnncnaattctnnnnncnntnngctcgntnnnntnnttnttanttcnntcncnnccnncgcnncnnncnnttnnntntctttnttttcntnnnnnnnnannngngnnannggcnnnanccccncnnctnnngnntnnnnngcnnncnannnnnannatnagnngnnnnnnncnnnccnnccnnngacnaccatngnnnccacnncgncgacaaaganncnnctnnttttnncanntttnnnnnntnccnnnnnnnnnnnnnnnnnnncncnnctntngctgntgntnntgntgntgttnntnntatnantnctncntnncncnncnnnccncncgcnnntnannnangnnncgtncnnnnnnttcncntcnntcancnccaannnttnnctnngnnncnncgncgncggnnggngngnnnnnngnnnnnnncnnccncnncncggnaagngangaaagnnnnnnnnnntttntttnnncnnctcnanntcnnnaanngnnnnaagannnnccnnntncnccncnnnnnacnccnnnnagnngntnttnttgttcntnnnganannnnnnannnnnnnnnnngnannannnnttttntnnnntntnttcnnnnnnnntnnnnngggaatngnngnaatnnacgnnntcgncgtnnnntgntnnngatgatgatgatgatgatgatgcgcgttcgcgtttgaagtactcacgttcgaaatgatggacgagttcgcgaagtgctcgctgaggtatcgagcgactaagattcgaaacgtggtggcttcttcttgctcctcgtcgaattcgttcgtactggttgatgttgttgttggaagaattaacgtcgtccgctcttcttcttcntcttcttcttcttctactcctaaagcgtgcgtaccctcgaaatactcgtcacctcctccgcttccgattccaccacctccgcaattgttgttaaactgaaacaccttctccaccatcctcctcgctttcttgaacctggtcagcaccaccccgatcaacctcgccgccatcaccctctcggcgaacatctcctcgatctcctccgtcccgttttgcaccgccgtgaccgaagtcaactccacgctcgtctcgtccgccgctcgtaaaacgtccaacgctaacgtcaacgctcttttcaacacgtccgcggaaacggactttagacctttcgaagggtcgttcgaacattggctaaacgcggatactaatatctgcaatctgtgcaacacgtgcatccgaacgcctttctgggtgcacaacgcgcgttctctcgtcacgtacactcgtctcaaatactgcgccgttaaagaaggaatcgtcgtctgcaangtaaacgcgctttgnccccattttntngtcaacgcgtgcgtccacatctgcgcgtcttttgacatctcgagtaaacttttgttcgttctcgccagcgcggagaaggattcgaaatcgttccaatcgatcaacaagcgagcgaagatgtgggagacgagtatgtctttcggcaagcgttctaaaaggaagaactgacgactcgttcggtgttcagtatgtcgtttcgaggaaggcacggatggagaagacatcacgtcatgttgttttngcgcaaatgtgtgacgttttccgtcacttgttttccantaaagagatacgaatggtcgtcctcttttgcgcgcggttgtgcgcttgttttccnacaaccgcgcgctctggagcgccagaacgtgattctaacgcgaggaggagaagtcacnnnngcaaatttngcatcgctcgagcggcaacnacgagaagnacnagaacaacatcaaaagcagacgcgaacgcngagcaaccacctttcccgacggcgaaaagaaagacatcgacannaataacgaatccagcggcatatacgaccttatccgtgatacgaaaacgcgnnggngantncgnnnnnncncntcngnttgnngncgtgccgtcntcngnnnnnangnnggcgnnnngnnntttcgtggcggagttgaaagcgttgattcgagaggcgttcgtgttgaacaagaaggagatagcgaaggacgaaaaggaacgaacgggggtgacgaaatattcaatgtcggaaacgttcgacagttcctcggactttggggaggaattcgaggatcagagtttagaggaggaaatcgagcgacaaggcgaattgcttttggaatatttagagcgcatgaagttatcgaacgcgaaaatctgggagcgagagaaacggttgccgaaagtggaaagtccgtggattatcgaagggccgtattatctcttgtgcaaggttttagacctgtggtttccggagaataaaccggtgcagaggttttggtttttagagacggtggcgaggatgccttacttttcgtacacgaccatgttgacgctgtacgaactcttagggtggtggcgacgaagcagcgagttgaggaaagttcacttcgcggaggagtggaacgagtaccatcacttgttaatcatggaaagtttgggaggcgacaggcgttggagtgaccgctttctcgcgcaacacgcggcgctggtgtactattttgggttagtcgtcgtttggntgctctcgcccaagctcgcgtataattttagcgagaagattgaaacgcacgcggtggcgacgtacgcgcagttcacggaggagaacaaggaattgttagaatcgttgccggcgccagaggtggcgaagaaatattacgaggcggaagatttgtacttgttcgatgagtttcaaacgacgacgatgttaaacaccggcgaaatcgtttccttaaaattgaacagtcgcagcagcgacgaaggggacccattggacccgttatccgtgcgtcgtccaaagattgaaaccttatacgacgtcttttcaaacatttgcgaagacgaaaaagaacacgtngggaccatgaacgcttgccaaatcgagggtgttacgttagggaccgcgaacactatcaacgcgttgactgcgttagcaatcggcggcaccgtggcgtccaagtttgcctctcgattcgcggaagaatccgccattaccgacggattggacgatatcatcggcagcgggaagtttatggatttattcaccgccttgacggatttcttttccgtattccacttgccgttcttttagaaaaagaaagataacaagaaagaacaaaaagataccacacgcaataaaacagaaggagaagaagaaaaagaagaagaagatactacntnnnnnngtagtagntntactatcancantnntaacaacancaanaannancaacnngaagngnggncgcaannaaanaaaaaccanccntcntactacaaaaaanttngcn

SEQ ID NO: 952 - DNA, 4000 bp, Escherichia coli
  misc_feature (1426)..(1426): n is a, c, g, or t
  misc_feature (1429)..(1429): n is a, c, g, or t
  misc_feature (1438)..(1438): n is a, c, g, or t
  misc_feature (1459)..(1459): n is a, c, g, or t
  misc_feature (1476)..(1476): n is a, c, g, or t
  misc_feature (1513)..(1513): n is a, c, g, or t
  misc_feature (1522)..(1522): n is a, c, g, or t
  misc_feature (1527)..(1527): n is a, c, g, or t
  misc_feature (1834)..(1834): n is a, c, g, or t
  misc_feature (1992)..(1992): n is a, c, g, or t
  misc_feature (2113)..(2113): n is a, c, g, or t
  misc_feature (2363)..(2363): n is a, c, g, or t
  misc_feature (2620)..(2620): n is a, c, g, or t
  misc_feature (2774)..(2774): n is a, c, g, or t
  misc_feature (3234)..(3234): n is a, c, g, or t
attcctgcatccatgacatttccatctcttcatccagccaatcagatgttatttctagagttccttctccagctttgtcgactccaaatgcaagagttctcatctcttccgagcttgcttctgttccaggaacatatttcccatatatatctctgtgaaggactgttctggaggtgctaaatcctaaagccccagcctctatagcctcagtaacaagttctgacattttgctgatctcttcatcagatgcgtctacttgattctggcatctttcataacccattacataacttctcaagggaccatgccccatcataaacccaacatccataacgaattcttttttgtcgatggcatctaaaaattctggaaaagtttcccaatcccaatcaattccttcgtgcagagctgaacctgggatatcttcgacaccctccattaattgaataaggaagttttcatctccaggtcgcacaggtgcaaatcccacgccacaatttcccatgaccgcagttgtcacaccatgccaacttgaaggagtaagatatggatcccaggatacctgtccgtcgtagtgagtatgaatatcaacccagccaggcgttaccaaatttccttttgcatcaaactcttttttgcccgagctctcaatcttcccaactaatgtaatttttccatcatcgatagcaatatcaccaaagaatggttttttacctgatccatctaaaatcttgccgttacgtattacaagatcatgtaaattatttgtttccatagtattaatttaactctaagttcatcatgaatatagctataacttaaaccatttttgtattaagtttgtatctgtaggatccttattttataggggtttcagagtcacccttcattccccttcagtaacaacagatttagtaataacaaacacagcgagaacaacgctcaccagaactggcttttttactccactagccaaaactggacctgtgaccactgcaaagatcctcaggcagcaaccgctgttagctcaagtttcccttgccattgctctaacaggtctctgttatcacgatcccacggatgaaagtccattctgaaaaagtccttgtatgctggcacatgagtgcggacaaacccggtcttgccaaacaaaaacttggacagactctttagcgttgaccacttccacatctgtttgtcatggcgcagtatcttaaacgtcactcttaaggtatcgatgagcaaggtaaccatcgcaaggcgcatcacacgcgtgcgcatttcgtgggtgccgccaatatgctcatacacatcaaaagccacagacttatgctcaagctcctcgagggcatgccactgccaaagctcgccaataggaccatcaatattcttcaaaacgcgtccttctagcaagctctctccaaanctngcggtaaantgctccactgacaccgttgangccaatatgacccgtgncgtaatacgcgggtcattgttgcccttctcgatgctntttaaaaanacgcnctctaaatcatcgtaatcataaccccgctgttcacagagtattttgttgtagtttcggtgctcgcggctatgtataccctcctgcttgtaaaacccttttacatcattaagaagtttttcatcggtaatgcgatcttggtaatgtcgaacagaatcaataaaattgcgctcaccgctagggaaactcatactcatggcattgaatactgccgttaaaaacgggtcgttgtctgcccaatccgtggccagagacttttccagttcaaaattcatgtttctgggttgaattgctacaccatcaggggtnttagagattggtcttactgcagtcatcaatacatcctcacttctgtagatgtgataataataccctcaagatgctcacaggcagggacatattcggtcattgatagggatattttcgttcacaagtgttactatttgcactcgcaccaattaaatcgncgtcaccgaggccaatactatggctcagcgccagccccttcagccgtttttctttcgactgttaactcttcttgcagaggatggttatacccaagaacaactatttttatcccctgaagcncagcaaataggcgtactagacataaaccagataaagctaaccgagatacccaaactattacaggcggccgccagcatcaccaatgacccaacattaatgatacgcctaggtgagcgaaccgacataactagcttaggtgcctttggtttcgctctgatgagctgtgctaaccttggagaagcgctaaaactgctcattcgatatcatgccatcactggcccaggaccgtcttttcaactacgaccccacnatttaggcgttatcctgcgcatcgagctagaactaggtaatcctattcaaaaacgtctcattacagagcttgccttttctgaactacgcgctgttggcgagattttgattaatcaaaaaatcacaaaaggcgaattgcatttgaattaccctccaccgccagatataccgaattatgccgccctatttcccgtgccagtgacctttaaccagccctatagtcaactggtcatcccgtgggacattgttaacaccaangtcaccaccgccaaccctgcagggcatgtgatatttcagcaacagtgcgaagatctgttgcgcggcttgaatagaatagagaacttctctgcggctataaggcgcatactcatcaatgccgcgggtgaatttcctgatattaatcaggtcgcanataagctacacgtaagtgaaagcacccttaggcgacgccttggcaatgaatcaaccaactttcgggcaatctgtgacgaagtacgtaacctgctggcctgtgaatacctctccaccaccaaacttactgttgcagaaattgccagccttttggattattctgagccagtgagcttccgtcgtgccttcgtgcgatggaatggtatgacgccaagtgatttcagggctcgaagctaactcttctgcgcttgaccacctaaaagatcaaataataaaagtaggcgccccaactaaagcacattaacagtgatgtcaccgtcactaatattcctgtgcaggcctggttgtttaccctagggttccaagacttggggttgctgttggttttgtctatccaagcttttgggtataaacgcaaagtacttatgtaaatgagcaaaaatacattaactagggttagnaccacgctggtaaacaggatattttccattactactccttaatcactcttcagcgttagctaaatcaagtaaaaatgcatactgcttagccctatctagataacttttgtaccggccagattttccgccatgccccacttccatgtcggtatctagtaacaaacggttattatcagttttcatgtctctaagcttggcaacccactttgcaggctcccagtattgcacctgagaatcgtgcaggcctgttgttaccaacaagtgcgggtaattttgcgctttgacttgatcgtagggtgaatacgctaacatgtagtcatagtaagctttatctttggggttaccccactcgtcaaattcaccagtggttaacgggatagactcatctaacatggtagtcacaacatctacaaaaggcaccgcagcaatcacaccatgatagagctcaggctccatattaatgacgcttcccatcagcaagccaccggcactgccgcccactgcgtagacttttttgctgttgccatagcctctcttaactagggctttggtggcatcattaaaatcagtaaaggtattcattttggtgagctttttgccgtcttcataccaggcacggccaagcattttgctgcctcttatatgagaaatcgcgtataccatccctctgtcgagcagacttaaccgagaaatactaaagtaagggtcaaccgttgacccataagaaccataggcgtaattgagcaaggcgttggtaccatctttt

SEQ ID NO: 953 - DNA, 4000 bp, Escherichia coli
  misc_feature (115)..(115): n is a, c, g, or t
  misc_feature (462)..(462): n is a, c, g, or t
  misc_feature (1987)..(1987): n is a, c, g, or t
taaattaccaaggtcacttctaacatcctgcatgaaattttcaatttcttcagaattcataatttttgtaactaatacttacttatgagatttacatttttagaatttaaattanagtaacatgtattgaagatgtttaaaatgggaatatcaagtaggaatgtagtagaaggaacagcaagagccccacatagagcaatgtacaaagctatgggcttgactgatgatgatcttagcaaaccattcgttggtgtttgtcacacaggaaatgaagccaccccttgtaacatacatttacccagtcttgctcaaaaagcaaaagatggtgtaagggatgcgggtgctacaccaagagaatttagtacaattgcagtgagtgatggaattgcaatgggccatgaaggtatgaagtcttcattaatcagcagagaagtaattgctgattcaattgaattaatggtnagagcccatcaatatgatgcgttagttggcattgctggttgtgataaaagtttgcccggtactatgatggctatggcaagattgaacatcccttcagtttttgtttatggtggaacaattatgccaggaatgttagacggaaaggagctaacagttgttgatgtttatgaagcagtgggctcgtatgatgcagggaagatttcactagaagaattaaagaatatagaagacaatgcatgtccaaatgcaggttcttgtggtggaatgtttacagcgaatacaatggcttcaatttctgaagcaattggaattgcattaccaggtagtgccagtccaccagctgaagatgcaagaagggaggatatagtatatgaaacaggtaaggcgtgtggacgattaatagaacttggaatcaaacctagtgacatatttacaattgatgcatttgaaaatgcaattacgatgttgaatgctgttggtggctctacaaatggtattttgcatttattggcattagcaaatgaggctaagataaaactgagttatgatgattttgaaagaattaggaaaagaactcctcatcttgctgatatgaaacctggcggggaatatgtaatgaatagtttggataaggtaggaggaattccattaattatgaaaaaacttttagataataacctgattcatggtgatgcattaacagttacggggaaaacaataaaagataatcttcaaaacgtaaaaatttcagcggaacaaaaaattgtaagatccatagaaaatccattacataatgttgggacagctgtaatactaaaaggaactttagcacctgatggtgcagtaattaaaactgctggtatggaaatgacaaaatttactggtaaggctaaagtctttgattcagaggagacggcatttgactcggtagcaaagggcgaaattgatgaaggcgatgttttggttattagatatgaaggaccaaagggtggcccagggatgagagaaatgttggctactaccgccgccattgtgggacagggactaggtaaaaaagttgcaatggtaacagatggtagattctctggtggaacacgcggatttatggttggtcatgttgcgcctgaggcatttgttggtggaccaatcgcccttgtcaaaaacgacgatgagataagtgtcaatattgaggataatagtattaatctacaagtttcaaaagatgaacttgaaaaaagaagtaaagagtggagaatgcctaaacctaactacgaatcaggcgcgttatctaaatatgcatttctagttggttctgctgctgatggcgctacaactgatccagataattttcttaaaatgtccaaacatcttcgggataatatgttaacacatatcgattaaacgccagaacatttttgatggctttcaagtttccatttacccgttaactgatgatatggttgactccaatctagattacttgtaccacatttgtagcaagttttcttcataaaatatatcatancagatcgcatttaaatgtaccgtactataccgtaattacacataatggtatcccaaaactgaaatgataaatgtctatttaccaattgcttttgaaattttcaatgcagttttaagaccaatcaactgggtgtgtatagcaattttttgtattcctacacctattgcgctcatacaattctataattttcatagatcaataattgatcgcatgattttctttgatctattactaaaattcaattttttattttctagatttatagacatgaaaactctaattttacattaaaaaacctaatttctatacccaaaaacgcgtattttatcactaattttttttatataaaaatcatggtttaaatacagttcaattttgtctatcagcatgggtggacatatttggacacacacgcactcctaggatagtttccctagattatactggcacccaatttgaaatctacaacaaaatatcacgaaattattcatactcctttctgtttgaatcgttaacaggtcctgaagaactggctgaaacttcaatcatggggtttgatcccgaatttattgtcaagggatattacgacaaggttacaatccaaagtagggatggttctgtcaggacaatttctacagcagatccacttaacacaataaaagacctggtacaggaaaccaatgatcaatcatatcgttatctaggtggcgccgttggaataatcaattatgacacaatcagattatgggaaaatattccaaaacatcataatgtatctgagccaataatggagtttggaatttataacgatggaatactatttgataacaaacaaagaaaatctctatacttctattatgataaaagcagagtagatgagataaagagttctgaaccaaaatttgacaatttcactatatctgacataaaaaataatctggatcaggaaaaattttctgagattgtaagcaaggcaaaaaaatacatctatgatggagatatttttcaagttgttttatcaagaaaattttcatttgaagctagcggtgactatcttaaagtatatcaaaaacttcgttcgttgaatccttcaccatatctataccacctaaaaatgaatgaaaaaactgtgataggttctagccctgaaatgcttttacgtgttactgatgatcaggttgaaacatttcctattgcgggtacaaggaaaattacaactgataaaataaaaaatgaagaaatgagacaggagttaatcaatgacgagaaagagttagcagaacatacgatgctagttgatttgggtagaaatgatgttggcagagtatgtgaatatggtactgtacatgtaaaggagcttatggaagtaaaaaaatttagtcatgttcaacatatggtcacacacgttgttggaaaacttagtaaaaactatgatatgtatgacgcctttagggctgtatttcctgcaggaactgtttcaggtgcaccaaaagtgagggcaatggaaattattgatgaattagagccagaatctagaggtccatatgctggggcagttggatatttttcatttaatggatgctgtgattttgcaattgccattagaagtatttttgtcaatggagaatcaggttttgtacaggccggtgcgggaattgtatttgattcaatttcagagaacgaactgaaagaaactgagcataaggcaaacgcaatgttaactgcattaaaggaggcagcagaatgaagtttcttattattgacaactatgattcatttgtttacaatattgcccagagattaggtgagttaggggttagttcggatgttataagaaatgacaaaattacaattgatgaaataaagaaaagaaattacgatgcaataatcatttcacctggaccaggaacacctgaagataaaaggtattttggaatttgtaatgatgttattcagaaacttggaccaacattaccaattttgggtgtttgtctaggtcatcagggaattatt

SEQ ID NO: 954 - DNA, 4000 bp, Escherichia coli
ctgatgcaattcccgcgaccaaagccgatgctttgagcaaattgtaagcaacaatcaaagatttgattagtgcaattgttgctgtgacaccagctgcaatcttggaaacaacaaagagagtgccaatcacaataccagtggcaatcaattcatctttgagatcaattattgtattgatgacatttcgaaccttcttgccccattcaagggcttttgcttcggattttgtgagactcgctgtaatgcccgcttcacccgtaagaccgttaacaaattcttgaaacgccggaagaacgtcggtcaagataaattgtgtcaatctttgtaccactggtagcaatgccgcgccaatttgttcctgcgcttcatctactgcaattttgattcgctctaatgccttctctgtaccttgcgcttcattatctgcaaagccgccaaaggtctttgtgagggattcaaatactagatcgaagtcttttgatttcaggattgacgcatcgagaccaagacccaatcgacccaatgcgttaagattgccatcgtatgcttttccgagtgcatttgccacggcttccaatggctttcctgtagccgatgaaacatctaatgctaaattcaataatttctgagcttcctcaacgtctttggtcgatcttgttaatctggcaaatgccggacgcagctgatcatctgtgacaccaattgcaatcgatgtggttgtaatatatttttctacgcctttgatttgttcagctgttgcacttgttgtattttcaatggtcaaagcaagtaatcgctgagccttctcatcggctgcggcattctttattgattcaaccgcaaaggctccaatggcggcaccagcggcagcaaatgccagagctgccttcttgccaaaagctgtaaattggtcgccaattgtttcggtgtctttacttgctaccttgatgccctttgtaaattcagcaacgtccgccagtaacgagagcttgagcgttctagatccagcggcagccatttaccagaccttcacaatctttgagaaggtatcttgccattgagcaatgatgtatggctgctcagctttgagagttggatagataaaccatccttttgatccgcgaccttcttttcctgaccaaattggaaattgtttgaatttattagatccgaattcatagccgccccaaagttgttgcgttgtgccgccgccagagaatttctgtgagacaaagccaaatgaaatttcaccaatctttgatgatttggaaactcgtgctcccgtggcaattctgattgaggctaaatcgcgagttatagccctatctacaattttgccttgaagataagttgcaagaccgtttgaaactgtctttgctttatcgatggcttcatcatccatacctttaaatgcgaagataatggttcgcaattcagctttgtcgaaagcgattgcatcctcagccatttctctccttcaatatctcaattgcagtgattacatcttcagccgattcaaattctgatcggcttagtccggtagtaagtgctagatcccaaaggatccgattcatacttccggcggcgtaacttttgggacttgctcatcaccgactgttatttcagcaacggtctcgctccaaatttcgaaagacttgactggcttaccagctgcctcacgtttcatggcgtgatatgccaagaacatgagatctgcaattccaatcttgtcttgcgcttgtgaaatgatgaaacctgtcttggtttcccacttcgcccactctggcggctgcgcagtgtaggtctcgctatttcctgacgtgtattcgatggtaattggtaacttcatgctcccggctcccttactagctaattgttaaaactggtgttgtcacacatgtgaaagcgagtgagactgtctgcgcatctggtgcagtaccgccagctgatggaaggattggctggacatcaaatgcaaatgatgcacctgtgtctgcaacgagtacgactgggagtccagtgtttggtgcatttgttgcagctgtccaaagagcttcacataatgatgaagctgctccccaatccgcaagcatttcaaccgcgaaggatccctgtgtatccgtcgtgaaataagccttgccatcaagtgtttgatatgtattgattgtggaatcgactgttaaagtcgctgatgtagcctgagcatcgaaatcatcgccgtcaatggtgaaggtgatgtctctgccggtgatgattgttgttgccatttgttttctcctctagtcggtgtaatacgttgagacttgcaaatcagctgtcaagaattttcctgcgccgacttccaaaggttgaggtgagctaacatccccgacaacataaccggcgggcatggttgaaattattgaaatcattagatcttcaagattggtcaaagctgccgcgttgcttgaataacccacgactcccgtgacctgaaagtttattttgactttggttgtggatccatttattaaagtgctctctaaataaggtgaatccggaacaagaacaattgagggactcgtcattgtctctgggattccgttatagacatttgctgcaattgtcgaaagtgtcgtttgcaatggtgttcgaatatcttcttcgattgtcatagacacattgtttcgacttcaagaaacggaccgagtaatccaataacacgattgctcaaacttctgcctaaaataaatggtgacggttgaaattgatcgctcatgatttgatttcccggagctgtcacactttggaagacctcaacggatacaacaagaattgctgacttaatgggagcaacgccagagtaaagatctccggctgttgccccatcaatacacgcaagcccactcggaatgattgggatcgtgtagtcgctatctgcctgacccgtggcagatgtaaagacgaaaggtgcaatgcgatcatctgtgacggttactgtcgcgtcgtaaatgccgcatccagtgatgacaacatcttgacccggcacgaaatagttaacgcgctgcgttgtgtagtaagcaattgaatcctcgacgaatatattgaccaccgctgattggtatccggtaagcaatggcagaattgtgagctctgcactctcaatcatctgatcaagatatgcatctgaataaagagatacggaaacgccaagaatcgaccgcagttcccctgctgtgactatttgtggcatttccgttcccttcgtctgctcgaccacatccgggagcgtctgtggtcgatgattagtgattaattaaacgttgttcatccatccgccattgccaatttttgtggcgcaagcaccataagaattgagtgagatttcgacggttccatcggatggcttattgacatcaagacgaaagtttccgctttcgtaccatgtgaacgcatctggctcaagtacgaccattgaatcatcggctgttccagtgaattcacctgagttgtccacatagaaatttaaaccaagtacgactccgcgctgtgattgtccattgacaagaccagcttggttctgtgggaaatacgcattgaatagcggtgtgccgctgtcgttgtagcccatgatgttcgaccattgtccgggcgataccaaaatattacgagcaaatcgttgtgtacctgaatacacttcgacatttgcgtcactgacgtaaccaattaatcccgctgccgtattagcgtaacttcccgaaactctgtttgcatctgtcttgatttgatttgcaacatatttgttttgtgcaaatgccatggcagatcccatgattcgcactaactcgttgaagaaatcgggtgagctgcgatcgatgatttctgtggtgaggatattgcgaccagcgaagcgtgtgattggcactgatatgaaagatgactcaattccggtatttgttaccgcgccaccttctgcaacaggatccacttctgcgatttgtgtaatctttgggatttcaaa

SEQ ID NO: 955 - DNA, 4000 bp, Escherichia coli
  misc_feature (803)..(803): n is a, c, g, or t
  misc_feature (830)..(830): n is a, c, g, or t
  misc_feature (2156)..(2156): n is a, c, g, or t
ttgctgccgtgtacaagaagattacagacgcgagcccgcgtgttccatagactgtgagaatggcgcagcgatccgagttgtattcgttggtggagccctttgggcggcctcgccggtcccgagccgtcgcagagctcctggagacattcatcccctacgccgcgttgaacgtcgtgatggtgatggcggtccagcgcggccacctcgcggtggccttgtcactgtccgtcctggccgcggcgtttctggtgcggctgttcatcatcttccacgattgctgccacggctccttctttccttcccgtcgcgcgaaccggatcgtgggatacatcaccgggctgctcaccctgacgccgttcgaccagtggcagcagtcgcacgccgagcatcacgcgaccgccggcgacctggaccgccggggcgttggcgacgtgtggacgctgacgaccgacgagtacctggcggcgtccaggccaaagcggctcttctatcgcgtgttccgcaatccgttcatcatgttcggcatcggcccggccatcctgttcctgtttggcaacagggtgtacggcccaggcgccagcaaacgtgaacgattcagcgtgctcttcaccaacgcgggcatcgttgcggcgctcgtggtcgcatacctgacgatcgggctgtcgacgctgctgtgggtgcagctgcccaccactctgctcgccggtgcggtcggcgtgtggttgttctacgtgcaacaccagtacgaagacgtgtactgggcacatcacgaggcgtgggacccgatgagagcggcgctgganggaagttcctactacaagctgccgaangtgctgcagtggttcaccggcagcatcggcctgcaccacatccaccacgtccagccgcgcatcccatcctacaacctgcaacgctgccaggacgctgtgccggtgttccagaaggtccccccgctgacgcttcgccgcagcctggactcactgcgcctgcggctgctggacgaagcgaatcaacgcatggtcagctggcggcgcgtcacaccaggtgaggctaggccggagtagacatccgggcctcgtccgatgccgttcgaaagtgcagcgggtcccgcaggctctgcaactccctgtagtagtagagggcagtcggtcggcgtcccgcgaatcgcaaagacttgagaaactcgatctcctcggcggtcgcatcgcccctcagggacgggtcccggagaaatgccttgagcccgggttccacgtcaccagggggcgcgagctcgcgctccacgaactcgaaccgcctcggatgccccggcttcagccggcggttgaggacaatctccatcccgaaggtcgggaggtcgatgtcccaggattcgattagcgggtccaggaacgtgaggcagttgtcgtccgagacgttcaagagatctgtttcgaggaactcgatcacgatcacgcgcatctcttcgtaactgcgaccagtgattcgggccaccctccggagccagtcctcgtcgtccaattcctccttggtcacccgcttcaccacgtccaacagcttctgcgtgacgaaacgctcgagcgcgccgaagggttccttcgcgaacatcgtgcgcagggtgggcgccttggcgggatcgcacttccgcagaatcagctcgcggacggcctcgaacagcggtcctggcggatcggccagcttcctcttcaaggcatcgcggcgctgcacgtccgccagcgtggcgagctgcccggccggaagcttcaggagcgtctccatccgggggtagatgtcggagcgttcaggagctggcggcgccttcttccccgtcatcaactgagagatgtaggactccgtcacttccgcggcggccgccagatcccgctgctcgatccccagttccttgaggcgatggcggatgaggagcgggaaatccattggggttggttgactccgaattaacaattttcgattaataactggcctaatagccgccagttctcgcgagcaaaacttgacaaaatatagtaaatcaactgacaatggttaatcaagagccggggcgagagctccgcacgcgtcgccgattcaggctatctctcttgaagaaggcagtcatgtcgaagcttttcaaccgcaaggcattcatcccgttntggttcctcatctgcgttatcttcgcagccatcagcacgcccatgacgtgggcaaccgggctgcttgtggtcgttattggggctgtggtgccggtcatcgcagtcctgctgtggaaggtcccccctccgaccatcgccgaggtgctgaatcgagtggaacgatcgaccacgcgcctctaacgcggctggaacctttatgaagaacacccttctgcttgcgtcgtgcatcgcgggtctcgtcttctcgtcacagcagatctcagcgcaggatctgtccacgtaccgcgactttcacctgggcatgagcctcgcggacgtcgcgaagcgagccgagatcgcgccggaggctcatgtggtcctggagcgccccgcgctgatccaggagctgacgtggcagccgcaacgatggctcgcatcgacgcgcagtgactccctgaagaaggtccagttcagtttctacaatgggcagctctttcgattgctcgtgacgtacgaccgcgacaagaccgaaggactgaccgtcgaggacatgaccgccgcgatttcggcgacctacgggctcgcgctgttgcgcacgacgccgccagcgccggcagcgggggcgggtgcgcctggctcggcacctctcgacaacggcgacaagttcctggcggcctggggagattcggagcactcgatcgacctcttccagtcgtcttatcagatggtgtttggcctcgtggtccggtccaggccgatggatctgctcgcgcaggcggccacggcggaaggggctcgactcgatgcggaacaggcgccccagcgcgagatcgagcgtcagcagaaatcgaccgacgacaagcgtgtccggaccgcagcggcccgggaatccaacaagcagacgtttcgaccctgaggcacggcgatgaggcggctcttgtccagtcaggtcgttatccgggatcccgagggcgggccctgccggcacctggcggtgcgtgtcatcgagttggcgttccgggatctcgccagttctgcaggactacgcagcaatcaggagagcgctcgcctcttcctggcaggatcgtcgatgcttgaccactggtgtgcggtcgcagacctcgatccggcctggatgatcgctcgagcgaatcagctgaagacggcgccaggcgggcaggagccgtcaccaaccatggcaacgagggaggactgacatgctgtcgtggctgaagcggaaaccccgtgcagagcgtgaagagcgcgtcatcgagattcgcaccgagccggccgcgcctcaggggcacgggatgtcgaagacgttcctcgcgctgcacgaatacctcaagaatcgctattcggacgtcgcctttctgacgttcgcgcagatggaagacctgctcaaatcgccgttgcctccggcagccaggcgggatctcgcgtggtggaacggcgacgacgaggccaatttcgagcatgcgaattcctggcggctggcgaatcggacggccgcacccaatctgatggcgcagacggtcaggttcgcacgcgtctgatcggagttccggatgtcaacgacggccactgcggcgcatgccccttcagtcgtgtttccgattgagccggccgacgtgccggtacgcccgctacttggtcacggccaacttcacctgtggcgccggatctcgttctggcccgcggagctcgtgcggctggtggcgctcatctacatgctgccggtcgtgatctacgcgattggcattccggtcgcggctgccatcagcgcggtgctcttctgtgcaggctgggtcgggaaggcactagcaccgtagtggcgtcgcgcggctgagccggggctactccct

SEQ ID NO: 956 - DNA, 4000 bp, Escherichia coli
  misc_feature (1)..(4): n is a, c, g, or t
  misc_feature (6)..(6): n is a, c, g, or t
  misc_feature (8)..(8): n is a, c, g, or t
  misc_feature (13)..(15): n is a, c, g, or t
  misc_feature (17)..(18): n is a, c, g, or t
  misc_feature (20)..(20): n is a, c, g, or t
  misc_feature (22)..(26): n is a, c, g, or t
  misc_feature (28)..(31): n is a, c, g, or t
  misc_feature (34)..(35): n is a, c, g, or t
  misc_feature (37)..(42): n is a, c, g, or t
  misc_feature (44)..(48): n is a, c, g, or t
  misc_feature (50)..(50): n is a, c, g, or t
  misc_feature (52)..(56): n is a, c, g, or t
  misc_feature (58)..(60): n is a, c, g, or t
  misc_feature (62)..(64): n is a, c, g, or t
  misc_feature (68)..(68): n is a, c, g, or t
  misc_feature (70)..(72): n is a, c, g, or t
  misc_feature (74)..(75): n is a, c, g, or t
  misc_feature (79)..(80): n is a, c, g, or t
  misc_feature (82)..(82): n is a, c, g, or t
  misc_feature (84)..(86): n is a, c, g, or t
  misc_feature (88)..(88): n is a, c, g, or t
  misc_feature (91)..(94): n is a, c, g, or t
  misc_feature (97)..(97): n is a, c, g, or t
  misc_feature (102)..(103): n is a, c, g, or t
  misc_feature (105)..(108): n is a, c, g, or t
  misc_feature (110)..(111): n is a, c, g, or t
  misc_feature (113)..(114): n is a, c, g, or t
  misc_feature (119)..(123): n is a, c, g, or t
  misc_feature (126)..(134): n is a, c, g, or t
  misc_feature (136)..(139): n is a, c, g, or t
  misc_feature (141)..(146): n is a, c, g, or t
  misc_feature (148)..(153): n is a, c, g, or t
  misc_feature (155)..(158): n is a, c, g, or t
  misc_feature (160)..(161): n is a, c, g, or t
  misc_feature (163)..(167): n is a, c, g, or t
  misc_feature (169)..(170): n is a, c, g, or t
  misc_feature (172)..(175): n is a, c, g, or t
  misc_feature (177)..(180): n is a, c, g, or t
  misc_feature (182)..(183): n is a, c, g, or t
  misc_feature (185)..(185): n is a, c, g, or t
  misc_feature (187)..(187): n is a, c, g, or t
  misc_feature (189)..(193): n is a, c, g, or t
  misc_feature (195)..(198): n is a, c, g, or t
  misc_feature (200)..(210): n is a, c, g, or t
  misc_feature (212)..(213): n is a, c, g, or t
  misc_feature (215)..(222): n is a, c, g, or t
  misc_feature (225)..(225): n is a, c, g, or t
  misc_feature (227)..(227): n is a, c, g, or t
  misc_feature (230)..(233): n is a, c, g, or t
  misc_feature (235)..(238): n is a, c, g, or t
  misc_feature (240)..(240): n is a, c, g, or t
  misc_feature (242)..(248): n is a, c, g, or t
  misc_feature (250)..(253): n is a, c, g, or t
  misc_feature (255)..(257): n is a, c, g, or t
  misc_feature (259)..(262): n is a, c, g, or t
  misc_feature (265)..(268): n is a, c, g, or t
  misc_feature (271)..(272): n is a, c, g, or t
  misc_feature (275)..(277): n is a, c, g, or t
  misc_feature (279)..(279): n is a, c, g, or t
  misc_feature (281)..(283): n is a, c, g, or t
  misc_feature (285)..(286): n is a, c, g, or t
  misc_feature (288)..(291): n is a, c, g, or t
  misc_feature (293)..(298): n is a, c, g, or t
  misc_feature (300)..(301): n is a, c, g, or t
  misc_feature (303)..(304): n is a, c, g, or t
  misc_feature (306)..(306): n is a, c, g, or t
  misc_feature (308)..(313): n is a, c, g, or t
  misc_feature (315)..(316): n is a, c, g, or t
  misc_feature (318)..(319): n is a, c, g, or t
  misc_feature (321)..(322): n is a, c, g, or t
  misc_feature (324)..(325): n is a, c, g, or t
  misc_feature (327)..(334): n is a, c, g, or t
  misc_feature (336)..(336): n is a, c, g, or t
  misc_feature (338)..(338): n is a, c, g, or t
  misc_feature (341)..(351): n is a, c, g, or t
  misc_feature (353)..(355): n is a, c, g, or t
  misc_feature (358)..(363): n is a, c, g, or t
  misc_feature (365)..(365): n is a, c, g, or t
  misc_feature (367)..(367): n is a, c, g, or t
  misc_feature (369)..(369): n is a, c, g, or t
  misc_feature (371)..(371): n is a, c, g, or t
  misc_feature (373)..(380): n is a, c, g, or t
  misc_feature (383)..(384): n is a, c, g, or t
  misc_feature (386)..(387): n is a, c, g, or t
  misc_feature (389)..(394): n is a, c, g, or t
  misc_feature (396)..(399): n is a, c, g, or t
  misc_feature (401)..(402): n is a, c, g, or t
  misc_feature (404)..(405): n is a, c, g, or t
  misc_feature (407)..(408): n is a, c, g, or t
  misc_feature (410)..(413): n is a, c, g, or t
  misc_feature (415)..(415): n is a, c, g, or t
  misc_feature (418)..(418): n is a, c, g, or t
  misc_feature (420)..(425): n is a, c, g, or t
  misc_feature (427)..(427): n is a, c, g, or t
  misc_feature (429)..(438): n is a, c, g, or t
  misc_feature (444)..(451): n is a, c, g, or t
  misc_feature (455)..(469): n is a, c, g, or t
  misc_feature (471)..(473): n is a, c, g, or t
  misc_feature (475)..(475): n is a, c, g, or t
  misc_feature (478)..(480): n is a, c, g, or t
  misc_feature (482)..(484): n is a, c, g, or t
  misc_feature (486)..(486): n is a, c, g, or t
  misc_feature (488)..(495): n is a, c, g, or t
  misc_feature (497)..(500): n is a, c, g, or t
  misc_feature (502)..(502): n is a, c, g, or t
  misc_feature (504)..(504): n is a, c, g, or t
  misc_feature (506)..(507): n is a, c, g, or t
  misc_feature (509)..(522): n is a, c, g, or t
  misc_feature (525)..(526): n is a, c, g, or t
  misc_feature (528)..(528): n is a, c, g, or t
  misc_feature (531)..(531): n is a, c, g, or t
  misc_feature (534)..(539): n is a, c, g, or t
  misc_feature (541)..(545): n is a, c, g, or t
  misc_feature (547)..(548): n is a, c, g, or t
  misc_feature (550)..(550): n is a, c, g, or t
  misc_feature (552)..(552): n is a, c, g, or t
  misc_feature (555)..(555): n is a, c, g, or t
  misc_feature (557)..(559): n is a, c, g, or t
  misc_feature (561)..(566): n is a, c, g, or t
  misc_feature (569)..(580): n is a, c, g, or t
  misc_feature (582)..(588): n is a, c, g, or t
  misc_feature (590)..(590): n is a, c, g, or t
  misc_feature (592)..(598): n is a, c, g, or t
  misc_feature (600)..(601): n is a, c, g, or t
  misc_feature (603)..(604): n is a, c, g, or t
  misc_feature (606)..(609): n is a, c, g, or t
  misc_feature (612)..(618): n is a, c, g, or t
  misc_feature (620)..(621): n is a, c, g, or t
  misc_feature (624)..(631): n is a, c, g, or t
  misc_feature (633)..(639): n is a, c, g, or t
  misc_feature (641)..(641): n is a, c, g, or t
  misc_feature (643)..(645): n is a, c, g, or t
  misc_feature (647)..(650): n is a, c, g, or t
  misc_feature (653)..(653): n is a, c, g, or t
  misc_feature (655)..(661): n is a, c, g, or t
  misc_feature (664)..(665): n is a, c, g, or t
  misc_feature (667)..(669): n is a, c, g, or t
  misc_feature (672)..(672): n is a, c, g, or t
  misc_feature (674)..(675): n is a, c, g, or t
  misc_feature (677)..(683): n is a, c, g, or t
  misc_feature (685)..(687): n is a, c, g, or t
  misc_feature (689)..(690): n is a, c, g, or t
  misc_feature (692)..(695): n is a, c, g, or t
  misc_feature (697)..(703): n is a, c, g, or t
  misc_feature (705)..(706): n is a, c, g, or t
  misc_feature (710)..(724): n is a, c, g, or t
  misc_feature (726)..(730): n is a, c, g, or t
  misc_feature (734)..(734): n is a, c, g, or t
  misc_feature (736)..(738): n is a, c, g, or t
  misc_feature (740)..(740): n is a, c, g, or t
  misc_feature (742)..(744): n is a, c, g, or t
  misc_feature (746)..(752): n is a, c, g, or t
  misc_feature (754)..(754): n is a, c, g, or t
  misc_feature (756)..(758): n is a, c, g, or t
  misc_feature (761)..(763): n is a, c, g, or t
  misc_feature (765)..(774): n is a, c, g, or t
  misc_feature (776)..(777): n is a, c, g, or t
  misc_feature (779)..(779): n is a, c, g, or t
  misc_feature (781)..(782): n is a, c, g, or t
  misc_feature (785)..(789): n is a, c, g, or t
  misc_feature (791)..(791): n is a, c, g, or t
  misc_feature (793)..(793): n is a, c, g, or t
  misc_feature (795)..(798): n is a, c, g, or t
  misc_feature (801)..(811): n is a, c, g, or t
  misc_feature (813)..(813): n is a, c, g, or t
  misc_feature (815)..(815): n is a, c, g, or t
  misc_feature (817)..(817): n is a, c, g, or t
  misc_feature (819)..(820): n is a, c, g, or t
  misc_feature (822)..(825): n is a, c, g, or t
  misc_feature (827)..(828): n is a, c, g, or t
  misc_feature (831)..(831): n is a, c, g, or t
  misc_feature (834)..(834): n is a, c, g, or t
  misc_feature (836)..(837): n is a, c, g, or t
  misc_feature (839)..(843): n is a, c, g, or t
  misc_feature (845)..(850): n is a, c, g, or t
  misc_feature (852)..(854): n is a, c, g, or t
  misc_feature (856)..(869): n is a, c, g, or t
  misc_feature (871)..(871): n is a, c, g, or t
  misc_feature (873)..(873): n is a, c, g, or t
  misc_feature (876)..(877): n is a, c, g, or t
  misc_feature (879)..(879): n is a, c, g, or t
  misc_feature (882)..(883): n is a, c, g, or t
  misc_feature (885)..(886): n is a, c, g, or t
  misc_feature (888)..(889): n is a, c, g, or t
  misc_feature (895)..(896): n is a, c, g, or t
  misc_feature (898)..(899): n is a, c, g, or t
  misc_feature (901)..(901): n is a, c, g, or t
  misc_feature (903)..(908): n is a, c, g, or t
  misc_feature (910)..(910): n is a, c, g, or t
  misc_feature (912)..(913): n is a, c, g, or t
  misc_feature (915)..(923): n is a, c, g, or t
  misc_feature (925)..(929): n is a, c, g, or t
  misc_feature (932)..(934): n is a, c, g, or t
  misc_feature (936)..(942): n is a, c, g, or t
  misc_feature (944)..(950): n is a, c, g, or t
  misc_feature (953)..(953): n is a, c, g, or t
  misc_feature (955)..(955): n is a, c, g, or t
  misc_feature (957)..(959): n is a, c, g, or t
  misc_feature (961)..(962): n is a, c, g, or t
  misc_feature (965)..(965): n is a, c, g, or t
  misc_feature (968)..(972): n is a, c, g, or t
  misc_feature (974)..(975): n is a, c, g, or t
  misc_feature (977)..(981): n is a, c, g, or t
  misc_feature (983)..(986): n is a, c, g, or t
  misc_feature (989)..(992): n is a, c, g, or t
  misc_feature (995)..(999): n is a, c, g, or t
  misc_feature (1001)..(1007): n is a, c, g, or t
  misc_feature (1009)..(1009): n is a, c, g, or t
  misc_feature (1011)..(1025): n is a, c, g, or t
  misc_feature (1027)..(1030): n is a, c, g, or t
  misc_feature (1032)..(1034): n is a, c, g, or t
  misc_feature (1036)..(1042): n is a, c, g, or t
  misc_feature (1044)..(1046): n is a, c, g, or t
  misc_feature (1048)..(1048): n is a, c, g, or t
  misc_feature (1050)..(1052): n is a, c, g, or t
  misc_feature (1055)..(1055): n is a, c, g, or t
  misc_feature (1058)..(1060): n is a, c, g, or t
  misc_feature (1063)..(1063): n is a, c, g, or t
  misc_feature (1067)..(1068): n is a, c, g, or t
  misc_feature (1070)..(1072): n is a, c, g, or t
  misc_feature (1074)..(1075): n is a, c, g, or t
  misc_feature (1077)..(1079): n is a, c, g, or t
  misc_feature (1082)..(1082): n is a, c, g, or t
  misc_feature (1084)..(1084): n is a, c, g, or t
  misc_feature (1086)..(1090): n is a, c, g, or t
  misc_feature (1093)..(1093): n is a, c, g, or t
  misc_feature (1095)..(1109): n is a, c, g, or t
  misc_feature (1112)..(1114): n is a, c, g, or t
  misc_feature (1116)..(1130): n is a, c, g, or t
  misc_feature (1133)..(1133): n is a, c, g, or t
  misc_feature (1136)..(1141): n is a, c, g, or t
  misc_feature (1146)..(1147): n is a, c, g, or t
  misc_feature (1149)..(1151): n is a, c, g, or t
  misc_feature (1153)..(1155): n is a, c, g, or t
  misc_feature (1157)..(1157): n is a, c, g, or t
  misc_feature (1159)..(1159): n is a, c, g, or t
  misc_feature (1162)..(1163): n is a, c, g, or t
  misc_feature (1168)..(1168): n is a, c, g, or t
  misc_feature (1170)..(1170): n is a, c, g, or t
  misc_feature (1175)..(1175): n is a, c, g, or t
  misc_feature (1177)..(1178): n is a, c, g, or t
  misc_feature (1180)..(1180): n is a, c, g, or t
  misc_feature (1182)..(1182): n is a, c, g, or t
  misc_feature (1184)..(1184): n is a, c, g, or t
  misc_feature (1187)..(1188): n is a, c, g, or t
  misc_feature (1192)..(1194): n is a, c, g, or t
  misc_feature (1196)..(1197): n is a, c, g, or t
  misc_feature (1199)..(1199): n is a, c, g, or t
  misc_feature (1201)..(1203): n is a, c, g, or t
  misc_feature (1205)..(1208): n is a, c, g, or t
  misc_feature (1210)..(1214): n is a, c, g, or t
  misc_feature (1216)..(1218): n is a, c, g, or t
  misc_feature (1221)..(1221): n is a, c, g, or t
  misc_feature (1224)..(1227): n is a, c, g, or t
  misc_feature (1230)..(1230): n is a, c, g, or t
  misc_feature (1232)..(1236): n is a, c, g, or t
  misc_feature (1239)..(1239): n is a, c, g, or t
  misc_feature (1241)..(1241): n is a, c, g, or t
  misc_feature (1243)..(1243): n is a, c, g, or t
  misc_feature (1245)..(1246): n is a, c, g, or t
  misc_feature (1248)..(1248): n is a, c, g, or t
  misc_feature (1251)..(1254): n is a, c, g, or t
  misc_feature (1259)..(1259): n is a, c, g, or t
  misc_feature (1262)..(1262): n is a, c, g, or t
  misc_feature (1264)..(1265): n is a, c, g, or t
  misc_feature (1267)..(1267): n is a, c, g, or t
  misc_feature (1269)..(1269): n is a, c, g, or t
  misc_feature (1271)..(1271): n is a, c, g, or t
  misc_feature (1273)..(1273): n is a, c, g, or t
  misc_feature (1276)..(1277): n is a, c, g, or t
  misc_feature (1280)..(1281): n is a, c, g, or t
  misc_feature (1283)..(1283): n is a, c, g, or t
  misc_feature (1285)..(1286): n is a, c, g, or t
  misc_feature (1290)..(1291): n is a, c, g, or t
  misc_feature (1293)..(1295): n is a, c, g, or t
  misc_feature (1299)..(1299): n is a, c, g, or t
  misc_feature (1302)..(1302): n is a, c, g, or t
  misc_feature (1304)..(1304): n is a, c, g, or t
  misc_feature (1306)..(1309): n is a, c, g, or t
  misc_feature (1311)..(1311): n is a, c, g, or t
  misc_feature (1313)..(1313): n is a, c, g, or t
  misc_feature (1316)..(1316): n is a, c, g, or t
  misc_feature (1318)..(1318): n is a, c, g, or t
  misc_feature (1320)..(1320): n is a, c, g, or t
  misc_feature (1322)..(1322): n is a, c, g, or t
  misc_feature (1324)..(1324): n is a, c, g, or t
  misc_feature (1327)..(1327): n is a, c, g, or t
  misc_feature (1330)..(1330): n is a, c, g, or t
  misc_feature (1334)..(1334): n is a, c, g, or t
  misc_feature (1337)..(1344): n is a, c, g, or t
  misc_feature (1347)..(1347): n is a, c, g, or t
  misc_feature (1349)..(1349): n is a, c, g, or t
  misc_feature (1351)..(1355): n is a, c, g, or t
  misc_feature (1359)..(1359): n is a, c, g, or t
  misc_feature (1361)..(1363): n is a, c, g, or t
  misc_feature (1365)..(1365): n is a, c, g, or t
  misc_feature (1368)..(1368): n is a, c, g, or t
  misc_feature (1372)..(1372): n is a, c, g, or t
  misc_feature (1374)..(1374): n is a, c, g, or t
  misc_feature (1376)..(1376): n is a, c, g, or t
  misc_feature (1378)..(1378): n is a, c, g, or t
  misc_feature (1380)..(1380): n is a, c, g, or t
  misc_feature (1383)..(1385): n is a, c, g, or t
  misc_feature (1387)..(1388): n is a, c, g, or t
  misc_feature (1390)..(1392): n is a, c, g, or t
  misc_feature (1394)..(1394): n is a, c, g, or t
  misc_feature (1396)..(1397): n is a, c, g, or t
  misc_feature (1400)..(1403): n is a, c, g, or t
  misc_feature (1405)..(1406): n is a, c, g, or t
  misc_feature (1408)..(1409): n is a, c, g, or t
  misc_feature (1412)..(1414): n is a, c, g, or t
  misc_feature (1416)..(1416): n is a, c, g, or t
  misc_feature (1419)..(1419): n is a, c, g, or t
  misc_feature (1421)..(1421): n is a, c, g, or t
  misc_feature (1423)..(1423): n is a, c, g, or t
  misc_feature (1426)..(1426): n is a, c, g, or t
  misc_feature (1428)..(1428): n is a, c, g, or t
  misc_feature (1430)..(1433): n is a, c, g, or t
  misc_feature (1435)..(1435): n is a, c, g, or t
  misc_feature (1437)..(1437): n is a, c, g, or t
  misc_feature (1442)..(1442): n is a, c, g, or t
  misc_feature (1444)..(1444): n is a, c, g, or t
  misc_feature (1446)..(1446): n is a, c, g, or t
  misc_feature (1448)..(1448): n is a, c, g, or t
  misc_feature (1450)..(1451): n is a, c, g, or t
  misc_feature (1454)..(1458): n is a, c, g, or t
  misc_feature (1462)..(1462): n is a, c, g, or t
  misc_feature (1464)..(1465): n is a, c, g, or t
  misc_feature (1475)..(1475): n is a, c, g, or t
  misc_feature (3522)..(3522): n is a, c, g, or t
nnnntnanaaaannncnngncnnnnncnnnnttnntnnnnnnannnnngntnnnnngnnnannnaaangnnntnnaaanngntnnncnaannnnccnaaaanngnnnngnngnnaaaannnnnaannnnnnnnncnnnnannnnnntnnnnnngnnnnannannnnntnncnnnncnnnngnngncnannnnnannnnannnnnnnnnnngnncnnnnnnnnccngnttnnnncnnnntncnnnnnnncnnnnannncnnnnccnnnnggnnttnnncngnnnannannnngnnnnnncnncnncnannnnnntnnannanntnntnnnnnnnnangnccnnnnnnnnnnngnnnccnnnnnntngnancngnnnnnnnnggnngnngnnnnnntnnnncnncnncnngnnnntnggnannnnnncnannnnnnnnnnaaaaannnnnnnntttnnnnnnnnnnnnnnnannngnttnnngnnntngnnnnnnnngnnnntngntnngnnnnnnnnnnnnnnggnntnaanccnnnnnngnnnnnanngncnaangnnntnnnnnnggnnnnnnnnnnnntnnnnnnntngnnnnnnncnnannannnnttnnnnnnntnnaannnnnnnncnnnnnnncnannnannnnttncnnnnnnnttnnannnttngnngnnnnnnngnnngnncnnnngnnnnnnntnnaaannnnnnnnnnnnnnnannnnnaaancnnntngnnnannnnnnngncnnnggnnnannnnnnnnnnannancnnaannnnntngncnnnnaannnnnnnnnnntngncnanntnnnngnnaanggntnntnnnnngnnnnnnannngnnnnnnnnnnnnnnancnaannanccnncnncnnaaaaanngnncnannnnnngntnncnnnnnnnnngnnnnnggnnntnnnnnnngnnnnnnnaancngnnnannccnggnnnnnannannnnntnnnnttnnnnccnnnnntnnnnnnnancnnnnnnnnnnnnnnncnnnntnnngnnnnnnntnnncnannnttnggnnnggntttnngnnnannannnttngncnnnnnggntnnnnnnnnnnnnnnnggnnncnnnnnnnnnnnnnnnaanccnnnnnnggcgnnannngnnnananttnngtgtntnttttntnnangngnttnnaaannncnngnannnannnngnnnnnannnggnttnnnnggncnnnnnaananananngnccnnnnaaaanccnanngntncncnaannccnnantnnaaanngnnnaacnccnantnnnnantnggntntntngnttntanaaanaannnnnnnnccncntnnnnnccgngnnncngcnccgngnantncncgnnncnngnnngncnnggnnnngnncnnttnnntnccntngnccncngnnnnantnccccncncnancnnaannnnntttngnnaaaaaaacgnaccatcgacacccaaattgtatcacgccacaaaaacgacggccgcaacaataggtgcaggccatctgggatgacatttgcttcgtcctcggctgatacggtgaaatcttggccatatagcgcataatctagtgccgctgccatgcgcgtattgggatttaatctgctgggcgccccatcctcaagttcggccaatggctgcaacagaatacgcgcgtcaacttgaaagtaatcgcaaatccgtttcatcaggccaggtttgggaaagctttcgccattcaggatgcggttcatctgaacacgattgacatcaagatgttctgccacctcggcaatggtgccaacacgtttacaaagttggcgcaaattgcgcccaaatattaaatgtgttgaaacattttcatcctgaacttgcaccctacactcctaacgtcgacagtaaacaactacctcatgtagacgtccttttgaacatttgcttacaaaactgtactttttactcatttttaatactttagtatacaaaattaaatctttcggatcacccccttatgtggggctttgtttatctggtgcaatcttatccaatttacctgcacaatgctttggtttatcgtcgcgccatggcgataccgatagatacatttttcttggacaccacgtcccaaggcacgttgcaggcccgcattcagcaaatgattgcccaaggcattctaagcgggcggttcaaacgtggtgaaaaactgccgtcgacacgaaaactggcaaatcatttgggcgtcagtcgcatcaccgtatcgctagcctatactgaattgctggcatcagattatgtagtggcgcgtgatcggtccggattttacgtatcagaaaacgcacccgatgcacccaaattcgcaacgcaatccacgccccaagacactgtagactggaccaaagcgattggtcagaaattttctggcggacccagcttgaaaaaaccgcaaaattgggcccagtttcgatacccctttatttacggacaaacggaccccggcctgttcgatcatgcaaactggcgtttatgtgccttgcgtgcactgggtgccaaggatttttccgcattaacggcggattatttcgaccgcgatgatcctatgctggttgaattcattgcgcgccattcgctgccacgtcgcgggattattgcacgccctgatcaaattttggtcaccttgggcgctcaaaatgccctatggctggccacgcaggtattgctgacccagcgccgcactgcaacgattgaaaacccatgttatcctgcgctgcgcgaaatcttggtgcaatcgcgctgccatgttcatccggtcgacttggatcaatttgggatgcagccagatttgatcccgcccgagacatccgtaatctatgcaacgcctagccaccaatgccccacaacattgaccatgcccctgcaccgcaggcaagatttgctgaaacgcgctgccgaattagatgcgatcatcgtcgaggacgactatgaattcgaaatcaaagaaacgggatccacgtcccccgcattgaaatcactggaccaagaggggcgtgtgatctatgtcggcagcttctctaaatcactgtttcctggcttgcgattgggatatttggtcggctctgaggcgtttataaaagaggcccgcgccctgcgtgcatcggtgttgcgccatcccccgggtcatatccaacgcaccgccgcctatttcctaagtttgggccattatgatgcgctgatcaaacggatgacgcggaattttaatgaccgccgttccaaaatattaaccgcaattgatgaatgtggcctgacaattcaaggtcgtccaccacaagggggatcatcgatctggatgcgtgcacctgatcacgttgataccaacgaactggccagccggttgatcgaacacagcgtgctgatcgaaccggggcaggaatttttcgacggacccaatgcgcccacaaatttttaccggctggcattttcatcgatacagccacatttaatttcagacggnattcgccaaatcgctgacgtaattcaagaaactggtcataatctgtaacgaaaactggccctattggaatgtcggttctcgctctagaaatagggccaatataattcactatctttaagactcgggagtcccaaatatgaaaatgacgacagaagaagcgtttgtaaaaacgttgcaaatgcacggcattcgccacgcattcggaatcatcggttccgcgatgatgccaatttccgatttgttcccgaaagctgggatcaaattctgggattgcgcccacgaaggttcggccggcatgatggcagacggatacacccgcgtgactggtgaaatgtctatgatgatcgcacaaaacggtccgggcatcacaaactttgtaactgcagtcaaaacagcctactggaaccacactccgctgctgttggtcacaccacaagctgcaaacaaaacaatcggtcagggcggtttccaagaagta

SEQ ID NO: 957 - DNA, 4000 bp, Escherichia coli
  misc_feature (439)..(440): n is a, c, g, or t
  misc_feature (634)..(634): n is a, c, g, or t
  misc_feature (2252)..(2252): n is a, c, g, or t
  misc_feature (2261)..(2261): n is a, c, g, or t
  misc_feature (2932)..(2932): n is a, c, g, or t
  misc_feature (2955)..(2955): n is a, c, g, or t
  misc_feature (2973)..(2973): n is a, c, g, or t
  misc_feature (3147)..(3147): n is a, c, g, or t
  misc_feature (3156)..(3156): n is a, c, g, or t
  misc_feature (3309)..(3309): n is a, c, g, or t
  misc_feature (3312)..(3312): n is a, c, g, or t
  misc_feature (3321)..(3321): n is a, c, g, or t
  misc_feature (3330)..(3330): n is a, c, g, or t
  misc_feature (3332)..(3332): n is a, c, g, or t
  misc_feature (3377)..(3377): n is a, c, g, or t
  misc_feature (3381)..(3381): n is a, c, g, or t
  misc_feature (3384)..(3384): n is a, c, g, or t
  misc_feature (3390)..(3390): n is a, c, g, or t
  misc_feature (3417)..(3417): n is a, c, g, or t
  misc_feature (3442)..(3442): n is a, c, g, or t
  misc_feature (3447)..(3447): n is a, c, g, or t
  misc_feature (3468)..(3468): n is a, c, g, or t
  misc_feature (3471)..(3471): n is a, c, g, or t
  misc_feature (3477)..(3477): n is a, c, g, or t
  misc_feature (3494)..(3494): n is a, c, g, or t
  misc_feature (3504)..(3504): n is a, c, g, or t
  misc_feature (3507)..(3507): n is a, c, g, or t
  misc_feature (3514)..(3515): n is a, c, g, or t
  misc_feature (3517)..(3517): n is a, c, g, or t
  misc_feature (3519)..(3519): n is a, c, g, or t
  misc_feature (3612)..(3612): n is a, c, g, or t
  misc_feature (3669)..(3669): n is a, c, g, or t
  misc_feature (3699)..(3699): n is a, c, g, or t
  misc_feature (3705)..(3705): n is a, c, g, or t
  misc_feature (3744)..(3744): n is a, c, g, or t
  misc_feature (3780)..(3780): n is a, c, g, or t
  misc_feature (3782)..(3782): n is a, c, g, or t
  misc_feature (3790)..(3790): n is a, c, g, or t
cacgaaaacagttaagctgatcctggttcaacataatctggcatttggtcccggccagggtgagtttaagtttataaagcatgtcgatcttcctggagaaatcgagaaatcttcattggtagaaataaaagatatcgtagaaaatatcgttcttgaagaagttgaatcatctgccgtggagaaaagcttgtttcacgcccttcataatatcaaactgggtggtgcaagcagcgctataatgcttatggagattgaagatatagggggagaaataaaggtcgtacccattaacttgacaaagagtgagacaatacggcttgcaagggaggtaggaggcaggcttattaaatatcgtattatgagtccggatggtttctggccggaaccggataatgagactaccaacgagcaaatactaaactggatagaggatgaggcnntgaatacactgcggcaaaaacagctgctggcgcataaggataaagatctgattgacgcattagacaaggttcataaaaagatgggtgaccaaaagattcaggataagaatgatacaattatgatacatgaaacaccctatcatgatgccgcaattacatggctgaaggagtggagagctacgaggcgtgggaanaaggcaatggaagagctaaactccgaagagtctaaggttagtaagcactacaggcagctgatctccagggctgaacgtaaatatgatgtaatgccatccattgccaaagatattatagccgtaaaacggcttcttaccgtaatgcgttctccattctgggactatagacccaatggacagattgtgattatggatacaggtatcgcaccagtaattttgcatagacatttgtcaacgctggaagtgctttccagtgaggatgttgttgttgccagtgtgttctcaaaacgtattggcggcagctctcctgaaaaaattgaacatctttgtcgaacctacgtggaggctgcttataacctgggcgctaaggttgtgattctctgtaataccatggatgccaatgcaagggttaaactggaaaaagagttttcaatacatattcttgggccaattattcctgcagtagaagctgtgcttagacttgagcaagctaatggaaagaggttaaagagtattgggattgttgcgacaaaggcgacgatagagagcggtgcttacataaatgaaattagagaacatgacaagggtgtcgggatattcagtatagctgcccctctttttgctactatggtggacaagggtgagtgtgatcagactggttttcaggtgactactccgcaaaacacgtctattatagaggagaatctgaaacctcttatggaaaaggacgtcgatgtccttgtgctggggtgtactcattacggtatatttgagtcggtaatacatgaggtttggaagcgctgtactggtaatgagattaacattattgattcttccagagagctttcccgttatgcccactccttccttaaagagaataaaatattgtctttaaggacgaaacagaagggaaagatcacctatatggccagcgcagaagatactccggaattcggacgaaaggtctcagagattacaggatatccggccaatgttgtaccgatagatataggtgaagtggtcggcagattgagcgaagaagaccgatcattccagaaaacagtggccagggaaagcagggaagacatcaatttaagggccggtattattaattctaatctatctgctgaggccaaagttgcagttgctgataaattatatggaataaaagataggggtgttaaccagcctgattgtgagatattatcgctggagctgaaagataagcatgtaaaggagatagtcggtttgactacgcaaaacgaagagctgttaacaattctttctcacatcaaaaacgctacatctcaataaatcaagaaaatcttccctccattttgtagctatctctgagagctccagaaacttaatccttgacagatatatagccggataatatattaggtgaacacgcgttcacctaattatgaaagctaaacttacaaataaacaacataatttcctgtcatttttgacgaagtatatccgggaaaatgggtatccgcctactattcgggagatggtatatcaccttaaactggcgagtaccaacagtgtaaagaagtatctggatatacttgaacgtaagggatacataaagaggataccaaacagtccnagagcaatngaagtgtgtgcggaaacacccgggaaccaggcaaagctgatacccgtagtcggaagggtcagggctggagcgcctcacctcgcagttgaagatattacaggacatctggccatggatgcgtcggtggctcgttgggatgataccttttttctcagagtggagggggacagtatgatagatgcccatatccaggacggtgattttgtattagttaaatcccagcaaaccgcagagagtggtgatatcgtagttgccattattaatgatgaggcgacggttaagaggtttttcaagagagacgatagcatttatctggaaccggctaattcgacgatgaagcctataattattagagaagatcaggccaatgagatgatgatagccgggaaggttgtgacagtgttgaggcagattaaataaatatgattacggagataggtgaacctataaaagcaggagtggtatttggcgctgattgtatcggcggaaagaagataaaaccggtatggtttatatggaaagagaaacaataccgtatcaaggaggtaacgtatacatggacaggcaaagaaggcagtgcttcagtccactatttttctgttacagatggtcaggatttgtatgagatagcctacaatacagagactatggtatggatgcttatggctgtngaagtggaaggataggttaagtnaaaagtgtctgaagtttnaagtgaactaaaattatgaacaacagaacaataatgcatgtagacatgaatgccttttttgcttctgtggagcaacagtctaagccttcactcaggggtaagcctgtagccgtcattggtgcacagcaaaggacagtcattaccacctcttcatatgaggccagggcttatggngttaaggtnggtatgacagtgccggaggcaaagaagctctgtcctgatataatatttgttgcaggtaataataaaaagtatacagacacatgcacgcgccttgtaaatcttttcggggactatacaccgttggtagaggtatattcagttgacgaggcattnctngatataacngggtccctntncctttttggtaaaccggaagatattgccatgcggattaagagaangatnctnaggggntttgggcttacctgctccatcggtgtnggccctaacaagttgctggcaaaantggcnggcaatatgcagaaaccgganggntttacnacaatacatcccggggncgtttctganatncttgaannantnccggtgggtgaactctgtggaataggatcgcggctggagatacaccttggagctatgggtatcaagacgtgtggggagttgggaagatttccngtaaaggagttggtaaataaatttggtgttattggcaacaagcttcatcaaatgggnctgggaatagatgaaaatcctgttgtcccnatcgangatacgccggatgcaaaatctgtcggccatagcatgacncttaagaggaatgtaagtgacggtgaagagatggananatatctgntgcagctttcggaaatggtggggaggcgattgcgccgcggacactacttcggcaggacagtagccatgaccttgaggtattcgaatttccaaacatttacaaaaagatgtaccgtaaaagaatatataaatgacggatttgacatataccttgtcgcactcgatatagtaaaaaagataaggctcaaatatacggtacgactgctgggtg

SEQ ID NO: 958 - DNA, 4000 bp, Escherichia coli
  misc_feature (6)..(7): n is a, c, g, or t
  misc_feature (12)..(12): n is a, c, g, or t
  misc_feature (16)..(17): n is a, c, g, or t
  misc_feature (19)..(19): n is a, c, g, or t
  misc_feature (21)..(22): n is a, c, g, or t
  misc_feature (26)..(27): n is a, c, g, or t
  misc_feature (29)..(30): n is a, c, g, or t
  misc_feature (32)..(32): n is a, c, g, or t
  misc_feature (35)..(36): n is a, c, g, or t
  misc_feature (38)..(39): n is a, c, g, or t
  misc_feature (42)..(42): n is a, c, g, or t
  misc_feature (47)..(47): n is a, c, g, or t
  misc_feature (51)..(51): n is a, c, g, or t
  misc_feature (54)..(54): n is a, c, g, or t
  misc_feature (59)..(60): n is a, c, g, or t
  misc_feature (62)..(62): n is a, c, g, or t
  misc_feature (64)..(64): n is a, c, g, or t
  misc_feature (672)..(672): n is a, c, g, or t
  misc_feature (677)..(677): n is a, c, g, or t
  misc_feature (681)..(681): n is a, c, g, or t
  misc_feature (688)..(689): n is a, c, g, or t
ttaaannaaaantaannantnntttnntnntnttnntnnttnttatntatntanataannantntttttttttttttttttttaattaataattaatagtgaatgattatttttattaaaaaattgtttatagttaggtaaatatggacgtattatctatttaatttttcaatcaattagaatggtattggtttgaaaataaaataataattaatgttaaattgtactaattatttttttatcctaatataaattaaaataagaaaataattataataataaatgataaatattacatatataatatgctatttacaagaagtgaaaaaaaaaaataataataataatcatctttacaaaattattataataataataatatatataagataataattgaaattttttaaacatgagatttaaaaatttttatattttttttaaataattattgtttataaaatttatttggttaaatatgaaatgatttgatatatatatatatatattaaaaaataaataaataaataaataaataaataataataaaaaataaataaattttaaattatataattatttatttacttatttactacattatttttatttaaatctttatttatatacttatgcttatgctttataaataacctttttttatttactttnataanaaanttctatnnaaaaaaaaaaaaaaaaaaagaaaaaaattttgatttatatttataattttttctttaagcttatttactattttatttttcgattcgttttttatatatattttcatttaactttcttccttttttaacttttatttttattgttattttttatattattattattattatttttttatcttattttatttcttaaaagttgaaatggaaattattattggaaccaaatggaccaccattaccaaatggaccaccattaccaaatgggaaaccaccaccaaatgggaatccatggaaaccaaatggattaccaccttgaccaccgtttggatcatttggatcttcaccattatcgaaccgttcacgagtttcatcattacttaaaacttcataagcttcattaatttcactcattttattttctacttgatccttggtcatttcaccatggtatttatctggatggtatatttgagctaattttctgtaagcctttttaatttcacgtttagtggcagttttcttaacacctaagatcttataataatcctttcttgaggccatcttttgcaatctttgagctttttggtatccttctataattctttgatcttgtggactgtattcatgggctgaagaataatctcttaaggcagcatcatattcttctaataacataaatgcttctgcacgattaattaataattcgacatcttgattttcaatatctaaacctttagtacaatatcctttagcagcttcagccttctttaatcttaaattagccttacatgcagcaaagtaaattttatacttcaatttatttgaaccaatagcttctacctctgaaactaaaccactattcaccttatctataatatctgcccatttcttatcactcatacaattatcaatatatttaagagaacgatctaactttttaatttttttgaaaagagccttacattgtttatgctccggatcacgacgtaaacattctttaacttctgttaatgaactttcaatttctccaatggccatatgtaattcaccaaccctaactaatagatcagtgttatctggttgaagtttaacagctctggaataatcaccaatagccatttcagtttcattaatatttaagtaagattcagctcttaattttctaatttctaaattttgtggacaatgttgaataacttctgaaagatattcaatagcttgcttataattcttttttttaaattctgattttgcgttattaagtaattgaccaactacctttatattattaatctaaatgatttttttttttttaaaaaaaaaaaaaagtatatttatagatatggtataataaacaattttattaataaaattaaatatataaataaatattaaataatatataaaaaattcatttatttcattaaaataattataaaaggtaatacaaaataataataataataatattctatacgaaattattaaaataaattcacataaaaataaaaaaagaaataaaacataaagcaattacaataattaaaacaaccataatattaataataataataatataaatttatttaatttttcatatatattatcatatttaatacatacaatttcatctgtttcaccgtctgatggctttaatttcttataatgttcaatatcatctttagccttatcaagttcagctatttgaaagtataatttacctcttttaaggtaagcttgttcgaaatttggatttatcttaataagagatgtgaaatcatcaatagcactttcggttctcccaatattaatatagagaatagcacgtctaatgtaaattaaaaaattatttgggtcatgacttaaagcttcagagtaaacacttaaagcttcatttaaatttccagtgcttactaaatgttgagcagtgttgagatactctgttgtacttttagcttgagcttttgctaaaaagccaaatgcagcaaaagttattagtgataattttgaaaaaatcttcattatgaaatttttctttcttatcgattttattactttatttgattaatttttattttttttttatgcttttttattataaactttataaattgtaattatttatgatatattgaatttatcactttatgttatattgttattgtttatattgttgttttgttattaaataaatgcaaacttctattaatatatatataaataaataaaaaaatttttttattaacttttataacttttcaatatttcttaaataaatttttattattttttataaattaatattatttatttttaattacctgaataaattttttaatttaaaaaaaaaataattatatgtttattttggtatgtttttaaattaatcactttttttttatagatatactttggataaatattataaatatctaaaatttatatatatatatatatatactattaaaattctaaaattagtactttaaatataacgaaaaaaattttattttttattttattttttatttctatttcttgttacttatatcttaaatatataaatatattttttctcctaatatataattttctaatatgttttattctttctaaatattaaccttttttattaaatattaaccttttttcaattaattatatataaaattcctcaatcccttaatttttaaaaatataatttacatttataaaaaattaaaaaattaaaaaattaaaaaagaatgaagaaatataataaagaaaaaaaaaatattaaaccttttatatctttttcattattaaaaaaaaactctaaattatggaataattttaattatttttcatatcaatttatcaatattaatataatataataaaataaatgaaagttaaataaataatatttaaattaaatggataaataaataatatttagataatctctattaattaaactttaattattattaattataatattaattattctgaaaaaaaaagagtccatggaaaaaatatttaaatataaataaaaaaaataactctcattcttttgattaattactaattataatatattatatattcacctttatattacattaaactttaatatgtaatcttaaatataattatatatactttaaatagagtgcctatttaatttaatatattatgaattctttaaatttatttttaaatcaatcgaatatttatatatagaggttaatataaaaaatagcaaaaaagtttattaaatatttatgaatattttatatataatatatagagttttatcctttttt

SEQ ID NO: 959 - DNA, 4000 bp, Escherichia coli
  misc_feature (1978)..(1978): n is a, c, g, or t
  misc_feature (1985)..(1986): n is a, c, g, or t
  misc_feature (3349)..(3349): n is a, c, g, or t
tggtcatctcgatcttcttttcaatcgcttggatttcctgcgaaaaatcgaggtctgactccttggacgactgcaagatatcttccaactgcttctctaaatcaagcaggggcttttcaaaatctaaactctgtttattttttttctgcatgcgaaaattttaaaatgatatgagcgacatggtaaggcggttaatcatcctgagcaagttcttccttccaccccagaattcttgccttggaagtcgcctcctctgccccgtctttatcccctttatttacaaggatacgggcgaggcttacggtaatggtcaaatcctccggactaagctgcagggcttgacggcatgcctgctcggcatcgtctaagttgcctctcgaaaggcagacttccgcaagtgcgcgccacgcttccacacaactggggtgttcctgaagaatcgcccggagttgagtttccgccacttcctcttccccgagtgtaaattggagaacagcctgattaacccgatcttctacagaatccatggtggtttatacgattggtgatcccggtattttggcaacttgaaaaacgcatcgccacatcgtgttgtaagttcttgtgtttacgaccttcatggtgcattaaattacagactttactaatttcagctcacccgccttaccccttccccctatgctttccagcgatccggactttcaacaactcctccttctgcacagccgggaccgcaggctcaagaccttgcagttggatttacaaaaactgccggccgagctcgagcagatggacaagaagatacacgatgaaaaagagtccatccgtatggcgatggaagaatggaaggcacttgagagcaaaaataataccctggaaaaagacattctttcccaccgcgaccaaattgccaggcagcgcaaccggcaactcgaagtaaaaaagaatgaggaataccaggcactggaacatgagattgccaacctggaagccaagatcgacgagttggaaagtgagcaaatcgaaacactcgataaaatagatgatgcccgagaaactgcggaaattgctgaaaagaaaattaccgaacgggtgcatgagttggaaaaggcacgccagcaaagagcggattttggcagggaatccgaagccgatgtcacatcactgatccaacaaataagtgaaacacgagaagaagtagaggcggactttcttacaatctacgaccgagtaagcaaaattgtatcccgcccgccctacatggcgccattggaagaccaaaaatgctccggttgccacctccgcgtatccaatgatgtcgtgtcctctgtgctggtggaaaaaaagcttacccagtgtgaccagtgtggaagaattgtgtacattgaacggtagcgttttacaaaatctgtcgaataagcacagcctcagcggtgcaaaagacagcgggcgatacgacccagattttcattttttaaatttccgagaaacggtcattcgctacattgctttaggtgatgatagaggaaagtccggacatcacagggcaggattccctgcgaaagcggggggtgcttgcttgaaggcaagttcacggccagtgccacagaaaataaaccgcctcactcgtgaggtaagggtgaaatggtggggtaagagcccaccgccgcctgagcaatcatgcgggcatggtaaacccaatccgatgcaagacgaaataggaaaccgggcggcccgtcctatggtttcgggtacgtcgcaccctcgtccgcgagggatcgttcctttacacaaaggagcgatagatgaatgaatgaccttcctcacttttgtggagaagtacagaatccggcttacagtttctcggaattcattttttaacctttaatcctaacttcactttcggaggtttaccggcacagtacggggagttgaaaggcagacatttgcaattgacgattccccgatccgaacattnaatactnngctcttatggcaaacacacaatctgcacttaaaaatattcgcaagaaccgcactaattatctgcgcaatcgctctgcggccagccgtctgaagacactagaaaagaatttcctgtcccaaatagaagagaaaaaccaaagtggggccacagccgctgccaccagctttatctctgcactggatcgtgcgtgcaaaggaaatttgattcaccgcaacaaggtagctaggaagaaatcccgctgcgcttccctgattgctggtctttctgcttaattttttaattctggctcgttgagctagatatggcgggaatcgttctcgtctttctgggagtacccagactcttggcggtcgtgatttaccttatttttcttgaggtatgcctcgtgcacatcttcggcggacatacccatgacttgagcaagtgaaatcaagaagtgaaacaagtccacaatctcgaccttcgcattttgcttatcaaactcctgatattttgcccaccatttccagggcacagaatcggttaattcagcaagctcctgctgcatggcccgcacatagttgagaatccacttcgctcggtcctcgtcgttcatcgcactcatatctactccaatccgtcggtttagctcatcctggagttcaaaaatgttgtctaatttatccataggtgggttcataacatcagtagaaagaatggaggcaagtggtttctcttttttcggttaaacttcctgcttttgtcttgtcgaaaaacccacctcgttggtatggtcattccttttgcttaacttggcaaagcacccaactctatctctgcacccgttgcccccaagtgggcaacccgaatccaacaatattacttccaaacggatacaaaatccgtagttttcatgaaatcaagaattcgttcccgttggcaccgcgcaaatgaaaaaccgctcgaagcccagtccaccacccctacccgtgctcccatgggtgaatttattccgtctgaagatcagccccttgtggatgatttaaccaacgccaagcctcccgcccaaagcgaaacatcccagcccagaagagagcgttcagaatttaaaaaaccacgcaatgatcgcaacgggcagcgccgtgggagaaaccatcgcggagagaacaaaccaggcgatcatgagtccgatggcgaggaaagaccaagaaagagaagacctcatggaaagaagcctcactcttcccgtggtgagaacaaccgtaatcgcaaccgcgacgacaaaaattcttcgtcccgaggcaaccgtcaaaggaacaagggagaatccgaaaaatcaagaggccccagaaagtcgaacgggcaggctaaaagctctccggncaagaaatcggggctgggcggatttatatcaaaacttttcgggggataatgccccccaccccactcctgatcaggtagtcgagtggaagtctttcgtatagaaggaggaaattgcctacatggagaagtggagattagtggggcgaaaaattccgcacttcctctctttgccgcctctttgctcagcactgaagacaccatcctcgaaaatgtgcccaacctgagcgatgttcaattcatggctcaactcttggagcaccttggtgcgagggtcgaaaaaattgatcccaacacctggcgcatttccccgcaaaacataaacccggacccgccctatgaattggtccgaaagatgcgtgcctcgatctgcctgctcggcccactggttggccggttaaaaaaagcaaatatgcctatgcctgggggctgcgtcattgggaaccggcccatcgatcttcaccttaaggcactgtctgacctcggggcagacatacagctgcgtggaggggtggttgaggtggatggagcaaagatggttggcggttctgtctttcttggtggcaggcatggaagcacggtgacaggtacggcgaatgccatcatggcagcggtacttacccccggaagcacccgcttggaaggatgtgcctg

SEQ ID NO: 960 - DNA, 4000 bp, Escherichia coli
  misc_feature (11)..(11): n is a, c, g, or t
  misc_feature (1988)..(1988): n is a, c, g, or t
tcaaaacaggnatgagtgaaaaaaaagcattcaaaatgattgatggaggttatgatgcaacatttaccttggcaaatttgaaaaaagatattacaactatgacaaatgcagctaaagaattagacataaaattaccaatgataacaaaagcagaagaaatttacgaaaatgccgtaaaagaaggattaggagatagagactataccgaaattatagaatatattaaaaaaatcaataatttatgataaattgattcatgaaatgacaagtaacacaaattctataaactatgaaaataagatgagagtgtgagattagattcaaaaatagctattgtcacgggggcatcaagtgaaataggcaaaggtattgtaaaacgatttgtaaatgaaggtgcaaaagtagttttaattgcaagaaatttagatgaattggaaaaagcaagaaaagagattggtcatgaagaacaaacaacatcagtgatatgtgatgtaacagaagaggcacaaacagttcaagcaattaatcaaattatggatacgtatggtaaaattgatattttagtaaataatgcaggtacaattaatgatccaaaacattttcatcaaatggaagattctgaaataaaaaaattacttgatgtaaatttgttaggagtatttcacatgacaaaaagtgtgttaaacaaaatgttagatgtaaaaaaaggaacaattatcaacataggatctatttcaagtgaaagagcaattccacgtgttcatttggcagtgtattcttcaacaaaagctgcaatctcaatgttcacaaaatcaattgcagtagaatatgcaagaaaaaatattagatgtaattgtattaatcctggaataattaattcaggaatgattaaaccatatttagatgatcctcaagcaagaaaaattttagaagaaaaatcaccacttgcaagaataggagaaccagaagatgttgcaaatgcagtactctatttagcatcagatgaagcaaattgggtaacaggtacaattctaaacatcgatggtggaaaatcagctgcagaataagaatacaaattatgtaacatttgagaaactagtaattttttcaatatttgagaacagatttattttttttcaaatatctgcgataagagagtccagttacaagcattacaattccagtaattaatccccacatagcaaaagagttaagatcaaattcagacataatttagaatataatttgaaacatctaaagtttaggatttcaggaatggattaaataatttaccttagaacaagtctgaaacatctaaatagatttgacattgacaagatttatgcctgaatttagatgcgaagattgtggaaaacgtctatttcatgaaaatgagacaacgttagaaattgaaaaaacagttcattcaaaattctgtagaaaaacaaaaggagaaacacatagctttatgcatagagatctagcacatatggaaacttttgatgtagaaagagaaaatgacaccacaggtaatccagtacttaaaaaataaattttaaatcatacctcaaaattatatcctagagaattatcatgaaatttaattggttgaagagtatcattatgatttagttgtagtaggggcaggtccagctgggtcatcagcagcatttgcagctgcaaaaaatggaattaaagtggcgttacttgaaaaagaaaactcaattgcagaaacagttagaacaagtggcgttacgtggattgagagtatcaaggagtttggaattccagaagattgttttaatccaattaaaaatttctcatttgtttcaccaaataatgaagttaccataagtgattcaattgcaactgcagcagtattagatgtaagaaaaacatatcgatggttggcaaaagaagcagaaaaagtaggagtagatgtttttgtaaaaatgaacataaatgaagttataaaaaataaagagaangatattgtaggagtaagcggagtaggaccaaatggaaaagcaatatttcattccaaagtaattattgatgctacaggattttcttcaataatttccaaagcaatgggttttgttacacagtgggaaagatttggagcaggtgcagaatatgaagcaaaagttgaaaatgttgattctgaaacatggtggttgatggtagggcaagagtacactcctgcaggttatgcatggatttttccattagggaataatattgttagaattggagttggagtaggtaaaccagaatcagatgttgatccaactcaaagactaaaagaaataatagaaaaaaagttaggcccaattaaaaaattaggaaaaattactccaatagaattccattatggtttaattccaaatgatgggttatcaagaaaaacggtttttaataatttaattttagttggagattctgcaggacaagcaaatccactagtgttagaaggtatcagatatgcgataaaatttggcagagttgcaggtaaagttgtagcagatgcaataaaaaatgaaaaaacaaatgaaagtgcactatacccatatgaagagaattggagaaaagcaattgagtcaaaaattaaatctgcaggaaaagttcaagatagatggattggtttatcagataaggaatgggatagagaattagatataatcaaagaattgaaaacagaagaatttttggattttattaaagcagagtttgggttatcaaatatgttaaaactagcattaagtcatcccaaattagcagtaagacaacttttcaatttagtaaaagggaaataatttatttaaaaaaaatcatgccgtagcaactacataggtgtagaagctaggcacaattctaggcacagatatggcatggttggtcggtttggacatacataatgaatgaagttgtttgagtcaatgtagattgtagattacaaatcatgtaatagttgttgaaacaatgggagtgttttgttgcttcaagtgactcattataatttctacaagatatgtcaaacaatttcttttcaaaataatttatcaaaaattagttataagcaacgcgtagaatttattcgaatcaatgatcagtatcaagaagattataattaaatgaataattttaaaacatgtggataaagtaagagaaaaatttgatgattgggcagagaatggaaaagcagaatcaatggaaaaagaacatggaaaaaatgtattaaaatttttgaataaaatttcttttaacaaacctttttcatttttagatgttggatgtgggaatggatgggttgtaagatacatatcaaatatttcaacatgtaaaaaaacaatggggatagataaaagtaaaaaaatgatcacacaagcaaataagaaaataaaaaataataaagaaagttttgtctacacagatatagaatcatggaaatatagaggaaaatttgattttgtttttgcaatggaatcaatatactatgcagattccatagaaaaagcaattaagaaaatttacaaattactaaaaccaggaggacaatttttttgcggtacagatttttacacagataataaagcaactacaaaatggagtgatatgatgaaaattcaaatgcatttacattcaaaaaaagaatggaaagaatttttcaaaaatgcaggttttaaaacagaaacaaaacaaatcaaagatttgaaaggtaatgaaaaatggaaaagagaaatgggaactttattcatcataggcacaaaaccttcaaagtaatattcaaatcagattacaaagtaacacaatcatgtgagctggagcacgacatgctgctacggcagaggaaactcctccctccatacaggaaatgtgatctggagatagataatcagagatggttggcaacggagcagaaaataatccaatatggcgcacagtgatggtgaaaacctgaggtttccataaaaggaatgaaacagacgacccacatgga

SEQ ID NO: 961 - DNA, 4000 bp, Escherichia coli
  misc_feature (732)..(732): n is a, c, g, or t
  misc_feature (799)..(799): n is a, c, g, or t
  misc_feature (854)..(854): n is a, c, g, or t
gcttcccgccgtcgtccccgacggcgaccagcggccgccccgcacgacccacccagcccacgcgcacagcgggcgtcccggcgaccagcgcgtgcgcgggaacatccctggtgacgacggcgccggcggcgaccgtggcccaggccccgatgcgcacaggggcgacgcagacggcgcgcgccccgatggaggcgccctcctcgatggtcacgcccacgggctcccagtccgaggccgacttgagcgagccgtccggattgacggcccgcgggaagcggtcattggtgagcgtcaccgccgggccgatgaagacgccgtcggccagcaccgccggctcatacaccagggcgtagttctgcaccttgcaatgacgccccatccgcacaccctcgcctatgtaggcgccgcgccccacgatgcagccctgaccgagcacggcgcgctcccgcacctgcgccagatgccacaccgccgttccctcaccgatgacggcggcctcggacacatctgcggacggtgcgatacgggtggccacggcagctccttatggatcatgatcacgagggaggcgagcgaagcgggcgacgtcgaagtgagacggcacagttattttaagcccgatacggactttcgacgagccgtgtaagaatgccggggtgacgtcgtccccagactcctccatctccccagaacagccgcatcccgacgagctgacggatgcctggctcgtgnttccgctgtacaacgaggctcaggtcatccgcggcgtcatcgaggaggcccgccggaccttcccccntgtcgtcgtcgtcgatgacggctcgcaggacggctccgcggcgcaggccgaggcngcgggagccgtcgtcgtgcgccaccccatcaacctggggcagggcgccgccctgcagaccggcatcagctacgtgctggagcgcaccgatgcgcgctacctcgtcacgttcgatgccgatggccagcactcggccgccgacgccgccgccatggtgcgggccgcgcgcgacgaggacctggcgttcgtgctgggctcccgcttcctcgagggcccctcaccggtcggctggctcaagcgcctcgtgctcgccacggccgccgcggtcgcctcccgcaccaccggcatgcgcatgaccgacgcccacaacgggctgcggatgctgcggcgcgatgccgccgagcgcctcgacctgaggcagaaccgcatggcgcacgccagcgagatcacccgccagctgggcgccaccggcctgccctggagggagtacccggttcacatcgagtacaccgagtactcgaaggccaagggacagtcgctgctcaactccgtcaacatcctcgtcgacctgatcttctcgtgacccgactcgcgcaaggaatccgcccatgagctcccagctgatcatcaaggccgtcctcctcgtctgcgtcgcggggatcggatggatgatgctgcgctcccccggcggggcgcgccatcaggccgggcgcaggctcgccactctggccttcgtgttcttcgccatcgcggccatcgccgtgccctcgctcacggcgcgcctggcccacctcgtcggcgtggggcgggggaccgacctgcttctctacgccctggtggtgggcttcctgatccaaatcctctcgtccttccgccgcaacgccgcacgcgaaaggcagatcacccgcctggcacgacggatcgccctggacacggcacccgatccgcatcaggaagcggctgagcgtcaccccgattcgcgcccaacacgagactcgggtcatagaaccgcatgagctgagcacgtatggtgaccacgtgtccacaccacctgtacgccatgcggcgcgcgagctgcgccatcgagtcctgcgcaacgtcatgctgtgcctgctggcgtgcgtgctcttcgtgaccacgggggcgtgggcggcttatcacaatctccaaggaaagatcggcgtcaagcccatcgacaccattatcggcggggaccgccccgacggccccacggaccactccttcgaggggcgtgcggtcaacatcctcgtcatggggtcggactcgcgcaacggccaggtagtcaatgacgacacggagggcatgcgctcggacacggccatgatcgtccacctgtccgaggaccgcagccgcatggacgtcatctcgatcccccgcgacacgatggtggccatgccgtcgtgcaagcttcccgacggctcggagagcgatccctcctcctacgccatcttcaactccgccttctccaccggggccaacaactcctccaaccccgatgacgtcgcctacgccgcggcgtgcacgatcaagaccgttgagaagctcaccaatgtccgcatggacgagtacatggtggtggacttcaccggtttcgagagcatggtcgactccctgggaggcgtgcccatgtacgtcgaggaggacgtggacgacgagaaggccgacctccacctcagcaagggctgcaacacgctcaacggcgcccaggccctcggctacgcccgtgcgcgctactcgctgggcgacggctccgatatctcccgcatcggccgccagcagcagctggtcggcgcgatcatgcgcaccgccaagtcgaagaacctcctgacggacatgccgactctctacagcttcgccgagtcggccctgtcaacgctcaccgtcagtgaagggctggggggaatcgacaagctcgcagggctggccaatagcgccgccagcatcggcatggacaacatcaacttcatcaccatgccggtcgaggaggacgacatcgaccccaaccgcgtgcagcccagtgcgaaggccgatgacgtctggaaagccctgcacgacgacaagccggtccccgaagaggccgtctccctgtccgccgacggcacctcccccagccaggaggcctcccccaccgacgactccagcgggaccggcgatccgacccagggcaaccagcccaccccggcggctcccgagaatccaggcgccgggtcaggcgattcggggaccgtcgatcctgccacgcagtgcagctgacagttggccccgcacattcagccgcagctcaaccgcacctgacacaggcagtggcacagccgctatgacacgaagaaggggacgacctcagtgactcctcctccggatctgcccccgtccttcggccccggcgcctccggctcatcgaatcgccgcagcggcgagaacggcgagaggcgggcatcatcggcgggatcggccgactcggccaggcgggcggacgccggttcccctcccacgatcaggcgccccccggcgcccgcgggtcggagcgccgcccaggcaccgcagcgccgctccctgcgccaagaggggtcgaagcagggcgccgatgcgggctcggccggccagcgccggccgggcagccatgtgcgtccggggtcctccgccgtcccgatcgggcagcggccctcaggtcccgaacccacccgggcgctgcccaccagaggcgccgcctcatccggagccgcctggaatggtcagccggacgccgggttcgtacggccggacagcccgttccccccgtcgacgcagcccgaaggcaccccggaaggcactcggaggcgccgtccgctgcggtgggtggcggcgattctcgtcctgctcctggtgctcatcatggggcgcgtggcatggctgtggcacgacatcgactccaagctcgatcgcattgaggcgctgtccggggccaaggacacccccggggagacctggctcatcgtcggctcggactcccgcgatgacggaggggtgccccaggacggcaccgagggctcgcgcgccgactcgatcatggtgctccacaaggcgtccaacgggcaggcctcgctgatctccctgccgcgcgacacctacgtggagatccccggctatgacgacgacaagatcaacgcggcctactcatacgggcaggccccgctgctggtggagacc

SEQ ID NO: 962 - DNA, 4000 bp, Escherichia coli
  misc_feature (4)..(4): n is a, c, g, or t
  misc_feature (31)..(31): n is a, c, g, or t
  misc_feature (37)..(37): n is a, c, g, or t
  misc_feature (40)..(40): n is a, c, g, or t
  misc_feature (46)..(46): n is a, c, g, or t
  misc_feature (51)..(52): n is a, c, g, or t
  misc_feature (55)..(55): n is a, c, g, or t
  misc_feature (88)..(88): n is a, c, g, or t
  misc_feature (94)..(94): n is a, c, g, or t
  misc_feature (97)..(100): n is a, c, g, or t
  misc_feature (109)..(109): n is a, c, g, or t
  misc_feature (115)..(116): n is a, c, g, or t
  misc_feature (118)..(118): n is a, c, g, or t
  misc_feature (120)..(121): n is a, c, g, or t
  misc_feature (126)..(130): n is a, c, g, or t
  misc_feature (132)..(132): n is a, c, g, or t
  misc_feature (136)..(137): n is a, c, g, or t
  misc_feature (142)..(142): n is a, c, g, or t
  misc_feature (144)..(145): n is a, c, g, or t
  misc_feature (147)..(148): n is a, c, g, or t
  misc_feature (165)..(165): n is a, c, g, or t
  misc_feature (168)..(168): n is a, c, g, or t
  misc_feature (172)..(172): n is a, c, g, or t
  misc_feature (181)..(181): n is a, c, g, or t
  misc_feature (183)..(183): n is a, c, g, or t
  misc_feature (196)..(196): n is a, c, g, or t
  misc_feature (205)..(205): n is a, c, g, or t
  misc_feature (212)..(212): n is a, c, g, or t
  misc_feature (214)..(214): n is a, c, g, or t
  misc_feature (217)..(217): n is a, c, g, or t
  misc_feature (219)..(220): n is a, c, g, or t
  misc_feature (222)..(223): n is a, c, g, or t
  misc_feature (226)..(226): n is a, c, g, or t
  misc_feature (244)..(245): n is a, c, g, or t
  misc_feature (247)..(247): n is a, c, g, or t
  misc_feature (253)..(253): n is a, c, g, or t
  misc_feature (256)..(256): n is a, c, g, or t
  misc_feature (271)..(271): n is a, c, g, or t
  misc_feature (273)..(273): n is a, c, g, or t
  misc_feature (275)..(275): n is a, c, g, or t
  misc_feature (280)..(281): n is a, c, g, or t
  misc_feature (287)..(287): n is a, c, g, or t
  misc_feature (289)..(289): n is a, c, g, or t
  misc_feature (292)..(294): n is a, c, g, or t
  misc_feature (307)..(307): n is a, c, g, or t
  misc_feature (310)..(310): n is a, c, g, or t
  misc_feature (319)..(319): n is a, c, g, or t
  misc_feature (323)..(323): n is a, c, g, or t
  misc_feature (331)..(331): n is a, c, g, or t
  misc_feature (336)..(337): n is a, c, g, or t
  misc_feature (342)..(342): n is a, c, g, or t
  misc_feature (346)..(347): n is a, c, g, or t
  misc_feature (349)..(352): n is a, c, g, or t
  misc_feature (355)..(355): n is a, c, g, or t
  misc_feature (358)..(358): n is a, c, g, or t
  misc_feature (361)..(361): n is a, c, g, or t
  misc_feature (363)..(363): n is a, c, g, or t
  misc_feature (367)..(367): n is a, c, g, or t
  misc_feature (373)..(373): n is a, c, g, or t
  misc_feature (394)..(394): n is a, c, g, or t
  misc_feature (397)..(397): n is a, c, g, or t
  misc_feature (403)..(403): n is a, c, g, or t
  misc_feature (409)..(409): n is a, c, g, or t
  misc_feature (421)..(421): n is a, c, g, or t
  misc_feature (424)..(424): n is a, c, g, or t
  misc_feature (427)..(427): n is a, c, g, or t
  misc_feature (430)..(431): n is a, c, g, or t
  misc_feature (435)..(436): n is a, c, g, or t
  misc_feature (445)..(445): n is a, c, g, or t
  misc_feature (454)..(454): n is a, c, g, or t
  misc_feature (456)..(456): n is a, c, g, or t
  misc_feature (458)..(458): n is a, c, g, or t
  misc_feature (460)..(460): n is a, c, g, or t
  misc_feature (463)..(463): n is a, c, g, or t
  misc_feature (466)..(466): n is a, c, g, or t
  misc_feature (472)..(472): n is a, c, g, or t
  misc_feature (487)..(487): n is a, c, g, or t
  misc_feature (489)..(490): n is a, c, g, or t
  misc_feature (501)..(501): n is a, c, g, or t
  misc_feature (504)..(505): n is a, c, g, or t
  misc_feature (508)..(508): n is a, c, g, or t
  misc_feature (511)..(512): n is a, c, g, or t
  misc_feature (532)..(532): n is a, c, g, or t
  misc_feature (538)..(538): n is a, c, g, or t
  misc_feature (541)..(541): n is a, c, g, or t
  misc_feature (544)..(544): n is a, c, g, or t
  misc_feature (556)..(556): n is a, c, g, or t
  misc_feature (559)..(559): n is a, c, g, or t
  misc_feature (565)..(565): n is a, c, g, or t
  misc_feature (574)..(574): n is a, c, g, or t
  misc_feature (576)..(578): n is a, c, g, or t
  misc_feature (580)..(580): n is a, c, g, or t
  misc_feature (582)..(583): n is a, c, g, or t
  misc_feature (586)..(587): n is a, c, g, or t
  misc_feature (592)..(592): n is a, c, g, or t
  misc_feature (601)..(601): n is a, c, g, or t
  misc_feature (610)..(610): n is a, c, g, or t
  misc_feature (613)..(614): n is a, c, g, or t
  misc_feature (616)..(616): n is a, c, g, or t
  misc_feature (618)..(618): n is a, c, g, or t
  misc_feature (622)..(622): n is a, c, g, or t
  misc_feature (631)..(632): n is a, c, g, or t
  misc_feature (634)..(635): n is a, c, g, or t
  misc_feature (637)..(637): n is a, c, g, or t
  misc_feature (640)..(640): n is a, c, g, or t
  misc_feature (642)..(643): n is a, c, g, or t
  misc_feature (652)..(652): n is a, c, g, or t
  misc_feature (655)..(655): n is a, c, g, or t
  misc_feature (658)..(658): n is a, c, g, or t
  misc_feature (660)..(661): n is a, c, g, or t
  misc_feature (664)..(664): n is a, c, g, or t
  misc_feature (667)..(667): n is a, c, g, or t
  misc_feature (670)..(670): n is a, c, g, or t
  misc_feature (673)..(673): n is a, c, g, or t
  misc_feature (675)..(675): n is a, c, g, or t
  misc_feature (679)..(679): n is a, c, g, or t
  misc_feature (681)..(681): n is a, c, g, or t
  misc_feature (703)..(703): n is a, c, g, or t
  misc_feature (709)..(709): n is a, c, g, or t
  misc_feature (715)..(715): n is a, c, g, or t
  misc_feature (718)..(719): n is a, c, g, or t
  misc_feature (721)..(721): n is a, c, g, or t
  misc_feature (724)..(724): n is a, c, g, or t
  misc_feature (730)..(731): n is a, c, g, or t
  misc_feature (748)..(748): n is a, c, g, or t
  misc_feature (750)..(750): n is a, c, g, or t
  misc_feature (754)..(754): n is a, c, g, or t
  misc_feature (766)..(766): n is a, c, g, or t
  misc_feature (769)..(769): n is a, c, g, or t
  misc_feature (772)..(772): n is a, c, g, or t
  misc_feature (776)..(776): n is a, c, g, or t
  misc_feature (778)..(778): n is a, c, g, or t
  misc_feature (793)..(793): n is a, c, g, or t
  misc_feature (796)..(796): n is a, c, g, or t
  misc_feature (806)..(806): n is a, c, g, or t
  misc_feature (809)..(811): n is a, c, g, or t
  misc_feature (821)..(821): n is a, c, g, or t
  misc_feature (823)..(826): n is a, c, g, or t
  misc_feature (832)..(832): n is a, c, g, or t
  misc_feature (835)..(835): n is a, c, g, or t
  misc_feature (837)..(837): n is a, c, g, or t
  misc_feature (849)..(850): n is a, c, g, or t
  misc_feature (853)..(853): n is a, c, g, or t
  misc_feature (856)..(856): n is a, c, g, or t
  misc_feature (865)..(865): n is a, c, g, or t
  misc_feature (870)..(871): n is a, c, g, or t
  misc_feature (874)..(874): n is a, c, g, or t
  misc_feature (877)..(878): n is a, c, g, or t
  misc_feature (883)..(883): n is a, c, g, or t
  misc_feature (886)..(886): n is a, c, g, or t
  misc_feature (889)..(889): n is a, c, g, or t
  misc_feature (891)..(892): n is a, c, g, or t
  misc_feature (897)..(897): n is a, c, g, or t
  misc_feature (901)..(901): n is a, c, g, or t
  misc_feature (907)..(907): n is a, c, g, or t
  misc_feature (916)..(922): n is a, c, g, or t
  misc_feature (925)..(925): n is a, c, g, or t
  misc_feature (931)..(931): n is a, c, g, or t
  misc_feature (934)..(934): n is a, c, g, or t
  misc_feature (940)..(940): n is a, c, g, or t
  misc_feature (942)..(943): n is a, c, g, or t
  misc_feature (949)..(949): n is a, c, g, or t
  misc_feature (955)..(955): n is a, c, g, or t
  misc_feature (961)..(961): n is a, c, g, or t
  misc_feature (964)..(964): n is a, c, g, or t
  misc_feature (968)..(970): n is a, c, g, or t
  misc_feature (975)..(975): n is a, c, g, or t
  misc_feature (982)..(982): n is a, c, g, or t
  misc_feature (985)..(985): n is a, c, g, or t
  misc_feature (991)..(991): n is a, c, g, or t
  misc_feature (1000)..(1000): n is a, c, g, or t
  misc_feature (1002)..(1002): n is a, c, g, or t
  misc_feature (1009)..(1009): n is a, c, g, or t
  misc_feature (1012)..(1012): n is a, c, g, or t
  misc_feature (1017)..(1017): n is a, c, g, or t
  misc_feature (1021)..(1021): n is a, c, g, or t
  misc_feature (1024)..(1024): n is a, c, g, or t
  misc_feature (1026)..(1026): n is a, c, g, or t
  misc_feature (1033)..(1033): n is a, c, g, or t
  misc_feature (1035)..(1036): n is a, c, g, or t
  misc_feature (1057)..(1057): n is a, c, g, or t
  misc_feature (2077)..(2077): n is a, c, g, or t
  misc_feature (2445)..(2446): n is a, c, g, or t
  misc_feature (2448)..(2450): n is a, c, g, or t
  misc_feature (2452)..(2452): n is a, c, g, or t
  misc_feature (2456)..(2457): n is a, c, g, or t
  misc_feature (2460)..(2461): n is a, c, g, or t
  misc_feature (2463)..(2463): n is a, c, g, or t
  misc_feature (2465)..(2465): n is a, c, g, or t
  misc_feature (2470)..(2470): n is a, c, g, or t
  misc_feature (2475)..(2475): n is a, c, g, or t
  misc_feature (2477)..(2479): n is a, c, g, or t
  misc_feature (2481)..(2481): n is a, c, g, or t
  misc_feature (2484)..(2485): n is a, c, g, or t
  misc_feature (2491)..(2496): n is a, c, g, or t
  misc_feature (2500)..(2501): n is a, c, g, or t
  misc_feature (2503)..(2503): n is a, c, g, or t
  misc_feature (2505)..(2505): n is a, c, g, or t
  misc_feature (2508)..(2510): n is a, c, g, or t
  misc_feature (2512)..(2512): n is a, c, g, or t
  misc_feature (2515)..(2515): n is a, c, g, or t
  misc_feature (2519)..(2521): n is a, c, g, or t
  misc_feature (2523)..(2538): n is a, c, g, or t
  misc_feature (2541)..(2543): n is a, c, g, or t
  misc_feature (2545)..(2545): n is a, c, g, or t
  misc_feature (2548)..(2548): n is a, c, g, or t
  misc_feature (2554)..(2555): n is a, c, g, or t
  misc_feature (2557)..(2557): n is a, c, g, or t
  misc_feature (2559)..(2560): n is a, c, g, or t
  misc_feature (2562)..(2562): n is a, c, g, or t
  misc_feature (2565)..(2567): n is a, c, g, or t
  misc_feature (2570)..(2570): n is a, c, g, or t
  misc_feature (2574)..(2575): n is a, c, g, or t
  misc_feature (2577)..(2577): n is a, c, g, or t
  misc_feature (2579)..(2579): n is a, c, g, or t
  misc_feature (2584)..(2584): n is a, c, g, or t
  misc_feature (2588)..(2590): n is a, c, g, or t
  misc_feature (2592)..(2592): n is a, c, g, or t
  misc_feature (2595)..(2595): n is a, c, g, or t
  misc_feature (2597)..(2598): n is a, c, g, or t
  misc_feature (2601)..(2602): n is a, c, g, or t
  misc_feature (2608)..(2608): n is a, c, g, or t
  misc_feature (2610)..(2611): n is a, c, g, or t
  misc_feature (2614)..(2616): n is a, c, g, or t
  misc_feature (2618)..(2623): n is a, c, g, or t
  misc_feature (2625)..(2627): n is a, c, g, or t
  misc_feature (2633)..(2633): n is a, c, g, or t
  misc_feature (2638)..(2638): n is a, c, g, or t
  misc_feature (2641)..(2641): n is a, c, g, or t
  misc_feature (2643)..(2643): n is a, c, g, or t
  misc_feature (2645)..(2647): n is a, c, g, or t
  misc_feature (2649)..(2651): n is a, c, g, or t
  misc_feature (2653)..(2653): n is a, c, g, or t
  misc_feature (2655)..(2655): n is a, c, g, or t
  misc_feature (2741)..(2741): n is a, c, g, or t
  misc_feature (2757)..(2758): n is a, c, g, or t
  misc_feature (2799)..(2799): n is a, c, g, or t
  misc_feature (2913)..(2913): n is a, c, g, or t
  misc_feature (2936)..(2936): n is a, c, g, or t
  misc_feature (2942)..(2942): n is a, c, g, or t
  misc_feature (2949)..(2949): n is a, c, g, or t
  misc_feature (2952)..(2952): n is a, c, g, or t
  misc_feature (2958)..(2958): n is a, c, g, or t
  misc_feature (2960)..(2960): n is a, c, g, or t
  misc_feature (2963)..(2963): n is a, c, g, or t
  misc_feature (2968)..(2968): n is a, c, g, or t
  misc_feature (2970)..(2971): n is a, c, g, or t
  misc_feature (2974)..(2976): n is a, c, g, or t
  misc_feature (2978)..(2978): n is a, c, g, or t
  misc_feature (2980)..(2980): n is a, c, g, or t
  misc_feature (2982)..(2984): n is a, c, g, or t
  misc_feature (2986)..(2989): n is a, c, g, or t
  misc_feature (2991)..(2991): n is a, c, g, or t
  misc_feature (2993)..(2993): n is a, c, g, or t
  misc_feature (2995)..(2996): n is a, c, g, or t
  misc_feature (2999)..(3002): n is a, c, g, or t
  misc_feature (3007)..(3007): n is a, c, g, or t
  misc_feature (3009)..(3013): n is a, c, g, or t
  misc_feature (3015)..(3015): n is a, c, g, or t
  misc_feature (3017)..(3017): n is a, c, g, or t
  misc_feature (3019)..(3019): n is a, c, g, or t
  misc_feature (3021)..(3021): n is a, c, g, or t
  misc_feature (3025)..(3032): n is a, c, g, or t
  misc_feature (3034)..(3035): n is a, c, g, or t
  misc_feature (3038)..(3038): n is a, c, g, or t
  misc_feature (3040)..(3041): n is a, c, g, or t
  misc_feature (3043)..(3043): n is a, c, g, or t
  misc_feature (3045)..(3045): n is a, c, g, or t
  misc_feature (3047)..(3048): n is a, c, g, or t
  misc_feature (3050)..(3053): n is a, c, g, or t
  misc_feature (3055)..(3056): n is a, c, g, or t
  misc_feature (3058)..(3061): n is a, c, g, or t
  misc_feature (3063)..(3064): n is a, c, g, or t
  misc_feature (3066)..(3068): n is a, c, g, or t
  misc_feature (3070)..(3070): n is a, c, g, or t
  misc_feature (3072)..(3076): n is a, c, g, or t
  misc_feature (3078)..(3080): n is a, c, g, or t
  misc_feature (3082)..(3084): n is a, c, g, or t
  misc_feature (3087)..(3089): n is a, c, g, or t
  misc_feature (3093)..(3093): n is a, c, g, or t
  misc_feature (3096)..(3096): n is a, c, g, or t
  misc_feature (3099)..(3100): n is a, c, g, or t
  misc_feature (3104)..(3104): n is a, c, g, or t
  misc_feature (3108)..(3108): n is a, c, g, or t
  misc_feature (3110)..(3110): n is a, c, g, or t
  misc_feature (3126)..(3126): n is a, c, g, or t
  misc_feature (3128)..(3128): n is a, c, g, or t
  misc_feature (3131)..(3132): n is a, c, g, or t
  misc_feature (3136)..(3136): n is a, c, g, or t
  misc_feature (3139)..(3139): n is a, c, g, or t
  misc_feature (3143)..(3144): n is a, c, g, or t
  misc_feature (3146)..(3146): n is a, c, g, or t
  misc_feature (3150)..(3150): n is a, c, g, or t
  misc_feature (3155)..(3155): n is a, c, g, or t
  misc_feature (3159)..(3159): n is a, c, g, or t
  misc_feature (3163)..(3163): n is a, c, g, or t
  misc_feature (3166)..(3166): n is a, c, g, or t
  misc_feature (3169)..(3170): n is a, c, g, or t
  misc_feature (3176)..(3177): n is a, c, g, or t
  misc_feature (3182)..(3183): n is a, c, g, or t
  misc_feature (3197)..(3197): n is a, c, g, or t
  misc_feature (3202)..(3202): n is a, c, g, or t
  misc_feature (3207)..(3207): n is a, c, g, or t
  misc_feature (3209)..(3210): n is a, c, g, or t
  misc_feature (3216)..(3216): n is a, c, g, or t
  misc_feature (3219)..(3222): n is a, c, g, or t
  misc_feature (3232)..(3232): n is a, c, g, or t
  misc_feature (3236)..(3236): n is a, c, g, or t
  misc_feature (3247)..(3247): n is a, c, g, or t
  misc_feature (3250)..(3250): n is a, c, g, or t
  misc_feature (3254)..(3256): n is a, c, g, or t
  misc_feature (3258)..(3258): n is a, c, g, or t
  misc_feature (3267)..(3268): n is a, c, g, or t
  misc_feature (3274)..(3275): n is a, c, g, or t
  misc_feature (3283)..(3283): n is a, c, g, or t
  misc_feature (3285)..(3285): n is a, c, g, or t
  misc_feature (3292)..(3292): n is a, c, g, or t
  misc_feature (3296)..(3296): n is a, c, g, or t
  misc_feature (3298)..(3298): n is a, c, g, or t
  misc_feature (3306)..(3306): n is a, c, g, or t
  misc_feature (3308)..(3308): n is a, c, g, or t
  misc_feature (3310)..(3311): n is a, c, g, or t
  misc_feature (3315)..(3316): n is a, c, g, or t
  misc_feature (3322)..(3322): n is a, c, g, or t
  misc_feature (3324)..(3325): n is a, c, g, or t
  misc_feature (3328)..(3328): n is a, c, g, or t
  misc_feature (3330)..(3331): n is a, c, g, or t
  misc_feature (3334)..(3334): n is a, c, g, or t
  misc_feature (3342)..(3342): n is a, c, g, or t
  misc_feature (3348)..(3348): n is a, c, g, or t
  misc_feature (3355)..(3356): n is a, c, g, or t
  misc_feature (3358)..(3358): n is a, c, g, or t
  misc_feature (3366)..(3367): n is a, c, g, or t
  misc_feature (3376)..(3376): n is a, c, g, or t
  misc_feature (3380)..(3382): n is a, c, g, or t
  misc_feature (3391)..(3391): n is a, c, g, or t
  misc_feature (3394)..(3394): n is a, c, g, or t
  misc_feature (3401)..(3407): n is a, c, g, or t
  misc_feature (3409)..(3409): n is a, c, g, or t
  misc_feature (3415)..(3415): n is a, c, g, or t
  misc_feature (3420)..(3421): n is a, c, g, or t
  misc_feature (3424)..(3425): n is a, c, g, or t
  misc_feature (3430)..(3430): n is a, c, g, or t
  misc_feature (3435)..(3436): n is a, c, g, or t
  misc_feature (3449)..(3449): n is a, c, g, or t
  misc_feature (3457)..(3457): n is a, c, g, or t
  misc_feature (3463)..(3463): n is a, c, g, or t
  misc_feature (3466)..(3466): n is a, c, g, or t
  misc_feature (3483)..(3483): n is a, c, g, or t
  misc_feature (3490)..(3490): n is a, c, g, or t
  misc_feature (3505)..(3505): n is a, c, g, or t
  misc_feature (3507)..(3508): n is a, c, g, or t
  misc_feature (3517)..(3517): n is a, c, g, or t
  misc_feature (3521)..(3523): n is a, c, g, or t
  misc_feature (3525)..(3525): n is a, c, g, or t
  misc_feature (3527)..(3527): n is a, c, g, or t
  misc_feature (3532)..(3532): n is a, c, g, or t
  misc_feature (3541)..(3541): n is a, c, g, or t
  misc_feature (3543)..(3546): n is a, c, g, or t
  misc_feature (3552)..(3552): n is a, c, g, or t
  misc_feature (3556)..(3558): n is a, c, g, or t
  misc_feature (3560)..(3560): n is a, c, g, or t
  misc_feature (3562)..(3563): n is a, c, g, or t
  misc_feature (3565)..(3565): n is a, c, g, or t
  misc_feature (3571)..(3571): n is a, c, g, or t
  misc_feature (3578)..(3579): n is a, c, g, or t
  misc_feature (3581)..(3582): n is a, c, g, or t
  misc_feature (3586)..(3586): n is a, c, g, or t
  misc_feature (3594)..(3594): n is a, c, g, or t
  misc_feature (3596)..(3598): n is a, c, g, or t
  misc_feature (3600)..(3600): n is a, c, g, or t
  misc_feature (3604)..(3605): n is a, c, g, or t
  misc_feature (3610)..(3610): n is a, c, g, or t
  misc_feature (3616)..(3618): n is a, c, g, or t
  misc_feature (3620)..(3624): n is a, c, g, or t
  misc_feature (3626)..(3626): n is a, c, g, or t
  misc_feature (3628)..(3631): n is a, c, g, or t
  misc_feature (3633)..(3634): n is a, c, g, or t
  misc_feature (3639)..(3641): n is a, c, g, or t
  misc_feature (3649)..(3649): n is a, c, g, or t
  misc_feature (3655)..(3655): n is a, c, g, or t
  misc_feature (3660)..(3660): n is a, c, g, or t
  misc_feature (3662)..(3663): n is a, c, g, or t
  misc_feature (3665)..(3665): n is a, c, g, or t
  misc_feature (3667)..(3667): n is a, c, g, or t
  misc_feature (3669)..(3669): n is a, c, g, or t
  misc_feature (3672)..(3672): n is a, c, g, or t
  misc_feature (3674)..(3677): n is a, c, g, or t
  misc_feature (3679)..(3684): n is a, c, g, or t
  misc_feature (3687)..(3687): n is a, c, g, or t
  misc_feature (3689)..(3690): n is a, c, g, or t
  misc_feature (3692)..(3692): n is a, c, g, or t
  misc_feature (3696)..(3701): n is a, c, g, or t
  misc_feature (3705)..(3706): n is a, c, g, or t
  misc_feature (3709)..(3709): n is a, c, g, or t
  misc_feature (3711)..(3713): n is a, c, g, or t
  misc_feature (3718)..(3727): n is a, c, g, or t
  misc_feature (3729)..(3729): n is a, c, g, or t
  misc_feature (3731)..(3733): n is a, c, g, or t
  misc_feature (3736)..(3744): n is a, c, g, or t
  misc_feature (3746)..(3746): n is a, c, g, or t
  misc_feature (3749)..(3750): n is a, c, g, or t
  misc_feature (3753)..(3754): n is a, c, g, or t
  misc_feature (3756)..(3756): n is a, c, g, or t
  misc_feature (3761)..(3761): n is a, c, g, or t
  misc_feature (3764)..(3764): n is a, c, g, or t
  misc_feature (3766)..(3767): n is a, c, g, or t
  misc_feature (3770)..(3771): n is a, c, g, or t
  misc_feature (3773)..(3774): n is a, c, g, or t
  misc_feature (3777)..(3779): n is a, c, g, or t
  misc_feature (3781)..(3784): n is a, c, g, or t
  misc_feature (3786)..(3786): n is a, c, g, or t
  misc_feature (3788)..(3788): n is a, c, g, or t
  misc_feature (3791)..(3793): n is a, c, g, or t
  misc_feature (3795)..(3796): n is a, c, g, or t
  misc_feature (3798)..(3800): n is a, c, g, or t
  misc_feature (3802)..(3805): n is a, c, g, or t
  misc_feature (3809)..(3809): n is a, c, g, or t
  misc_feature (3811)..(3812): n is a, c, g, or t
  misc_feature (3814)..(3814): n is a, c, g, or t
  misc_feature (3816)..(3817): n is a, c, g, or t
  misc_feature (3819)..(3819): n is a, c, g, or t
  misc_feature (3821)..(3822): n is a, c, g, or t
  misc_feature (3825)..(3829): n is a, c, g, or t
  misc_feature (3834)..(3835): n is a, c, g, or t
  misc_feature (3837)..(3839): n is a, c, g, or t
  misc_feature (3841)..(3842): n is a, c, g, or t
  misc_feature (3845)..(3847): n is a, c, g, or t
  misc_feature (3850)..(3851): n is a, c, g, or t
  misc_feature (3855)..(3855): n is a, c, g, or t
  misc_feature (3857)..(3863): n is a, c, g, or t
  misc_feature (3866)..(3870): n is a, c, g, or t
  misc_feature (3873)..(3874): n is a, c, g, or t
  misc_feature (3876)..(3877): n is a, c, g, or t
  misc_feature (3879)..(3881): n is a, c, g, or t
  misc_feature (3885)..(3887): n is a, c, g, or t
  misc_feature (3889)..(3889): n is a, c, g, or t
  misc_feature (3892)..(3892): n is a, c, g, or t
  misc_feature (3894)..(3894): n is a, c, g, or t
  misc_feature (3896)..(3901): n is a, c, g, or t
  misc_feature (3904)..(3904): n is a, c, g, or t
  misc_feature (3906)..(3906): n is a, c, g, or t
  misc_feature (3909)..(3913): n is a, c, g, or t
  misc_feature (3915)..(3918): n is a, c, g, or t
  misc_feature (3923)..(3923): n is a, c, g, or t
  misc_feature (3926)..(3926): n is a, c, g, or t
  misc_feature (3928)..(3929): n is a, c, g, or t
  misc_feature (3932)..(3935): n is a, c, g, or t
  misc_feature (3937)..(3940): n is a, c, g, or t
  misc_feature (3942)..(3942): n is a, c, g, or t
  misc_feature (3944)..(3945): n is a, c, g, or t
  misc_feature (3947)..(3952): n is a, c, g, or t
  misc_feature (3957)..(3961): n is a, c, g, or t
  misc_feature (3965)..(3965): n is a, c, g, or t
  misc_feature (3968)..(3968): n is a, c, g, or t
  misc_feature (3971)..(3971): n is a, c, g, or t
  misc_feature (3974)..(3974): n is a, c, g, or t
  misc_feature (3979)..(3979): n is a, c, g, or t
  misc_feature (3988)..(3988): n is a, c, g, or t
  misc_feature (3990)..(3990): n is a, c, g, or t
  misc_feature (3996)..(3999): n is a, c, g, or t
atcngagtgccctaacagttcctgcacatcntttggngcngctccntttgnnagnaggttgcttgtgtaggtgtgtcgcaactggtgnaaatgnaannnntcaaatccntccagnntntnngcaannnnncngcanncaatncnnanngtgcttggcagttccanacntccntccggtctnangcagacaaagganatttccttntaatctncnggnanntnntcngttccgtccagatgatannantcatantanactctgtttttgtcntntncttcnntgtagnanttnnngtggtaaagttcnccntactgcatncggnttttaagntgttnntttcnggcnntnnnnagnatntcngncagngtatcnccaaaatcaacaatccttacnttntttcgnttggtnggtccgatgatnttnttntgnnttgnnccatcatancggatactncntntnatngtnaggcantgttcttcaagattnanntcctgccatgncannccncanncttcaccgatacgaagtccngcatantangcnatctggattggnagnattgcnggtggattntnnncntnnagnnattcnatcagtctntcataatcntcnngngnaatnggctgtatnncnncntcnanntcatcatcnganaananntcnacntcntcngnctgntntttcagcttaatatactgcatnggattnaaagtnatnnantgntttggnnatactgcaaaccggaangnctgntgtaatactgcnganaangaangnatgtaatctttgctntanccttttcttnctnnnccatctgganannnnccaccnaangnaagcagatcgannaangcntgtaaatgntcagnngtnacnnttttnaanttncnntctgnaatnggatgnttcttgatnnnnnnnatngcaccnagntaattntnnactgtnccattnctgagngtnccgnnntttanttcttcntcngcccanatatcaagnanttctccnacngtaanattntcngnctttgcnannaatttcttgctttcgtaatcntccattgcctgacggagcagtttttccgtttcacttttactttctgttccagcgtattctttctgaaccagattgccgcttgcatcttctacatagaagcggtagtaccatttctttcctttttttcttacagatccttttgccataatcgtgtgtctcctttcgatatcagacaatcggaactgatgaaatgcttcttgcgtgtaagtatatcataactccggttgtcgttctataccgaatcggaatcctcatacaaaacttctgataaaagattttcaagcctttgttctgccatttccggtttcttggaataaagccttacgatatctgccatgtcgttaaaggcattaacagtgtgggtgatctcccggagaaacataatctcgttatattcatcattcgattcaaaccccattacttttgcaatatcagcttcattcgtgttgcccttgtaattcttgcaggcaaactggaatgattccagaaacaggttatattgctttaacatcaacagcagtaaatctttggaaaaagcatcttcctttttactaaggtcgagaggtaactgtttgagaatatcgcccattgcatcacgaatctgtaattctttcttatccgtaatatcggtttcgtattcatcggtttcccctctgagccattcaatagatacatgaagtgcttccgaaagaccttccagcaccatctttttggtattgtcaatcgaaccattctcataacgcaggattgtggaagcggtaactcccatcttctctgcaacataaggctgtgtcagatttaattccagacgacgctgttttgccctgctgcctatcagcttgcgtagttctttatctttcatgctgattgcctcctttttcggtatgtatgaattatagcatgtacctcacataattgcaatatgcaatataataattatttttaaaatttcataacgcttgacaacacaatataaaaccgctatactaacagcacaacaaaaattgcataatgcaattnataaggaggtgacaagatgacggaaagaaagattgcattatccatcgaggaagcagccgactatacaggaattggcagaaacactttgagaaagctggttgaatggaagaagcttccggtattaaaagtcggaagaaaagtccttattaaaactgacattctggaaaagttcatggaagccaacgaggggcgagatctgagggataaaggaaatgtaaaagctgtcacaagaaatgtggcaacttaaaaaggcggcttcctacgaaaccgccaaaggttctatcagaccgaagccatgatatacctacacgcaagaggattataccatgtgcttctcctgatatgcaaccgggaactgttgtttatcnnannnanaaannatnnanangatanggcgnannnancanngacttnnnnnnaaannanangtnnntnagngaannngnnnnnnnnnnnnnnnnaannnanaanaaagcnnantnnanagnnnaangaanngnanaaganaaannnancanannaanntaaaanannaannnannnnnncnnncagatnggagnagngntnnnannngntnttggctgtccgattgaggaggaagatttaccaaagttgataggcttcttaaaaaggcaggaaacaaacggaaagtttttctcaaangcgatgcagaaagagnnacttacagatatggaggaagtgtaatggcggagggagtggnttttccattcccttcattgcctttgaatgaagggcgcacttatggacaaccagaggtcgtccttataagtttgccacaagtggcaaccggtctgcgcttacgcttgccgggctngttccgtcggcggggctttcagncagacntgctcangcngcaggngncantcttncnnagnnngngntnnnannnntncncnnctnnnnaaccngnnnnngntncngncggnnnnnnnngnnggntnngncngnnannnngnntnnnntnntnnngntnnnnnannntnnngtnnngatngtnggnngcantaangnaaaatctgtcatatcngnatnngcanatnttanngnagangtgangaanaatnagnaannaggcannatcanntactatacttccanaaagnaagtngnntacacnagnnnnatgatgtgcnaaantgcacctcctnaanggcnnnangtaccggannaaaatnnaaaaaggntncaacagnctancngttataananannggannataaanannccncnntgnaaaagttnaaaatnacatttnngnaacagcgnntatggaatnaggnnntgaagatanaanaaaatgnnnnnnnanagcttngacgnncanntgaantttcnntgccgaaagaatngagcaganaggaanagnttgattatacaaccgantatattnaaaagactttcgtgnannagggaatgngtgnnnantngagcntacacgatnannnngatggnaacnnncntnngnatttanttgtaannanncgancattcaancnnnancatnnatggngcagcnnngnnnnnangnnnngnnatttnnncagagatnctgacngaaananngngntngangnnnncnnnnnngantnntngcannnnnngaannatncnnnccggnnnnnnnnnngnannncgnnnnnnnnngnaannggnntncaganagncnnggnnannaannnannnnantngannngnntnnngnnnnatgntnncngnngnannaannnnnagaanngnnngnnatnnnganncgantnnnnnnngannnnnaanngnnannnatcnnnanacnancnnnnnnacnancgnnnnnannnnagacnggncnnatnnnnannnncnannannnnnnagggnnnnnatgnaanaangantgagnaaaaatatntnaccggnnnna

SEQ ID NO: 963 - DNA, 4000 bp, Escherichia coli
  misc_feature (1231)..(1231): n is a, c, g, or t
  misc_feature (2350)..(2350): n is a, c, g, or t
  misc_feature (2365)..(2365): n is a, c, g, or t
  misc_feature (2371)..(2371): n is a, c, g, or t
  misc_feature (2381)..(2381): n is a, c, g, or t
  misc_feature (2437)..(2437): n is a, c, g, or t
  misc_feature (2443)..(2443): n is a, c, g, or t
  misc_feature (2472)..(2472): n is a, c, g, or t
  misc_feature (2609)..(2609): n is a, c, g, or t
  misc_feature (2639)..(2639): n is a, c, g, or t
  misc_feature (2656)..(2656): n is a, c, g, or t
  misc_feature (2738)..(2738): n is a, c, g, or t
  misc_feature (2771)..(2771): n is a, c, g, or t
  misc_feature (3302)..(3302): n is a, c, g, or t
  misc_feature (3340)..(3340): n is a, c, g, or t
  misc_feature (3396)..(3396): n is a, c, g, or t
  misc_feature (3401)..(3401): n is a, c, g, or t
  misc_feature (3500)..(3500): n is a, c, g, or t
  misc_feature (3517)..(3517): n is a, c, g, or t
  misc_feature (3530)..(3530): n is a, c, g, or t
  misc_feature (3666)..(3666): n is a, c, g, or t
  misc_feature (3672)..(3672): n is a, c, g, or t
  misc_feature (3762)..(3762): n is a, c, g, or t
  misc_feature (3780)..(3780): n is a, c, g, or t
  misc_feature (3792)..(3792): n is a, c, g, or t
  misc_feature (3796)..(3796): n is a, c, g, or t
atcgtggagatgagccccatggtccagtacgtcgatgccgggaagcccggaaaccgcgccgggtagtatgcgtccgcgagagaccacgccagcacccagagggcgatgaaccaggtgtagttcgcgccgatgggaatgcccaggatgcgtccaagccggatcgccccgcgcatgagtcggtactcgagttcctcgcaggcaggcccccaccctgcgcggtaccacaggaggtcaccgctaggcagcgaaggagaggacgtcatctggagggctgctgatgttccgtctcctcccgaaagaagagacgttttttgagttactgaatcaggcggcccagaacgtcttgcaggccgcgcggttgctgaagcagtttctcgacgattaccgggatgtcgagcggaaagctgaggagatcaaggcggtggaggagaagggtgacgagctcacccatgcgatcatcgaccgcctgaaccggacgttcatcaccccgttcgatcgcgaagatatcttcacgctcgccaagtcactcgatgatgtcctggactggatcgaggcgtcgtccgcccggatggccgtgtataagatcccgcacgctaccagcgaggccgccgaattgggccatattgttgtcagcgagtgcgaggcggtcgtggaggccatcgccagcctccgcaacctggatcgcctggccggccccctgcgcgagatcaaccgcctggagaatctggccgaccacgtgcagcgcgacgccatcgccaagctgttcagcagcaacggtaacccgatcgaggtgatgaagtggaaggagatctacgaaacgctcgaggaggccacggatcaaggtgagcatgtggcccacgtcctggagggtatttacgccaagcataagtagccgggcctgctagtctcggcgatgcccccgctggctgtgcacttcgtctcgctgatcatcctggttgcgctggcattcgatttcatcaacgggtttcacgacgccgcgaactcgattgccaccgtcgtctccacccgcgtgctgtcgcctcgggtagcggtggtatgggccgccttcttcaacttcgtggccgccttcgggcttggcgtgcacgtggccaccaccatcggcaagggggtcgtcgatcccgcggccatgaccaacctggtggtggtcgccgcgctggccggggcgatcgtctgggatctgattacctggtactacgggctgccggtgtcntcgtcccacgccctaatcggggggctggtcggtgcggcgctcgccgccgccggcgcccgcgtgctggtgtggtcgggtatccagaagatcgtgatcttcattgtgctctcgcccgtggtcgggatgctcttgggtttcctgttcatggtcgcggtgatgtggatcgcgcggaacgccacccccatgcgcgtggaccgggtcttccggcggctgcagctcctctcggcggcactgtacagcctggggcacggcaccaacgacgctcagaaaacgatgggcgtgatcgccgtgctgctgtttaccaacgggcttctggggcccacgttctatgtgccgcgctgggtcatcctggccgcgcacgcggccatcgccgccggcaccctcgccggtgggtggcggattgtgaagaccatggggatgcggatcaccaaactgcagccggtgggcggcttctgcgcggaagcggccgcggcgatctccatcctgggagcgtcattcggaggcgtccccgtgtcgaccacccacacgatctccggggcaatcatgggcgtgggcgcgacgcggcggctctccgcggtccggtggggggtggcgacgcggatcgtgtgggcctggatcctgaccatcccggcttccgcgctcgtggccaccctgacctattgggggctggcttctttcttccggtaaccgagagctgcgcggcgcggtataatccctgtggcggaataccggctcccgggggagcgttctacttggcggaaggttgatacgtcgcgaggaggttggggtatgggcaaggcgctccacgtgaacgagaaggaattcgacacccaggtgctccaggcggagcagccggtgctggtcgatttctgggcggagtggtgcggcccgtgccggatgatcgcgccgattatcgaggacctggcggtcgagtacgatggcaaggccaaggtcgtcaaggtcgacgtggatgagaatcccggcgtggccaaccgctacgggatcatgagcattccgacgctcggaatcttcaagggcggcgagatggtcgaccgtctggtcgggtacctgcccaagccggagctgaagaagcggctggagaagattctggcgacggcnaaagtcagctaaggngaatcnccggaaaccnggaagcggggaaacgcggaaacgcgaatccccgcttcgatttttcgcctgatgcanttgttnccgcgcttccgcgttgccgcgcttccgtnagttcccttgttgctgcagccaccgttccgcgtcgatcgccgcctcgcacccgtagccggccgccgtgacggcctgccggtaggtatggtcgtggacgtcgccggcggcaaagacgccctccacgctggtcgccgancggcgcgtgcggatgatgtatccgttgtcntcgatcgccagctggcngcggaacaggtcggtgttcggcttgtggccgatggcgacaaacacgccgtcggtgggccgttccacgacgcggtcggtgcgnagctcccgtagcttcacgccgctgaccttcccntcgccgacgatgtccgcgacggtgtggctccagacgaaactgatcttgggattgtccatcgcacgctgctgcaggatcttgctggcccgcagctggtcgcggcggtgcaccaccgtcaccgatttggcgagcttggatagatacagcgcctcttccatggccgtgtcgccgccgccgaccacgatcacattgcggtcgcggaagaaaaagccgtcgcacgtggcgcacgtgctgaccccgcggcccatcagccgttgctcgccgggcaggccaagcagtttggctttggcgccggtggcgatgatcaaggcgttcgcctcgtacgtatctccgctctgactggtgatgcggaacgggcgacgcgacagatcgacctggatcgcatcctcgctgatgaactcggcgcctacgcgctgcgcctgcgcccgcatgttggcgatgagatccggacccaggatcggatcggcgaaccccggatagttctcaacctcggtggtgagcatcagctggccgccggcctccgcgccttcnaagacgaggggactcagacccgcccgggtggtgtaganggcggcggtgagcccggccggaccagaccccaagacgatgacgctacgcatagcantcatncatgtccaaacgtgttgcgatggcatgctattccgcgccgccgggctcccaccctctcggtatgacaatgatggtgtcaagatacttgacaacatccgntccgatgagtacgctanggaatgctcaggnagggtggtgaaaccgggtgcgaagtcgccgagacgatctgccagtctatgtgatcagcgtggccgcggacctgctcggcctgcacccccggacgctgcggatctacgaagagaaggggctggtgcagcccgcgcgncgcaancatcagcggctgtactcggagcgcgacctcgagcgggtgcggatgatccgccgcatgacccaggagatggggctgaatctggccggggtncgcgtgctgatggaaatncatgaacggatngagntacggggatcgaaagatgcggtgtcgtgggtatttgaacgcacggtgcgaaggaggcgagtaccatgagcatcatccggtgggatccgtttgacgacctcgcgtctctgcgcgagtcgatggacaagctgtttgaggacttcttcacccgccgcccgcggggggaggcggtgacggcgtggcagccggcggtcgagatgttcga

SEQ ID NO: 964 - DNA, 4000 bp, Escherichia coli
  misc_feature (477)..(477): n is a, c, g, or t
  misc_feature (597)..(597): n is a, c, g, or t
  misc_feature (756)..(756): n is a, c, g, or t
  misc_feature (882)..(882): n is a, c, g, or t
  misc_feature (1242)..(1242): n is a, c, g, or t
  misc_feature (1254)..(1254): n is a, c, g, or t
  misc_feature (1368)..(1368): n is a, c, g, or t
  misc_feature (1392)..(1392): n is a, c, g, or t
  misc_feature (1434)..(1434): n is a, c, g, or t
  misc_feature (1632)..(1632): n is a, c, g, or t
  misc_feature (1665)..(1665): n is a, c, g, or t
  misc_feature (1857)..(1857): n is a, c, g, or t
  misc_feature (1888)..(1888): n is a, c, g, or t
  misc_feature (1938)..(1938): n is a, c, g, or t
  misc_feature (1987)..(1987): n is a, c, g, or t
  misc_feature (1992)..(1992): n is a, c, g, or t
  misc_feature (2192)..(2192): n is a, c, g, or t
  misc_feature (3245)..(3245): n is a, c, g, or t
  misc_feature (3311)..(3311): n is a, c, g, or t
  misc_feature (3473)..(3473): n is a, c, g, or t
  misc_feature (3725)..(3725): n is a, c, g, or t
  misc_feature (3892)..(3892): n is a, c, g, or t
  misc_feature (3959)..(3959): n is a, c, g, or t
gccctgatggtcatcaacgcccagtatggcgtcgaggtgggcaccatcaaccagttccgctacaccgaacagtttcacaagcccgtcatcttcgtcgtcaaccagctggacaacgacaaggccgacttcgacaacaccgtccatcagctccgcgaaaactacggcgccaaagccgtgcagatccagtatccggtgcagaccggggccgcgtttaacgccgtggtggacgtgctgaagatgaaaatgtatcgctggaagccggagggcggcaagccagacgtgctcgacatccccgccgaggagttggacaaggccaccgagctccacaaggcgctcgtcgaagccgccgccgagcatgacgacacgctgatggagaagttcttcgaagagggcaccctctccgaggacgacatgcgcgcaggcatccgcgcaggcctcgtcagccgcggtatgttccccattttctgcgtttgcgcngggaaggacatgtgcgtgcgccgcacactggagttcctcggcaacgtcgtcccctgtaccgacaaaatgccgcgccccgtcaccacggaaggtatcgaagtcacggccgatcccgcgggnccgaccagcctcttcttcttcaagaccaccatcgagccgcacatcgggcaggtgtcttacttcaaggtcgtttcgggcaaagtcaaggtgggcgatgatctcaccaacgccgaccgtgggtcgaaggagcgcatcgcacaactcttcgccgtcgacggncagatccgcagcgaagtcagcgagatggaagcgggcgacatcggcgccacggtcaagctcaaagacgtccgccgcggcaacaccctcaatggcaaaggctgcgagtatcgcttcgacttcatcaantacccggagcccaaattccgccgcgccatcaagccggtcaacgaggccgacgccgagaagctgagcgagatcctctcccgcatgcacgaggaggacccgacgtggatcgtcgaacagtccaaagaactgaagcagaccatcgtctcaggtcaaggcgagttccacctccgcaccctcaagtggcgcatcgagaacaacgacaagctggccatcgagttcctcgagcctaaaatcccctaccgcgagacgatcaccaagtccgcccgggctgactatcgccacaagaaacagtctggcggcgccggacagtttggcgaggtgcacctcatcatcgagccctactacgagggcatgccagcncccggcacctancgcttcggcggccaagagtatcgcatgaacgtccgcgacacgcaggtttacgacctcgagtggggcggcaaactcgtcttcgtcaactgcatcgtaggcggcgccatcgatgcncgcttcctcccggccatcctcaangggatcatgggccgcatggagcagggtccgctgaccggctcntacgcccgcgatgtccgcgtctgcgtctatgacggtaagatgcaccccgtggacagcaacgaaatctccttcatgctggccggacgcaacgccttcagcaccgccttccgcgatgctgcgccgaagatcctcgagccgatctacgacatcgaagtgctcgtccccggcgactacttgggcgacgtgatgagcgacctncagggccgtcgtgccctgatcatgggcatgaanagcgagcgcggctgtgagaaattgatggccaaggtgccgctcaaagagatgtccagctactctacctcgctgagctccatcaccggaggccgcgcctcgttcacaatgaagttctccggctacgagctcgtccccaccgacgtgcaggagaagctgctcaaagagtacgccgctacgcagaccgaggagtanccctcccccatccgcgtcgtccgatcgcacngatcaacgtgaagaaggcaccccgcaacgggtgccttttttcgttccccnctcccccaacggtagccactttggaataagatttgccgaaagctccagngcccnatgcagcgaacccgctgccgtttccctctcattattgcaccataaacattcagataatgacgccctgcattcaaatcaaacgcgtttacgaggctgccgatcccgctgacggctttcgcattttagtcgaccggctgtggccgcgcggtattcgtaaagacgccctgccctacgacctctggcccaaagatctcaccccnagccctgcactccgccgttggtttcacgaagatcccgacggacgttgggctgaatttagccagcgctaccggtcagagctcgccaccgcccccagcgtggacgaagtgatcagccgcatacggccatacgacaccgtcacgctgctctccgccgctaaggcgacagaccacaaccacgcgctcattctgcgcgactttttgacccagaggatgggctaaaacgtggccagccgaaagcgttcgggttgttaaagtatatcggcctgcaaaaccgccctccgaaagatgcgtacgtttgtctctcgtaaggaatcaacggtttagcagccacttaaacttcagcaatgtaccccgtcaaacggggacaaaaaccacacattaatcaacgaggagattacgatgatgaaaacgatgaaatcagtctacctgaccagcctcttgctgctcgcggccatcagcgccacggcccaagaggactactacgacgacgtgtatttctccacaaagagcaaaaagagagaacgcacggacgaacgacgcatgtcggcctctgaccggcccgcgtcgcgccagcgctacgatcgggatcgcgacaacttcgacagcgatcgcgatgtggatgcctacaaccgccgctacaccgacagctcgacggcggattataacgactacgaccgtgacgctcgcgacgacaaccgcaaggccaaggcgagcgaacgccgcggcgacaatgagtactccgaacgcatcattcgctaccattccccaagcaaaatcaccatcaccggcgccgacaacgtcgatctcaatcttagcgacggatactactcctacagctacgataccgactactccggcggccgcaccaacgtgaatatcaacgtaaacgtcggcaacggctgggacgcttggtattcgtggtacgacccgtggttttacggcggattctactcgccctggcgatcagcctggcgctggcgcaacgcctactgggggtggagcttcggctgggggggattctacgccagctggtatgacccctggtacgacccntggtacagcggctggagcggatattatggcggctactgggggtatcgctgcgccgactattactanccctactcgtccacaaccaacaactactattacggttgggacaacggaaaccgtgacacccgccgcgactactcatcgcgatcgaccacctaccgcagctcttctgacggcggcaactacagcgacgtctattccacgcgctcgacctccacacgttcgtcntccgacggatacacccggagcggccgcgacgcctcgagccgaagctccagctacagccgcacggcggacgacatctacagcagccgcagctcatcctcccgcagctcatccagctacgacggcagcagcacgcgctcttcctcgcgcagctccgacagctattacgacggcggcagctcacgatcctcgtcccgcagctcgtccggcggatactacgacggcggcagcaacggctcctcctcacgcagctcntcagtgtacgaaggcagcagtcgcagcgcctcgtcacggagctcatccggaggctattacgacggcggcagcagtcgttcgtccagcatctacagcggcagcagcacccgttcgtcgggctcgtacaacggcagcagcacccgctcctccggctcctatagcggcancagctcacgctccagcagctacgacaacagctacggcagttcgcgctcgagtagctccagcagcttnggtggaagcagcacacgctccagcagttcgggcagcttcgg

SEQ ID NO: 965 - DNA, 4000 bp, Escherichia coli
  misc_feature (527)..(527): n is a, c, g, or t
  misc_feature (574)..(574): n is a, c, g, or t
  misc_feature (581)..(581): n is a, c, g, or t
  misc_feature (583)..(583): n is a, c, g, or t
  misc_feature (1984)..(1984): n is a, c, g, or t
  misc_feature (1988)..(1988): n is a, c, g, or t
  misc_feature (2668)..(2668): n is a, c, g, or t
  misc_feature (2707)..(2707): n is a, c, g, or t
  misc_feature (2738)..(2738): n is a, c, g, or t
ggccgccgggcacttgaaggtcgtaggtgttgcgacccgagacggtagagccatgaaccaacaacaagacgggtttgggtgcctcgcctgtttggggctcggaggcgcgcttgcgatacacatacaggcgaacatcttcgcgcgttacttcatagtcttgagtccaaatcacggggtactgccttgggaaaaagttaaaaaaaagacaagccaaagactagcattgacttgtctggtgatgaacgcgaataaaccctagacggtcagagcattggtgccaactttagtgagtaattctcatgagctttggcaaaaccgatgttcatttgctgatggtaaaagcgtccacttctttgccatcggccgtgacttgcttcactttgagagtttgttgatcaacgtccacaatggtcagggagtgcacgttggacacaaaccttttggtaaatggttgccatgagtctggggcatcgtgttgatcaacgtcgtacagctcttttccgcccgcgcccgtgaccacatagatnacgccttcggggcgtgtgtttgtgatgccatcaaattttttgtccanggtccancngccattcaccacacggccgcgaatgacggtgttgtctttgccgccaaccaacaaagtgccattgcggcccttgctggatttaaaagtcatcggatagctgcgttggtagttgtgcaggtgaccattcaataccatgtctactttgccagcttcaaaaacaggtgctaataagcgcatgtgttgctgttcaaggtgctcgttggaagagttgaagccagggtggtgaaaggtcacgatgtgccatgtggcatttttggactgcgccaagtctttggccacccagtcttgcaattctttgtttgtccagtcgacataggggttggagtcgaggacggtccaatgcgtgttgccgtagtcgaatgaataattggccatgcgcgggtaggcgtcgcctgcggcttcgacaaactggcgacgattggtttcgttggccaagaggcgcggcacgatcgggccaccttcagggccattggggccattcaggggctggttccaaaaatagaaataagccaagccatctggaaagcgattgatgtcgcggttgtcgatgtcgtggttaccgggtaccgtgaacatgggcacacttcgcatcaagggcacaccttcagcggtggctgtttctgcgttgtagatgggccaaaagtttttgtcgtattctttgatcaagccatattcataaacgatatcgccgggcaccaccaccaaatcaggcttggcgatccatgcacgttcggccatttgtttttgtcccagtgtgcctgcgcccacatcggcaaaggccacaaagcgataggcctgagcaggcgttttgggtgcgatggcttctgattgaaataccaagttgccatctttcaacaagcggtattcaaactttttgcctggctcaagttgcgccagtgtgctgttcaaaataagtcggggggccacgccggccacactgatgcgtgtgctctttgcgggttctgccgtcagccagggtgaggtcggggagaggcgcagctgtacaagccatgaagcggcttcgtcggcggtgtgccacatgaggctcaaagaagtggggctcgggttgcggccgatttgtaaatagggtttgacaacaaacgcagtggcttgattcgtttgtgcctgtgtgaaggagggccacacacccaaggatgcagcgagtgccaaggacaatgacaacgacaaagtgaaagatgcaaatttgaatttcatggggcaagtgttgttgtgggggagtgcgaaatgaagggtgacgatgtctctagatgagccaaggaggcctgatggtttcaacaacttatttaagtttgatgacagcgccgcaaaattcgatgagcgcgtgaaaattagtgttaaccctattttttgtcatattttcgtcaccatatttccctaaantaantgaggtttttaaattcattgtgctttcaaatcaagtcaaccatgtttcacaacaacaactcaatcattcaaaaaatgaacaccttgtccacccccaagcttcaaaaaatcgccttcttggtttcagttgcagttctctcctttgccaacacacccttggccatggcgcaagccaaagactcggtagatttgggcaccattggcgccaccactgcagcaggtgcatttcgaccagaagatgccatcaagggcacagccactgccgtagcgcctacccaagccagcttgcaagccactcagcctcagtccatcattacccgtgagttcatggacttgtctgtagcgcccaccgccgaatacacccgcatcgtgaacatctctcccagcttgtctggcgactctgccaacggccctggtttgagcgaaacaaaaattaccatgcgcggcttgcccgatggttactacaacgtcacatttgatggcattccttggggcgacaccaacaaccccacacaccactccacctctttcttcccagccgccatcattggtggtgccgtggtggaacgtggacccggcaaggccagcgatttgggctacgccaccttcggcggctctatcaacttgtactccaaaaagccttcagccgaacaaatttcaagcgtggccgctacggtcggnacatggaacaccagcctgctcacctatgcatttgaaagnggccgcttggccagcatgggcgatgccacantgcaactcaatgtgcagcacatgtcttccgacggctatctctccaacagccccgtcaagggcgacaacctgacggttaagtttgagcgccccgtgggtgattcatccttgctcaccgcttttgcctcgatcaacaaaaacaattatttccaatcggacaccagcaaaggtgtcaccctttctcaagctgcagcgtttggtaaaaatttccaactggacaacgaccccaccagcatgaactacaaaggctacgcctcagcctttaaaaacacagattttgattacttgcgtttgcgcaccgactggggcaatggttggaacaccgacaacagtttgtacacatttgcttacgagaacaacaccctgtccaccatggtgggttcttggactggtaccttaccggtgactgccgacccacgtcgcacctccaccactgcttgggtaaagggttacatggccgccacttacaacggccacattcctggctacgacaagctgaaccaataccgggtcacgggtgacagcttcaaggccaccaagaaaactgaagaaggcttgttgcgtttgggtgtttgggtcgaaaaggcggataccaatcgccataactacgacctggacttgaccaccatgcaacccaaccgcgtggaaggctctgcggccaacgctgctttgttgcccggctcgacacgtcctttggacagcgtgagctatgaccaaaagtcaaacatcgattcagtgcagtccttcattgaatacgaatgggctgccagcaaaggcctgaccatcacaccgggtgtgaagtatgtgcacattacgcgttctgtgaacgccaacgtgcaagccaccacacgcgttgaagatcactcctctttaacctaccccgacatgttgcctttcctgaccgtgaatcagaaaatcaatgacaacatggccgcttatgcgcaatacgccaagggcttcctgatccccgacttgaatacgttctacatcaagaacgctgcagctaacagcaccgacccccagaaaaccaccaactaccaagctggtttggtgagccagtctgacaccttcacttgggacgtcgatctgtatcgcatcgacttcaccaacaagtctgtgtccgtcagtgtcaatggtgtggccgatcactttgtcaatgtgggcggcgtgcagtacaaaggtgttgaaggtcaaatgacttatgtgttgggcaatggctttgcagcttatgccaatggttcttacaacaaggccatcgtcaac

SEQ ID NO: 966 - DNA, 4000 bp, Escherichia coli
  misc_feature (1)..(2): n is a, c, g, or t
  misc_feature (11)..(12): n is a, c, g, or t
  misc_feature (18)..(21): n is a, c, g, or t
  misc_feature (24)..(24): n is a, c, g, or t
  misc_feature (29)..(29): n is a, c, g, or t
  misc_feature (31)..(32): n is a, c, g, or t
  misc_feature (37)..(37): n is a, c, g, or t
  misc_feature (50)..(50): n is a, c, g, or t
  misc_feature (53)..(59): n is a, c, g, or t
  misc_feature (61)..(61): n is a, c, g, or t
  misc_feature (65)..(65): n is a, c, g, or t
  misc_feature (71)..(71): n is a, c, g, or t
  misc_feature (78)..(83): n is a, c, g, or t
  misc_feature (86)..(88): n is a, c, g, or t
  misc_feature (91)..(91): n is a, c, g, or t
  misc_feature (94)..(94): n is a, c, g, or t
  misc_feature (97)..(98): n is a, c, g, or t
  misc_feature (101)..(101): n is a, c, g, or t
  misc_feature (105)..(105): n is a, c, g, or t
  misc_feature (111)..(112): n is a, c, g, or t
  misc_feature (116)..(116): n is a, c, g, or t
  misc_feature (119)..(122): n is a, c, g, or t
  misc_feature (128)..(130): n is a, c, g, or t
  misc_feature (133)..(136): n is a, c, g, or t
  misc_feature (139)..(145): n is a, c, g, or t
  misc_feature (148)..(151): n is a, c, g, or t
  misc_feature (161)..(161): n is a, c, g, or t
  misc_feature (164)..(166): n is a, c, g, or t
  misc_feature (170)..(170): n is a, c, g, or t
  misc_feature (173)..(176): n is a, c, g, or t
  misc_feature (179)..(179): n is a, c, g, or t
  misc_feature (184)..(184): n is a, c, g, or t
  misc_feature (187)..(187): n is a, c, g, or t
  misc_feature (190)..(192): n is a, c, g, or t
  misc_feature (199)..(201): n is a, c, g, or t
  misc_feature (204)..(205): n is a, c, g, or t
  misc_feature (212)..(214): n is a, c, g, or t
  misc_feature (218)..(218): n is a, c, g, or t
  misc_feature (223)..(227): n is a, c, g, or t
  misc_feature (231)..(233): n is a, c, g, or t
  misc_feature (236)..(241): n is a, c, g, or t
  misc_feature (247)..(248): n is a, c, g, or t
  misc_feature (251)..(251): n is a, c, g, or t
  misc_feature (254)..(255): n is a, c, g, or t
  misc_feature (261)..(264): n is a, c, g, or t
  misc_feature (268)..(273): n is a, c, g, or t
  misc_feature (276)..(277): n is a, c, g, or t
  misc_feature (284)..(284): n is a, c, g, or t
  misc_feature (289)..(289): n is a, c, g, or t
  misc_feature (292)..(295): n is a, c, g, or t
  misc_feature (299)..(300): n is a, c, g, or t
  misc_feature (308)..(312): n is a, c, g, or t
  misc_feature (316)..(320): n is a, c, g, or t
  misc_feature (325)..(328): n is a, c, g, or t
  misc_feature (332)..(332): n is a, c, g, or t
  misc_feature (337)..(339): n is a, c, g, or t
  misc_feature (346)..(347): n is a, c, g, or t
  misc_feature (350)..(359): n is a, c, g, or t
  misc_feature (362)..(366): n is a, c, g, or t
  misc_feature (369)..(370): n is a, c, g, or t
  misc_feature (375)..(378): n is a, c, g, or t
  misc_feature (382)..(390): n is a, c, g, or t
  misc_feature (393)..(393): n is a, c, g, or t
  misc_feature (402)..(402): n is a, c, g, or t
  misc_feature (407)..(407): n is a, c, g, or t
  misc_feature (412)..(412): n is a, c, g, or t
  misc_feature (416)..(420): n is a, c, g, or t
  misc_feature (424)..(425): n is a, c, g, or t
  misc_feature (428)..(432): n is a, c, g, or t
  misc_feature (437)..(439): n is a, c, g, or t
  misc_feature (442)..(442): n is a, c, g, or t
  misc_feature (453)..(453): n is a, c, g, or t
  misc_feature (456)..(460): n is a, c, g, or t
  misc_feature (466)..(471): n is a, c, g, or t
  misc_feature (474)..(476): n is a, c, g, or t
  misc_feature (479)..(485): n is a, c, g, or t
  misc_feature (488)..(490): n is a, c, g, or t
  misc_feature (493)..(495): n is a, c, g, or t
  misc_feature (499)..(499): n is a, c, g, or t
  misc_feature (502)..(502): n is a, c, g, or t
  misc_feature (505)..(507): n is a, c, g, or t
  misc_feature (510)..(517): n is a, c, g, or t
  misc_feature (522)..(523): n is a, c, g, or t
  misc_feature (526)..(528): n is a, c, g, or t
  misc_feature (531)..(545): n is a, c, g, or t
  misc_feature (549)..(551): n is a, c, g, or t
  misc_feature (563)..(565): n is a, c, g, or t
  misc_feature (570)..(570): n is a, c, g, or t
  misc_feature (573)..(573): n is a, c, g, or t
  misc_feature (579)..(584): n is a, c, g, or t
  misc_feature (589)..(593): n is a, c, g, or t
  misc_feature (596)..(596): n is a, c, g, or t
  misc_feature (599)..(601): n is a, c, g, or t
  misc_feature (604)..(604): n is a, c, g, or t
  misc_feature (607)..(607): n is a, c, g, or t
  misc_feature (612)..(612): n is a, c, g, or t
  misc_feature (616)..(618): n is a, c, g, or t
  misc_feature (623)..(623): n is a, c, g, or t
  misc_feature (626)..(632): n is a, c, g, or t
  misc_feature (637)..(637): n is a, c, g, or t
  misc_feature (643)..(643): n is a, c, g, or t
  misc_feature (648)..(648): n is a, c, g, or t
  misc_feature (651)..(657): n is a, c, g, or t
  misc_feature (659)..(661): n is a, c, g, or t
  misc_feature (666)..(675): n is a, c, g, or t
  misc_feature (682)..(686): n is a, c, g, or t
  misc_feature (689)..(700): n is a, c, g, or t
  misc_feature (705)..(705): n is a, c, g, or t
  misc_feature (2008)..(2008): n is a, c, g, or t
  misc_feature (2574)..(2574): n is a, c, g, or t
  misc_feature (2595)..(2595): n is a, c, g, or t
  misc_feature (2608)..(2608): n is a, c, g, or t
  misc_feature (2612)..(2613): n is a, c, g, or t
  misc_feature (2615)..(2615): n is a, c, g, or t
  misc_feature (3000)..(3000): n is a, c, g, or t
nnccaaaaccnnttcccnnnnccnttaangnnaaggnaattggaaaaccnaannnnnnngnaaanaaaaanaaccccnnnnnnaannnggnaanttnnggntttnttaaannaaanaannnntttttnnnccnnnnccnnnnnnnttnnnnttaaaatttnttnnntttnttnnnnaanaaccnttnttnnnggccaannnccnnttttaannnaaanaattnnnnnaaannnttnnnnnnttcccnnaanaannaaaaannnncccnnnnnnggnnttaaggnttttnccnnnnaaannttaatttnnnnngggnnnnnccaannnntttnttttnnnttccaannaannnnnnnnnnttnnnnnccnnaaaannnnaaannnnnnnnnccnggaaaaaanaaaanaaaanaaannnnnaaannaannnnnccttnnnttnttggtttaaanaannnnnaaattnnnnnnccnnnaannnnnnnttnnnttnnnaaanaanaannnccnnnnnnnnttaannttnnnccnnnnnnnnnnnnnnnaaannnaaaattccaaannnttggnttnttaaannnnnnggccnnnnnaanttnnnaanaanttccncccnnnaaaanaannnnnnnccaanaaaaanccttnccnnnnnnngnnnttaannnnnnnnnnaattttnnnnnggnnnnnnnnnnnntttgnataggatactctaattttgttaaaaactgtactataaaaaaagggggccgaaacccccttcttaaattattaaaaagttaattagattttaacttttccaattggtccaaactcattttcataagctagtttgtaattaggctgattcatcagcaagtacttcattactttcttagcgtatgctttttgagagtctaccacttttttgaagaatgcatcttttccagagaattctccaacaactttatcccaaccttttaactgttcagctaaaatagcatcagatgtttggtaaacgttaaccttatgtgtgttcatcaaatcagctaaactgtcagaatatctaacaagtgctttgaagtagttatctgagttagcagcataagcagcgttcttcaagatagcttgatgagcaggtgaaaggctgttcagtctcttcgtgttcataggaatttcaaacatctcttgagattggtggaaacttcctaagtgatagtgtttagagacatcttgcattccaaactgtgagtctgatgttgggttgttaaactcagcagcatcgatcaaaccagttttcattgctggttggatttcaccacctggtaattgtcttacgaccatccccatagcagttaaaacgttagtcgctagaccaactgttctatacttcatacctttaacatcagatactttagttacattctttttgaaccaaccaaaaggttgtgctggcataggcatatgaaagaatccagtgtagttatatccaacactagctactgcttcttcatataattttcttcctccaccatactccatccatcccataacttcttgagatgacattccgtatgaaggaccagttccaaaaagtgaagctgcagcgtttttaccgtaccaatacgcagtcacccagtgacccatatcaacgattccatcgcttaccgccgctccgatttctgaagttttaacaattgcgtttacaggctgaagatcaattttaagtgatccacctgacatatcgctaaccatgttacagtagtcttgcgccatttcaaaaaagatgtttgcgcctgaaggccaagcagcttgcatctttaatacagtagcgtgagatcctgcagttgcaatatttggcattgcaacagttgctgcagctacagcaccagctttagcagcagtcttaaagaacttacgtcttgaagaagttgaattcttcaatgattttttttctttaatcattatttctctctccttgttatttatattagttaattaactattatgattttaagcacaaaanataattagagtctaatgaatactccttagttttgttgtaaagacacttgttatataaggctaattcaatggtacgactattatgactacaactttaaattgcattattttttaaatgttaagcttgcccacaagctaaaccagtctgatttatattttagtttttctatataatttgctttgtccaacttaactgcactcaataaataggttctattttcaaaaatccttatttttcctactccatttgggtttgtttttacaatttccttgtagctattttcttcatctctactgaagatagtaatttgccagttttctagagggttgcccttttcaaatagttgaaactcaaatatctcctcctttaagttatatggtgaagttaaagcaataatctcaaagtctaattttggcttttgaataaaaaaacttttattaccatttgtcattaatgcttttgcaaatcttcgataactctctgtgggcagcttatttttatcaaatttttctaaagtgctttcaaaattttgctcttttaagaaatcttcaaacttttcaatagantcatattttaagaattcatantttgtttcataanttannanatgaaaacctttatctaaaattagtgtttggatggctggaaaatttccatctctttgaggtaaatttattactttatttttgttttctaaatataaattttttttatttggatcatagtaaccaaatggagagccattaaaattttggcctaccttaatatgtatcttggacacttcattattattaaatttaaaattaattggctcaagccataattcgtgggcatgcacattgaactttaaaaaagtagtcaataataatattacaaaaaaatagaaaatctgatttaataagttaatgttttttaaaatatttatatttttattatttttcattaagtcatcttatgctcatgaactacgtccagcaattgcaaatcttaanatttatgaaaaagataatattataaatgctacgctatcaattcgattaaatcttgaggcaataattgctgaagtgaatatggatcactctaacacagaagaatctgaaaagtcaggtcaatatgaaagcttaagaactatgaatgctgatgaattgcttaaaaaatttaattccaaaataagagaccttcaaaacaaaatttacttaacttctgctaattctaattatggcttaactctagtggatgtggacatacccgaggttggcaatactgatataattagagataccgttattaactttgatattaaaaatatcaaagatgaagacttaaaattttcttgggataaaaatttaggatccatcattttaagagttaattctaaaaataatgagggtttatactcaaaactaattgaaagtaatgataaatcagaatggtttagtataacaaacaaaagagaagaaaggcttatagacaatgttaaatcttatactcaattaggttttaagcacataatacctaaaggtttagaccatatattatttgttatcgctttatttcttctctcttcgaagttaaagcctttggtattgcaggtttcaattttcactatagcgcacacaataacattatttcttggtgctttagatgtaataaaaataccctcaataattgttgaacctatcattgctctatcaatttgttttattgctattgagaatctatttactgaaaatataaaaaaaatgagaccctatataatttttatttttggattactccatggcttagggtttgctggggttttaaatgaaattggaatttcagacgggttatttatttcaagtcttatttcttttaatattggagtagaggtaggtcaaattagtgtaatacttttatcttatatttttatctcattattatttcagaataaaccttggtaccgtaatagaattactaggcctctttcattagtaattgcgttgattggct

SEQ ID NO: 967 - DNA, 4000 bp, Escherichia coli
  misc_feature (3044)..(3045): n is a, c, g, or t
  misc_feature (3049)..(3049): n is a, c, g, or t
  misc_feature (3055)..(3056): n is a, c, g, or t
  misc_feature (3061)..(3063): n is a, c, g, or t
  misc_feature (3067)..(3069): n is a, c, g, or t
  misc_feature (3071)..(3071): n is a, c, g, or t
  misc_feature (3073)..(3074): n is a, c, g, or t
  misc_feature (3079)..(3080): n is a, c, g, or t
  misc_feature (3083)..(3083): n is a, c, g, or t
  misc_feature (3085)..(3087): n is a, c, g, or t
  misc_feature (3089)..(3089): n is a, c, g, or t
  misc_feature (3091)..(3093): n is a, c, g, or t
  misc_feature (3095)..(3095): n is a, c, g, or t
  misc_feature (3097)..(3099): n is a, c, g, or t
  misc_feature (3101)..(3104): n is a, c, g, or t
  misc_feature (3107)..(3118): n is a, c, g, or t
  misc_feature (3120)..(3212): n is a, c, g, or t
  misc_feature (3214)..(3268): n is a, c, g, or t
  misc_feature (3270)..(3353): n is a, c, g, or t
  misc_feature (3355)..(3364): n is a, c, g, or t
  misc_feature (3366)..(3370): n is a, c, g, or t
  misc_feature (3372)..(3393): n is a, c, g, or t
  misc_feature (3395)..(3450): n is a, c, g, or t
  misc_feature (3452)..(3459): n is a, c, g, or t
  misc_feature (3461)..(3473): n is a, c, g, or t
  misc_feature (3475)..(3526): n is a, c, g, or t
  misc_feature (3528)..(3598): n is a, c, g, or t
  misc_feature (3600)..(3619): n is a, c, g, or t
  misc_feature (3621)..(3627): n is a, c, g, or t
  misc_feature (3629)..(3633): n is a, c, g, or t
  misc_feature (3635)..(3669): n is a, c, g, or t
  misc_feature (3671)..(3757): n is a, c, g, or t
  misc_feature (3759)..(3768): n is a, c, g, or t
  misc_feature (3770)..(3785): n is a, c, g, or t
  misc_feature (3787)..(3789): n is a, c, g, or t
  misc_feature (3791)..(3806): n is a, c, g, or t
  misc_feature (3808)..(3820): n is a, c, g, or t
  misc_feature (3822)..(3841): n is a, c, g, or t
  misc_feature (3843)..(3922): n is a, c, g, or t
  misc_feature (3924)..(3960): n is a, c, g, or t
  misc_feature (3962)..(3966): n is a, c, g, or t
  misc_feature (3968)..(4000): n is a, c, g, or t
gcccgcgcgcgcgcgcgcgacggttctcgtggcgagtggtgcgagcggaacgagcggaactttttcggattctgacactggcgaagaactaacgccagcgtcgacggagaagatggcgacgatcgcggaagaaacgagcgcggatacattgggagatgtactttctccgagtcagttccgtgcggcgatggatgtcgatgaagatggggtgtcgccgtacgctgcgatgcgcgcgacgttggatgcgcttcgagtgcgcggcgagagagcggaaccgcctgatgcgatggatggtgagtgggttcgcgctcgaacgtcggtgacgaatggaggaacgggtgaagatggtgatgacgtagtttcgtcgtataaagaggtggagaagattgtcggacggggcgcaccgagcgcaatgcgatactcgaaagtaggcgcgcggaacttagccgtcggggatatttctggagggatcatggtgactcgaagcgcgtctagtgacatggaagcggcaagtgcatatgtagataaagcgcacttcgggcgagtcacgagagtggattggaatttgaacgggagtcgactcatcagtggaagcgtaacgggtcaagtgaaaatctggaacgtaagtcacacatccaagtcaacaatgtcaattgagatggacagcgaagtggatgtcgtaaatgaagtgacgacggtaatgttccatcctgtgcacgtagacttggcttttgtgggcttgaaatcgcgtcaagtggtcatcattgatgcctctcttgggatggtcatagaacggctcgcgacgaaaaatatcccgagttgctttgactttaccacaagcgggatgattttatttgtaggggatgatgaaggtcggataaatatagcgagttttgagcctcgaatgaagaagatattatcactgaacccagagagagaagctgcggttgaaaatccactgcatcgcgtcattgccgagcgctcagtgagccaatcggaaagaatagacgcaatcggtactcaacgcggtatgggtacgagtatgactggtgaagaggagacatcttcaacctctaaattgcgttcgaagttcaaaagtatgtttgcgacagcaaaacatatcgttcctcgtccacacattggtgaaatcagaatgggttacaaattaagagcgttaggcgcaatgaacggtccgaaagaaccgtgtgaacttatgcgtatgcgatactgcacgtatcctgaatccatgggtggcccaacgttattcgcattctatgcgaatggtgaaattcgcatatttcgcgctgaaggaacgccattcaaagaactacacctctttacaacttgccgaattgcatcgagacctcaagatgggggtggggtgatttctttcgcgccaggtcaaatgttggagctgccgctcgtatcggcatctcgaggtaatcgtacagcaatttatcttttgccaagtaccccaggtgcgccggttcaggcgacgcaattcacagatgacttcgaaaccaatagtgaagaatctattgatgtcgcgactgtctctgtatggtcacatgagggctcgcacttagccattggatattcgtccggtaaaattagcatttggcagcgccaatagtaacatgcagtagctgcgcatataaattgatcgtataaatacacatcacgcgatgctcaatacttcacaaatttgcacgcaaatttgcacgcactcatgcgctcaggaaaacggatgcacagcaagttatgcgataaaatgcgtgtcatagcactcggagtgtttgttgctcattcgctttccatcgttgatgcgaaaagagagagagcaaattccaataccaccgtggccaataccacctcgacctcgtcaacgaccttctcaacgaaatgcaaatgctcttactctggcttttcatctggaattgacgtcagtaatgagggccgaggttgcttttactcgccgatgcttgacagtgagccgtaccactgctatgtgtcagatgccgaagccaatggttgccaaggtgtatcgccatctacgcggtatcctggtgcattcttgcgagcgtgcaatccactccttgaaactttgacgccatacaacgatatacttccgtttgattcagttacagaggcgttttcatcacgaaaagacctatcactgttttctctcatcgtttcaaccaacaccgattttggagacgtcgtttccaacctcaattggaaccaagactcagatgcggttggaacactttttgttccaacaaatgctgcaatcgagaattttgctcgttttcgtctgatggagtccaatctcacgagcgcaatcaactcggggaacatgtcagacgccctgaaaacgctcatcgttgatggttcatttggacgatacgaatacgaaagcaaaacatttacaacatttgcgtcaacgatgcagacgcgaacacatgtgagaaatttggatgcactaacactctcttatgctgatgcaaagtttcttcaaccgtacattgattcgcggaattggttgacgcgtacgtttgacaagattttccgtcgccgacataattcaaaaattatgtcaaaagtgcacagtgtgccaagcaagcttccgacgaatctcgtcgtggagcgatcgcgtgttatgacaagtggtactgtcgcaaaacctttgaattctatcaaggttgcagtgcaagatttactttttgcacgcaacggcgtggtttttgtcattgatgatgtcgtcgaaccagcatcggacaaggactacgaaattctttcgattgatgagcaaaattaaggcgcgaggtaaagcgtagcgtttgttgtgtttttccttcacacattaaaaatcaacttccaatcccgtctatcgctttgtgcgccccttcgcacaaaaaacgttccaaccccctatgttcctacctactttccctcttccctcttccctcttccctcttccctcttccctcttcctcttcctcttcctcttcctcttcctcttcctcttcctcttcctcttcctnntccncttccnnttccnnntccnnntncnnttccnnttncnnntncnnntncnnntnnnnttnnnnnnnnnnnncnnnnnnnnnnnnnnnnnnnnnnnnnnnnnnnnnnnnnnnnnnnnnnnnnnnnnnnnnnnnnnnnnnnnnnnnnnnnnnnnnnnnnnnnnnnnncnnnnnnnnnnnnnnnnnnnnnnnnnnnnnnnnnnnnnnnnnnnnnnnnnnnnnnncnnnnnnnnnnnnnnnnnnnnnnnnnnnnnnnnnnnnnnnnnnnnnnnnnnnnnnnnnnnnnnnnnnnnnnnnnnnnnnnnnnnncnnnnnnnnnncnnnnncnnnnnnnnnnnnnnnnnnnnnncnnnnnnnnnnnnnnnnnnnnnnnnnnnnnnnnnnnnnnnnnnnnnnnnnnnnnnnnannnnnnnnannnnnnnnnnnnncnnnnnnnnnnnnnnnnnnnnnnnnnnnnnnnnnnnnnnnnnnnnnnnnnnnncnnnnnnnnnnnnnnnnnnnnnnnnnnnnnnnnnnnnnnnnnnnnnnnnnnnnnnnnnnnnnnnnnnnnnnncnnnnnnnnnnnnnnnnnnnngnnnnnnngnnnnnannnnnnnnnnnnnnnnnnnnnnnnnnnnnnnnnnnannnnnnnnnnnnnnnnnnnnnnnnnnnnnnnnnnnnnnnnnnnnnnnnnnnnnnnnnnnnnnnnnnnnnnnnnnnnnnnnnnnnnnngnnnnnnnnnngnnnnnnnnnnnnnnnngnnnannnnnnnnnnnnnnnncnnnnnnnnnnnnncnnnnnnnnnnnnnnnnnnnncnnnnnnnnnnnnnnnnnnnnnnnnnnnnnnnnnnnnnnnnnnnnnnnnnnnnnnnnnnnnnnnnnnnnnnnnnnnnnnnncnnnnnnnnnnnnnnnnnnnnnnnnnnnnnnnnnnnnnannnnngnnnnnnnnnnnnnnnnnnnnnnnnnnnnnnnnn

SEQ ID NO: 968 - DNA, 4000 bp, Escherichia coli
  misc_feature (1403)..(1403): n is a, c, g, or t
  misc_feature (1986)..(1986): n is a, c, g, or t
  misc_feature (2364)..(2364): n is a, c, g, or t
ttcaggatcaggaaagtcgactctattgcactctttagggctacttgaaaagccaacttcgggcgaaataatcattgatggtattaattgtaagcaacttggtagtaagaaacgaacattagtccgcaggaatagtattggtgtagtctatcaatttcatcacttacttaaggaattttcggcgcttgataatgtaataataccacaaatgatttctggaaaaagtattgaggaatcgagtgtagaagctatgagattgctagaaattttaggtttaaaaaatcgattttatcatatgccaggagagctttcaggtggagagcaacaacgagttgccattgctcgtgctatgtcaaataagcccaaaattttacttactgatgagcctacgggtaatctggatccagaaacttctcttattgtatttgataggttattggctttgagtcgtaatgaaaaaatagctgtattagttgcaactcataatatgaatttaataaatcaaatgaacagggttttaactgttcatcagggaaaggttattccatttgtgagtatttaaatttattaaataactataacttagctgatgttattttgagttttcaaaatgtctataaaatattactcctacaataataattgttatgctacctaatgcatttaaaggcgcgttagcggctgccattgcaatcataataaatgttataattaaataaaaagcaggaacaaatggatagccaaaggttttgtatggacgaattaagtccggttctttcctgcgtaaaacaaatacaccaagaattgctaaaaaactatttaatgcaagtatcattcccgcaaaaataatgattttttcaaagcttgatgtaaaaatatatattaatgaaattatggattggaagtaaattgcattttctggaatatctgatttatttactttggacaaaaaactaagagaattgaagtcttcccctattgcttgaagagctcttggtccagctattatcatagcgcttacagttgaaatcaatagcaaggatagcatcaatcctacaattgcagctccatttgaaccaaatatatttacggcagcaatgtaaccaatttctgttttgccttcaaggtctgctattggtgatgagtataagaaggcaatattaagtaataaataaagaaccataacagtggcagttccgatcaaaagaattttaggtagttctttttgaggtctttcaagctcacttgttatgtaaacagcggcattccatcctgtgtaagcataagaaacataaattaaagaaattccaaaagcggtacttgtaagtattttgaaatcatctttttgaggtaaaaatgaaataggttgaggttctggtgtaatagtaaaagcacaaaggcanaagccaattattagaaaaacttttatagatgtaaatccaatttgaaatttaccactaatatttttatttttaacgtgaatgagcgttatgataagaactaaaagacatgcaattattttttttatccaaatgggctgtgagccaaatataattgcagtactataatcactaaatgcaagtgctacggcagcaataggtgctgcgaaaccgataacagttgatatccagcctgatataaaaccagcgagagggtggtatattctaccaaggaagttatattctcctcctgagcgaggtaacgctgaaccaagctcagcatatgttgcagcgccgcataaagctgcaattccaccaactgtccatagcaaaactaaaagaaatgtggattggatgtccattagttggaagccgatagaggtgaaaacacctgttcctatcatatttgcaattattacagaggtagcagcctttttactgtagtatgttctcatgagggcacaatgctttgcagattagccgctgtctataattatttataattgacatatcaaacaaatttatgtagaacaaaaggtgaacatanaagctttttaggattttactaacacataaatggagattttatatgaaacaattactattagatgttactaacggaatagttatggctggttttgtagttataactacattatggtttattgttattggaggatagcctctaataaagagggagtactgagtggcaagatcgccggtttttgttcatcttagatcacgctctccttattcgctattagaaggtgcgctaaagattgaagagacagcacaactgtctcgaagaatgggcatgcctgctctagcgcttactgatactaataatatgtgcggtgctcttgagttttcagaaattcttacaaaagagggaatacaacctattataggtttaactcttagtatngagactgaaaaaacaaaaaatactgttcataataataaagtattggatggaactttagttctcttagccaagaatgaaattggctactgtaatcttatgaaattgagtagttcagcttttcttgatgttgagccctatgatttacctcattttagatcatctcaactatccgctttctctgatggacttattgctcttactggaggcccagaaggcgttttaaataagcttatttgtcaaggacagttagataaagctgaagaatggttagactatttattggatatatattctgataacttatacattgagttgcaaaggcacgggttgcatgatgaagtaattgcagaaaagcatttgattaattgggcttacgctaaaggaataagattagtagctacaaatgagccttactttatgaatcctgatatttttgagtcccatgatgctctcttagcaatgcaggagggttcatatatccttgagaaggacagaagaagactgactcgccagcattactttaaatctacagaagaaatggtagatttatttaaagatctaccagaagcaattgaaaatactattaatatttctaaaatgtgtttggttaaatcagttaagcgcgatcccattcttccaagctttagtgatggctctttaagtgaaggtgatatccttgatcaacaagcacatgaaggtttaaagagacgtttatctaagattaaattatcagcccctaaaagggattacgttaaaagattagaatttgaaattaaaataattcgccaaatggggtttcctggttattttttaatagtttctgattttataaaatgggcaaaatctcaaggtataccagttggaccaggccgtgggtctggagctgggtcggttgttgcatgggctttaactataaccgatttagatcctcttaagtacggtttgctttttgaaaggtttctaaatcctgaaagagtttctatgcccgactttgatatagatttctgtcaagaacggcgtggggaagttatcaaatacgttcaagaaaagtatggtgaagatcaggtggctcatattattacatttggaacgcttcaggcaagggcagttgtaagagatgttggtagagttatgcaaatgcctctacctcaagttgatcgtttagctaaacttgtgccttcgaacccagcaaatcctgtttcattgagcgaagcggttaagatggaaaaaggtttacgtgatgctaaagctgaagaccctgcagtaagaaagttactcgatacagctctgaaacttgagggcttatatcgaaacgcatcaacacatgctgccggtgttgttataggtgacagacccctaactgaattgattccactttaccgtgacccgagatctgatgttcctgctacccaatttacaatgaagtgggcagaaaaagctggattggtgaaatttgattttctggggttaaaaactcttactgttattgataggtgcataaagtacttatctaaacagggcattcaagttgatttagaaaatatagatacatcaaatcccttagcttatattcctttatcagagggcctttcagcgggtgtatttcagcttgaaagctctggaatgcgcgatgttt

SEQ ID NO: 969 - DNA, 4000 bp, Escherichia coli
  misc_feature (2)..(5): n is a, c, g, or t
  misc_feature (7)..(7): n is a, c, g, or t
  misc_feature (9)..(9): n is a, c, g, or t
  misc_feature (12)..(13): n is a, c, g, or t
  misc_feature (15)..(15): n is a, c, g, or t
  misc_feature (17)..(19): n is a, c, g, or t
  misc_feature (21)..(24): n is a, c, g, or t
  misc_feature (26)..(26): n is a, c, g, or t
  misc_feature (28)..(30): n is a, c, g, or t
  misc_feature (34)..(34): n is a, c, g, or t
  misc_feature (36)..(36): n is a, c, g, or t
  misc_feature (38)..(43): n is a, c, g, or t
  misc_feature (45)..(47): n is a, c, g, or t
  misc_feature (49)..(49): n is a, c, g, or t
  misc_feature (51)..(53): n is a, c, g, or t
  misc_feature (55)..(56): n is a, c, g, or t
  misc_feature (58)..(67): n is a, c, g, or t
  misc_feature (69)..(71): n is a, c, g, or t
  misc_feature (73)..(74): n is a, c, g, or t
  misc_feature (77)..(79): n is a, c, g, or t
  misc_feature (82)..(82): n is a, c, g, or t
  misc_feature (84)..(85): n is a, c, g, or t
  misc_feature (87)..(103): n is a, c, g, or t
  misc_feature (106)..(106): n is a, c, g, or t
  misc_feature (109)..(113): n is a, c, g, or t
  misc_feature (115)..(115): n is a, c, g, or t
  misc_feature (117)..(122): n is a, c, g, or t
  misc_feature (125)..(130): n is a, c, g, or t
  misc_feature (133)..(134): n is a, c, g, or t
  misc_feature (136)..(148): n is a, c, g, or t
  misc_feature (151)..(152): n is a, c, g, or t
  misc_feature (154)..(154): n is a, c, g, or t
  misc_feature (156)..(156): n is a, c, g, or t
  misc_feature (158)..(158): n is a, c, g, or t
  misc_feature (160)..(160): n is a, c, g, or t
  misc_feature (162)..(162): n is a, c, g, or t
  misc_feature (164)..(169): n is a, c, g, or t
  misc_feature (172)..(178): n is a, c, g, or t
  misc_feature (180)..(180): n is a, c, g, or t
  misc_feature (182)..(184): n is a, c, g, or t
  misc_feature (186)..(189): n is a, c, g, or t
  misc_feature (191)..(191): n is a, c, g, or t
  misc_feature (193)..(193): n is a, c, g, or t
  misc_feature (195)..(198): n is a, c, g, or t
  misc_feature (201)..(205): n is a, c, g, or t
  misc_feature (208)..(211): n is a, c, g, or t
  misc_feature (214)..(214): n is a, c, g, or t
  misc_feature (216)..(217): n is a, c, g, or t
  misc_feature (219)..(222): n is a, c, g, or t
  misc_feature (224)..(228): n is a, c, g, or t
  misc_feature (231)..(231): n is a, c, g, or t
  misc_feature (233)..(238): n is a, c, g, or t
  misc_feature (240)..(245): n is a, c, g, or t
  misc_feature (247)..(247): n is a, c, g, or t
  misc_feature (249)..(252): n is a, c, g, or t
  misc_feature (254)..(257): n is a, c, g, or t
  misc_feature (261)..(263): n is a, c, g, or t
  misc_feature (267)..(267): n is a, c, g, or t
  misc_feature (269)..(272): n is a, c, g, or t
  misc_feature (276)..(278): n is a, c, g, or t
  misc_feature (280)..(282): n is a, c, g, or t
  misc_feature (285)..(288): n is a, c, g, or t
  misc_feature (291)..(291): n is a, c, g, or t
  misc_feature (294)..(297): n is a, c, g, or t
  misc_feature (299)..(300): n is a, c, g, or t
  misc_feature (303)..(309): n is a, c, g, or t
  misc_feature (311)..(315): n is a, c, g, or t
  misc_feature (317)..(318): n is a, c, g, or t
  misc_feature (320)..(320): n is a, c, g, or t
  misc_feature (323)..(326): n is a, c, g, or t
  misc_feature (328)..(330): n is a, c, g, or t
  misc_feature (332)..(336): n is a, c, g, or t
  misc_feature (338)..(338): n is a, c, g, or t
  misc_feature (340)..(342): n is a, c, g, or t
  misc_feature (346)..(350): n is a, c, g, or t
  misc_feature (352)..(352): n is a, c, g, or t
  misc_feature (354)..(354): n is a, c, g, or t
  misc_feature (357)..(360): n is a, c, g, or t
  misc_feature (364)..(370): n is a, c, g, or t
  misc_feature (372)..(372): n is a, c, g, or t
  misc_feature (376)..(378): n is a, c, g, or t
  misc_feature (381)..(381): n is a, c, g, or t
  misc_feature (383)..(383): n is a, c, g, or t
  misc_feature (385)..(385): n is a, c, g, or t
  misc_feature (387)..(390): n is a, c, g, or t
  misc_feature (392)..(392): n is a, c, g, or t
  misc_feature (395)..(400): n is a, c, g, or t
  misc_feature (403)..(405): n is a, c, g, or t
  misc_feature (407)..(429): n is a, c, g, or t
  misc_feature (431)..(442): n is a, c, g, or t
  misc_feature (445)..(450): n is a, c, g, or t
  misc_feature (452)..(455): n is a, c, g, or t
  misc_feature (457)..(457): n is a, c, g, or t
  misc_feature (460)..(463): n is a, c, g, or t
  misc_feature (465)..(469): n is a, c, g, or t
  misc_feature (471)..(475): n is a, c, g, or t
  misc_feature (477)..(477): n is a, c, g, or t
  misc_feature (479)..(479): n is a, c, g, or t
  misc_feature (482)..(485): n is a, c, g, or t
  misc_feature (487)..(488): n is a, c, g, or t
  misc_feature (490)..(491): n is a, c, g, or t
  misc_feature (495)..(495): n is a, c, g, or t
  misc_feature (497)..(497): n is a, c, g, or t
  misc_feature (500)..(502): n is a, c, g, or t
  misc_feature (504)..(507): n is a, c, g, or t
  misc_feature (510)..(516): n is a, c, g, or t
  misc_feature (519)..(520): n is a, c, g, or t
  misc_feature (523)..(523): n is a, c, g, or t
  misc_feature (525)..(525): n is a, c, g, or t
  misc_feature (527)..(528): n is a, c, g, or t
  misc_feature (530)..(537): n is a, c, g, or t
  misc_feature (539)..(539): n is a, c, g, or t
  misc_feature (542)..(546): n is a, c, g, or t
  misc_feature (548)..(552): n is a, c, g, or t
  misc_feature (554)..(554): n is a, c, g, or t
  misc_feature (556)..(558): n is a, c, g, or t
  misc_feature (561)..(562): n is a, c, g, or t
  misc_feature (564)..(569): n is a, c, g, or t
  misc_feature (571)..(572): n is a, c, g, or t
  misc_feature (575)..(575): n is a, c, g, or t
  misc_feature (577)..(578): n is a, c, g, or t
  misc_feature (580)..(583): n is a, c, g, or t
  misc_feature (585)..(585): n is a, c, g, or t
  misc_feature (587)..(587): n is a, c, g, or t
  misc_feature (589)..(589): n is a, c, g, or t
  misc_feature (591)..(596): n is a, c, g, or t
  misc_feature (599)..(605): n is a, c, g, or t
  misc_feature (607)..(610): n is a, c, g, or t
  misc_feature (612)..(612): n is a, c, g, or t
  misc_feature (614)..(630): n is a, c, g, or t
  misc_feature (633)..(635): n is a, c, g, or t
  misc_feature (637)..(642): n is a, c, g, or t
  misc_feature (644)..(646): n is a, c, g, or t
  misc_feature (648)..(655): n is a, c, g, or t
  misc_feature (657)..(657): n is a, c, g, or t
  misc_feature (659)..(664): n is a, c, g, or t
  misc_feature (666)..(674): n is a, c, g, or t
  misc_feature (677)..(679): n is a, c, g, or t
  misc_feature (681)..(687): n is a, c, g, or t
  misc_feature (689)..(690): n is a, c, g, or t
  misc_feature (692)..(692): n is a, c, g, or t
  misc_feature (695)..(696): n is a, c, g, or t
  misc_feature (698)..(704): n is a, c, g, or t
  misc_feature (708)..(709): n is a, c, g, or t
  misc_feature (711)..(711): n is a, c, g, or t
  misc_feature (713)..(713): n is a, c, g, or t
  misc_feature (715)..(717): n is a, c, g, or t
  misc_feature (719)..(720): n is a, c, g, or t
  misc_feature (722)..(730): n is a, c, g, or t
  misc_feature (732)..(738): n is a, c, g, or t
  misc_feature (740)..(740): n is a, c, g, or t
  misc_feature (742)..(744): n is a, c, g, or t
  misc_feature (747)..(750): n is a, c, g, or t
  misc_feature (753)..(759): n is a, c, g, or t
  misc_feature (761)..(763): n is a, c, g, or t
  misc_feature (765)..(765): n is a, c, g, or t
  misc_feature (768)..(768): n is a, c, g, or t
  misc_feature (770)..(772): n is a, c, g, or t
  misc_feature (775)..(780): n is a, c, g, or t
  misc_feature (782)..(789): n is a, c, g, or t
  misc_feature (792)..(792): n is a, c, g, or t
  misc_feature (794)..(795): n is a, c, g, or t
  misc_feature (798)..(802): n is a, c, g, or t
  misc_feature (804)..(807): n is a, c, g, or t
  misc_feature (809)..(810): n is a, c, g, or t
  misc_feature (812)..(816): n is a, c, g, or t
  misc_feature (818)..(818): n is a, c, g, or t
  misc_feature (820)..(828): n is a, c, g, or t
  misc_feature (830)..(833): n is a, c, g, or t
  misc_feature (835)..(845): n is a, c, g, or t
  misc_feature (847)..(851): n is a, c, g, or t
  misc_feature (853)..(854): n is a, c, g, or t
  misc_feature (857)..(857): n is a, c, g, or t
  misc_feature (859)..(860): n is a, c, g, or t
  misc_feature (862)..(863): n is a, c, g, or t
  misc_feature (865)..(866): n is a, c, g, or t
  misc_feature (869)..(874): n is a, c, g, or t
  misc_feature (876)..(877): n is a, c, g, or t
  misc_feature (879)..(879): n is a, c, g, or t
  misc_feature (882)..(884): n is a, c, g, or t
  misc_feature (886)..(887): n is a, c, g, or t
  misc_feature (890)..(894): n is a, c, g, or t
  misc_feature (896)..(899): n is a, c, g, or t
  misc_feature (902)..(905): n is a, c, g, or t
  misc_feature (907)..(918): n is a, c, g, or t
  misc_feature (920)..(921): n is a, c, g, or t
  misc_feature (923)..(924): n is a, c, g, or t
  misc_feature (926)..(928): n is a, c, g, or t
  misc_feature (930)..(931): n is a, c, g, or t
  misc_feature (933)..(944): n is a, c, g, or t
  misc_feature (947)..(958): n is a, c, g, or t
  misc_feature (960)..(963): n is a, c, g, or t
  misc_feature (965)..(968): n is a, c, g, or t
  misc_feature (973)..(973): n is a, c, g, or t
  misc_feature (975)..(975): n is a, c, g, or t
  misc_feature (977)..(979): n is a, c, g, or t
  misc_feature (981)..(984): n is a, c, g, or t
  misc_feature (986)..(987): n is a, c, g, or t
  misc_feature (989)..(990): n is a, c, g, or t
  misc_feature (992)..(995): n is a, c, g, or t
  misc_feature (997)..(997): n is a, c, g, or t
  misc_feature (999)..(1000): n is a, c, g, or t
  misc_feature (1002)..(1005): n is a, c, g, or t
  misc_feature (1007)..(1019): n is a, c, g, or t
  misc_feature (1024)..(1033): n is a, c, g, or t
  misc_feature (1035)..(1040): n is a, c, g, or t
  misc_feature (1043)..(1044): n is a, c, g, or t
  misc_feature (1046)..(1047): n is a, c, g, or t
  misc_feature (1049)..(1055): n is a, c, g, or t
  misc_feature (1058)..(1059): n is a, c, g, or t
  misc_feature (1061)..(1063): n is a, c, g, or t
  misc_feature (1071)..(1072): n is a, c, g, or t
  misc_feature (1074)..(1074): n is a, c, g, or t
  misc_feature (1077)..(1079): n is a, c, g, or t
  misc_feature (1081)..(1081): n is a, c, g, or t
  misc_feature (1084)..(1088): n is a, c, g, or t
  misc_feature (1090)..(1090): n is a, c, g, or t
  misc_feature (1092)..(1092): n is a, c, g, or t
  misc_feature (1095)..(1095): n is a, c, g, or t
  misc_feature (1101)..(1101): n is a, c, g, or t
  misc_feature (1104)..(1104): n is a, c, g, or t
  misc_feature (1108)..(1108): n is a, c, g, or t
  misc_feature (1110)..(1111): n is a, c, g, or t
  misc_feature (1115)..(1115): n is a, c, g, or t
  misc_feature (1118)..(1119): n is a, c, g, or t
  misc_feature (1124)..(1124): n is a, c, g, or t
  misc_feature (1127)..(1127): n is a, c, g, or t
  misc_feature (1130)..(1131): n is a, c, g, or t
  misc_feature (1136)..(1139): n is a, c, g, or t
  misc_feature (1141)..(1143): n is a, c, g, or t
  misc_feature (1145)..(1145): n is a, c, g, or t
  misc_feature (1147)..(1147): n is a, c, g, or t
  misc_feature (1149)..(1149): n is a, c, g, or t
  misc_feature (1152)..(1153): n is a, c, g, or t
  misc_feature (1156)..(1156): n is a, c, g, or t
  misc_feature (1158)..(1159): n is a, c, g, or t
  misc_feature (1161)..(1162): n is a, c, g, or t
  misc_feature (1164)..(1164): n is a, c, g, or t
  misc_feature (1167)..(1167): n is a, c, g, or t
  misc_feature (1169)..(1169): n is a, c, g, or t
  misc_feature (1171)..(1171): n is a, c, g, or t
  misc_feature (1175)..(1175): n is a, c, g, or t
  misc_feature (1178)..(1179): n is a, c, g, or t
  misc_feature (1182)..(1183): n is a, c, g, or t
  misc_feature (1189)..(1189): n is a, c, g, or t
  misc_feature (1193)..(1193): n is a, c, g, or t
  misc_feature (1195)..(1195): n is a, c, g, or t
  misc_feature (1198)..(1199): n is a, c, g, or t
  misc_feature (1204)..(1207): n is a, c, g, or t
  misc_feature (1210)..(1210): n is a, c, g, or t
  misc_feature (1212)..(1213): n is a, c, g, or t
  misc_feature (1216)..(1216): n is a, c, g, or t
  misc_feature (1220)..(1221): n is a, c, g, or t
  misc_feature (1223)..(1226): n is a, c, g, or t
  misc_feature (1228)..(1228): n is a, c, g, or t
  misc_feature (1232)..(1233): n is a, c, g, or t
  misc_feature (1235)..(1235): n is a, c, g, or t
  misc_feature (1240)..(1240): n is a, c, g, or t
  misc_feature (1242)..(1243): n is a, c, g, or t
  misc_feature (1245)..(1246): n is a, c, g, or t
  misc_feature (1248)..(1249): n is a, c, g, or t
  misc_feature (1251)..(1251): n is a, c, g, or t
  misc_feature (1253)..(1253): n is a, c, g, or t
  misc_feature (1255)..(1256): n is a, c, g, or t
  misc_feature (1260)..(1262): n is a, c, g, or t
  misc_feature (1265)..(1266): n is a, c, g, or t
  misc_feature (1268)..(1272): n is a, c, g, or t
  misc_feature (1274)..(1276): n is a, c, g, or t
  misc_feature (1279)..(1280): n is a, c, g, or t
  misc_feature (1282)..(1283): n is a, c, g, or t
  misc_feature (1286)..(1287): n is a, c, g, or t
  misc_feature (1289)..(1292): n is a, c, g, or t
  misc_feature (1294)..(1298): n is a, c, g, or t
  misc_feature (1300)..(1302): n is a, c, g, or t
  misc_feature (1307)..(1310): n is a, c, g, or t
  misc_feature (1312)..(1312): n is a, c, g, or t
  misc_feature (1314)..(1315): n is a, c, g, or t
  misc_feature (1317)..(1317): n is a, c, g, or t
  misc_feature (1320)..(1320): n is a, c, g, or t
  misc_feature (1323)..(1328): n is a, c, g, or t
  misc_feature (1331)..(1332): n is a, c, g, or t
  misc_feature (1334)..(1334): n is a, c, g, or t
  misc_feature (1337)..(1337): n is a, c, g, or t
  misc_feature (1339)..(1339): n is a, c, g, or t
  misc_feature (1342)..(1342): n is a, c, g, or t
  misc_feature (1345)..(1345): n is a, c, g, or t
  misc_feature (1347)..(1347): n is a, c, g, or t
  misc_feature (1350)..(1350): n is a, c, g, or t
  misc_feature (1353)..(1353): n is a, c, g, or t
  misc_feature (1355)..(1355): n is a, c, g, or t
  misc_feature (1357)..(1357): n is a, c, g, or t
  misc_feature (1359)..(1360): n is a, c, g, or t
  misc_feature (1362)..(1362): n is a, c, g, or t
  misc_feature (1364)..(1364): n is a, c, g, or t
  misc_feature (1366)..(1366): n is a, c, g, or t
  misc_feature (1371)..(1373): n is a, c, g, or t
  misc_feature (1375)..(1378): n is a, c, g, or t
  misc_feature (1381)..(1381): n is a, c, g, or t
  misc_feature (1384)..(1384): n is a, c, g, or t
  misc_feature (1386)..(1388): n is a, c, g, or t
  misc_feature (1391)..(1391): n is a, c, g, or t
  misc_feature (1393)..(1394): n is a, c, g, or t
  misc_feature (1398)..(1399): n is a, c, g, or t
  misc_feature (1401)..(1402): n is a, c, g, or t
  misc_feature (1405)..(1409): n is a, c, g, or t
  misc_feature (1411)..(1411): n is a, c, g, or t
  misc_feature (1413)..(1414): n is a, c, g, or t
  misc_feature (1416)..(1416): n is a, c, g, or t
  misc_feature (1422)..(1423): n is a, c, g, or t
  misc_feature (1425)..(1426): n is a, c, g, or t
  misc_feature (1429)..(1430): n is a, c, g, or t
  misc_feature (1434)..(1437): n is a, c, g, or t
  misc_feature (1439)..(1441): n is a, c, g, or t
  misc_feature (1444)..(1444): n is a, c, g, or t
  misc_feature (1446)..(1447): n is a, c, g, or t
  misc_feature (1449)..(1449): n is a, c, g, or t
  misc_feature (1451)..(1451): n is a, c, g, or t
  misc_feature (1454)..(1454): n is a, c, g, or t
  misc_feature (1456)..(1460): n is a, c, g, or t
  misc_feature (1463)..(1464): n is a, c, g, or t
  misc_feature (1467)..(1468): n is a, c, g, or t
  misc_feature (1472)..(1474): n is a, c, g, or t
  misc_feature (1476)..(1476): n is a, c, g, or t
  misc_feature (1479)..(1481): n is a, c, g, or t
  misc_feature (1483)..(1483): n is a, c, g, or t
  misc_feature (1487)..(1487): n is a, c, g, or t
  misc_feature (1491)..(1492): n is a, c, g, or t
  misc_feature (1495)..(1499): n is a, c, g, or t
  misc_feature (1503)..(1503): n is a, c, g, or t
  misc_feature (1507)..(1510): n is a, c, g, or t
  misc_feature (1513)..(1513): n is a, c, g, or t
  misc_feature (1516)..(1516): n is a, c, g, or t
  misc_feature (1521)..(1521): n is a, c, g, or t
  misc_feature (1524)..(1525): n is a, c, g, or t
  misc_feature (1527)..(1528): n is a, c, g, or t
  misc_feature (1532)..(1535): n is a, c, g, or t
  misc_feature (1537)..(1538): n is a, c, g, or t
  misc_feature (1540)..(1544): n is a, c, g, or t
  misc_feature (1546)..(1547): n is a, c, g, or t
  misc_feature (1549)..(1549): n is a, c, g, or t
  misc_feature (1552)..(1557): n is a, c, g, or t
  misc_feature (1559)..(1559): n is a, c, g, or t
  misc_feature (1561)..(1561): n is a, c, g, or t
  misc_feature (1563)..(1563): n is a, c, g, or t
  misc_feature (1565)..(1567): n is a, c, g, or t
  misc_feature (1569)..(1570): n is a, c, g, or t
  misc_feature (1573)..(1573): n is a, c, g, or t
  misc_feature (1576)..(1578): n is a, c, g, or t
  misc_feature (1580)..(1580): n is a, c, g, or t
  misc_feature (1582)..(1589): n is a, c, g, or t
  misc_feature (1592)..(1592): n is a, c, g, or t
  misc_feature (1595)..(1601): n is a, c, g, or t
  misc_feature (1603)..(1606): n is a, c, g, or t
  misc_feature (1609)..(1609): n is a, c, g, or t
  misc_feature (1613)..(1613): n is a, c, g, or t
  misc_feature (1615)..(1615): n is a, c, g, or t
  misc_feature (1618)..(1618): n is a, c, g, or t
  misc_feature (1621)..(1621): n is a, c, g, or t
  misc_feature (1623)..(1623): n is a, c, g, or t
  misc_feature (1626)..(1626): n is a, c, g, or t
  misc_feature (1628)..(1628): n is a, c, g, or t
  misc_feature (1630)..(1630): n is a, c, g, or t
  misc_feature (1633)..(1634): n is a, c, g, or t
  misc_feature (1636)..(1636): n is a, c, g, or t
  misc_feature (1639)..(1639): n is a, c, g, or t
  misc_feature (1642)..(1642): n is a, c, g, or t
  misc_feature (1644)..(1645): n is a, c, g, or t
  misc_feature (1647)..(1647): n is a, c, g, or t
  misc_feature (1651)..(1651): n is a, c, g, or t
  misc_feature (1653)..(1653): n is a, c, g, or t
  misc_feature (1655)..(1655): n is a, c, g, or t
  misc_feature (1657)..(1658): n is a, c, g, or t
  misc_feature (1660)..(1664): n is a, c, g, or t
  misc_feature (1666)..(1668): n is a, c, g, or t
  misc_feature (1671)..(1673): n is a, c, g, or t
  misc_feature (1675)..(1675): n is a, c, g, or t
  misc_feature (1681)..(1682): n is a, c, g, or t
  misc_feature (1684)..(1685): n is a, c, g, or t
  misc_feature (1688)..(1688): n is a, c, g, or t
  misc_feature (1691)..(1692): n is a, c, g, or t
  misc_feature (1695)..(1698): n is a, c, g, or t
  misc_feature (1701)..(1702): n is a, c, g, or t
  misc_feature (1704)..(1705): n is a, c, g, or t
  misc_feature (1708)..(1708): n is a, c, g, or t
  misc_feature (1711)..(1714): n is a, c, g, or t
  misc_feature (1717)..(1717): n is a, c, g, or t
  misc_feature (1719)..(1719): n is a, c, g, or t
  misc_feature (1721)..(1724): n is a, c, g, or t
  misc_feature (1726)..(1726): n is a, c, g, or t
  misc_feature (1728)..(1731): n is a, c, g, or t
  misc_feature (1733)..(1733): n is a, c, g, or t
  misc_feature (1735)..(1736): n is a, c, g, or t
  misc_feature (1741)..(1741): n is a, c, g, or t
  misc_feature (1744)..(1744): n is a, c, g, or t
  misc_feature (1748)..(1754): n is a, c, g, or t
  misc_feature (1761)..(1761): n is a, c, g, or t
  misc_feature (1764)..(1764): n is a, c, g, or t
  misc_feature (1767)..(1770): n is a, c, g, or t
  misc_feature (1773)..(1777): n is a, c, g, or t
  misc_feature (1780)..(1780): n is a, c, g, or t
  misc_feature (1782)..(1782): n is a, c, g, or t
  misc_feature (1784)..(1784): n is a, c, g, or t
  misc_feature (1786)..(1787): n is a, c, g, or t
  misc_feature (1789)..(1792): n is a, c, g, or t
  misc_feature (1819)..(1819): n is a, c, g, or t
  misc_feature (1828)..(1828): n is a, c, g, or t
  misc_feature (1852)..(1852): n is a, c, g, or t
  misc_feature (1858)..(1858): n is a, c, g, or t
  misc_feature (1880)..(1880): n is a, c, g, or t
  misc_feature (1925)..(1925): n is a, c, g, or t
  misc_feature (1935)..(1936): n is a, c, g, or t
  misc_feature (1938)..(1939): n is a, c, g, or t
  misc_feature (1957)..(1957): n is a, c, g, or t
  misc_feature (1979)..(1979): n is a, c, g, or t
  misc_feature (1989)..(1989): n is a, c, g, or t
  misc_feature (1992)..(1992): n is a, c, g, or t
  misc_feature (1994)..(1994): n is a, c, g, or t
  misc_feature (2119)..(2119): n is a, c, g, or t
  misc_feature (2865)..(2865): n is a, c, g, or t
  misc_feature (3114)..(3114): n is a, c, g, or t
  misc_feature (3170)..(3171): n is a, c, g, or t
  misc_feature (3173)..(3173): n is a, c, g, or t
  misc_feature (3176)..(3177): n is a, c, g, or t
  misc_feature (3192)..(3192): n is a, c, g, or t
  misc_feature (3197)..(3198): n is a, c, g, or t
  misc_feature (3230)..(3230): n is a, c, g, or t
  misc_feature (3270)..(3270): n is a, c, g, or t
  misc_feature (3279)..(3279): n is a, c, g, or t
  misc_feature (3295)..(3295): n is a, c, g, or t
  misc_feature (3305)..(3305): n is a, c, g, or t
  misc_feature (3316)..(3316): n is a, c, g, or t
  misc_feature (3321)..(3321): n is a, c, g, or t
  misc_feature (3366)..(3370): n is a, c, g, or t
  misc_feature (3372)..(3373): n is a, c, g, or t
  misc_feature (3375)..(3378): n is a, c, g, or t
  misc_feature (3380)..(3380): n is a, c, g, or t
  misc_feature (3383)..(3389): n is a, c, g, or t
  misc_feature (3391)..(3393): n is a, c, g, or t
  misc_feature (3395)..(3395): n is a, c, g, or t
  misc_feature (3397)..(3403): n is a, c, g, or t
  misc_feature (3406)..(3406): n is a, c, g, or t
  misc_feature (3409)..(3411): n is a, c, g, or t
  misc_feature (3416)..(3417): n is a, c, g, or t
  misc_feature (3419)..(3422): n is a, c, g, or t
  misc_feature (3424)..(3425): n is a, c, g, or t
  misc_feature (3428)..(3435): n is a, c, g, or t
  misc_feature (3437)..(3440): n is a, c, g, or t
  misc_feature (3442)..(3445): n is a, c, g, or t
  misc_feature (3448)..(3448): n is a, c, g, or t
  misc_feature (3451)..(3454): n is a, c, g, or t
  misc_feature (3456)..(3458): n is a, c, g, or t
  misc_feature (3460)..(3460): n is a, c, g, or t
  misc_feature (3462)..(3468): n is a, c, g, or t
  misc_feature (3470)..(3470): n is a, c, g, or t
  misc_feature (3472)..(3477): n is a, c, g, or t
  misc_feature (3480)..(3480): n is a, c, g, or t
  misc_feature (3482)..(3483): n is a, c, g, or t
  misc_feature (3485)..(3486): n is a, c, g, or t
  misc_feature (3488)..(3489): n is a, c, g, or t
  misc_feature (3491)..(3491): n is a, c, g, or t
  misc_feature (3495)..(3495): n is a, c, g, or t
  misc_feature (3498)..(3498): n is a, c, g, or t
  misc_feature (3500)..(3502): n is a, c, g, or t
  misc_feature (3504)..(3514): n is a, c, g, or t
  misc_feature (3520)..(3520): n is a, c, g, or t
  misc_feature (3522)..(3523): n is a, c, g, or t
  misc_feature (3525)..(3525): n is a, c, g, or t
  misc_feature (3527)..(3531): n is a, c, g, or t
  misc_feature (3533)..(3534): n is a, c, g, or t
  misc_feature (3536)..(3536): n is a, c, g, or t
  misc_feature (3538)..(3539): n is a, c, g, or t
  misc_feature (3541)..(3543): n is a, c, g, or t
  misc_feature (3549)..(3553): n is a, c, g, or t
  misc_feature (3555)..(3561): n is a, c, g, or t
  misc_feature (3563)..(3563): n is a, c, g, or t
  misc_feature (3565)..(3565): n is a, c, g, or t
  misc_feature (3567)..(3569): n is a, c, g, or t
  misc_feature (3571)..(3577): n is a, c, g, or t
  misc_feature (3579)..(3579): n is a, c, g, or t
  misc_feature (3581)..(3581): n is a, c, g, or t
  misc_feature (3587)..(3587): n is a, c, g, or t
  misc_feature (3589)..(3596): n is a, c, g, or t
  misc_feature (3599)..(3602): n is a, c, g, or t
  misc_feature (3604)..(3605): n is a, c, g, or t
  misc_feature (3609)..(3611): n is a, c, g, or t
  misc_feature (3613)..(3613): n is a, c, g, or t
  misc_feature (3618)..(3619): n is a, c, g, or t
  misc_feature (3622)..(3622): n is a, c, g, or t
  misc_feature (3627)..(3629): n is a, c, g, or t
  misc_feature (3631)..(3632): n is a, c, g, or t
  misc_feature (3634)..(3636): n is a, c, g, or t
  misc_feature (3638)..(3641): n is a, c, g, or t
  misc_feature (3643)..(3645): n is a, c, g, or t
  misc_feature (3649)..(3649): n is a, c, g, or t
  misc_feature (3653)..(3656): n is a, c, g, or t
  misc_feature (3659)..(3660): n is a, c, g, or t
  misc_feature (3662)..(3665): n is a, c, g, or t
  misc_feature (3667)..(3667): n is a, c, g, or t
  misc_feature (3669)..(3671): n is a, c, g, or t
  misc_feature (3675)..(3676): n is a, c, g, or t
  misc_feature (3680)..(3681): n is a, c, g, or t
  misc_feature (3683)..(3686): n is a, c, g, or t
  misc_feature (3690)..(3699): n is a, c, g, or t
  misc_feature (3703)..(3703): n is a, c, g, or t
  misc_feature (3705)..(3709): n is a, c, g, or t
  misc_feature (3712)..(3721): n is a, c, g, or t
  misc_feature (3725)..(3725): n is a, c, g, or t
  misc_feature (3727)..(3730): n is a, c, g, or t
  misc_feature (3734)..(3737): n is a, c, g, or t
  misc_feature (3739)..(3739): n is a, c, g, or t
  misc_feature (3741)..(3742): n is a, c, g, or t
  misc_feature (3746)..(3747): n is a, c, g, or t
  misc_feature (3749)..(3752): n is a, c, g, or t
  misc_feature (3756)..(3764): n is a, c, g, or t
  misc_feature (3766)..(3766): n is a, c, g, or t
  misc_feature (3769)..(3775): n is a, c, g, or t
  misc_feature (3778)..(3781): n is a, c, g, or t
  misc_feature (3783)..(3783): n is a, c, g, or t
  misc_feature (3785)..(3786): n is a, c, g, or t
  misc_feature (3790)..(3792): n is a, c, g, or t
  misc_feature (3794)..(3803): n is a, c, g, or t
  misc_feature (3805)..(3811): n is a, c, g, or t
  misc_feature (3813)..(3817): n is a, c, g, or t
  misc_feature (3820)..(3823): n is a, c, g, or t
  misc_feature (3825)..(3829): n is a, c, g, or t
  misc_feature (3832)..(3833): n is a, c, g, or t
  misc_feature (3835)..(3838): n is a, c, g, or t
  misc_feature (3841)..(3844): n is a, c, g, or t
  misc_feature (3846)..(3846): n is a, c, g, or t
  misc_feature (3848)..(3848): n is a, c, g, or t
  misc_feature (3851)..(3852): n is a, c, g, or t
  misc_feature (3855)..(3856): n is a, c, g, or t
  misc_feature (3858)..(3859): n is a, c, g, or t
  misc_feature (3861)..(3861): n is a, c, g, or t
  misc_feature (3866)..(3869): n is a, c, g, or t
  misc_feature (3871)..(3871): n is a, c, g, or t
  misc_feature (3878)..(3878): n is a, c, g, or t
  misc_feature (3881)..(3882): n is a, c, g, or t
  misc_feature (3886)..(3888): n is a, c, g, or t
  misc_feature (3890)..(3892): n is a, c, g, or t
  misc_feature (3894)..(3894): n is a, c, g, or t
  misc_feature (3899)..(3901): n is a, c, g, or t
  misc_feature (3909)..(3909): n is a, c, g, or t
  misc_feature (3914)..(3914): n is a, c, g, or t
  misc_feature (3916)..(3916): n is a, c, g, or t
  misc_feature (3920)..(3923): n is a, c, g, or t
  misc_feature (3925)..(3926): n is a, c, g, or t
  misc_feature (3929)..(3930): n is a, c, g, or t
  misc_feature (3932)..(3934): n is a, c, g, or t
  misc_feature (3936)..(3939): n is a, c, g, or t
  misc_feature (3943)..(3951): n is a, c, g, or t
  misc_feature (3953)..(3954): n is a, c, g, or t
  misc_feature (3956)..(3956): n is a, c, g, or t
  misc_feature (3958)..(3958): n is a, c, g, or t
  misc_feature (3961)..(3965): n is a, c, g, or t
  misc_feature (3968)..(3968): n is a, c, g, or t
  misc_feature (3970)..(3971): n is a, c, g, or t
  misc_feature (3975)..(3976): n is a, c, g, or t
  misc_feature (3978)..(3981): n is a, c, g, or t
  misc_feature (3985)..(3989): n is a, c, g, or t
  misc_feature (3991)..(3991): n is a, c, g, or t
  misc_feature (3994)..(3994): n is a, c, g, or t
  misc_feature (3996)..(3996): n is a, c, g, or t
  misc_feature (3998)..(3998): n is a, c, g, or t
tnnnnangnccnncnannnannnncnannntttngncnnnnnncnnnancnnntnnannnnnnnnnngnnntnnttnnnggntnncnnnnnnnnnnnnnnnnnggnaannnnngncnnnnnnttnnnnnnttnntnnnnnnnnnnnnnttnncngncntncntnnnnnnttnnnnnnngntnnngnnnnangncnnnnccnnnnnttnnnnttncnngnnnncnnnnnttncnnnnnngnnnnnnantnnnntnnnnaaannngggnannnncccnnntnnnccnnnnaanccnnnntnnccnnnnnnnannnnncnntnaannnnannncnnnnncnannncccnnnnnangnttnnnnaaannnnnnncntttnnnccntnancnnnncnttnnnnnnttnnncnnnnnnnnnnnnnnnnnnnnnnntnnnnnnnnnnnnccnnnnnncnnnncnttnnnncnnnnngnnnnncnanggnnnntnntnnaaantnaannngnnnnaannnnnnnccnnttncngnntnnnnnnnncnggnnnnntnnnnncnannnttnngnnnnnntnnttngnnannnncnantngnnnnnnaannnnnnnannnnancnnnnnnnnnnnnnnnnnccnnntnnnnnntnnngnnnnnnnnangnnnnnncnnnnnnnnnttnnncnnnnnnncnntnaanntnnnnnnncccnngntnannncnntnnnnnnnnngnnnnnnncnannnaannnnccnnnnnnngnnncnaancnnnaannnnnngnnnnnnnnccntnnccnnnnncnnnntnncnnnnntnannnnnnnnncnnnntnnnnnnnnnnngnnnnnannttngnnanngnnggnnnnnntnngnttnnntnnttnnnnnannnnggnnnngnnnnnnnnnnnntnntnnannnannannnnnnnnnnnnttnnnnnnnnnnnncnnnntnnnnccccntnannngnnnntnnannannnngntnncnnnntnnnnnnnnnnnnnttttnnnnnnnnnngnnnnnnttnncnncnnnnnnnaanntnnnaaaaaatnncntannntnccnnnnnantnaanaaaaanaancgcncnntttnacnntttanaanaannttttnnnnannncncncnaannggngnncnnangcncncnggtnttnnccnntttttntttntnttnncacannnnaanannttnaacnntnnnntnaaanntnttttngnnanngnntncncnnttcnnntcnngnnnnngnnnttnncnnaanncnnnncnnnnntnnngggtnnnncntnngnaanaannnnnnaanngnccntnaanggnanaanggnanantnngnancncccannncnnnnaanaanannnaantnnaatnncnnaannnnntntnnangggtgnnannttnnaaannnnannnttnanntncnaancnnnnnaannggnnaacnnntnttnnngngagncccnnttnnnnncgcncccnnnnaanaanaaaancgnntnnaaannnntnnannnnntnncnaannnnnngnanangnnntnnccnggnnnancnnnnnnnnggnaannnnnnnannnnccntttnanaanggngnttntncnccnntnganaananntntctntncncnntnnnnntnnnccnnncnggaaanncnnacnccnnggnnnngcnntnnggnccnnnnccntntnnnngnannnnanannccccnccncacnnnnnnnaaaaaanatnttnnnnaannnnnttncnananngnnnnggctggcttatgaagacagcatggagnttcctagcngccaaataaacccttttccacaancttgcngagggcaacatcatgggcgttncaaccgaaaataagcgtttacgcaaaaccaattgggcaacgccangcgcgttggnncnnggctttcaccctcaaccncttgcctacaaacgcaagccancatcaaggcnggncnttttaagaaaggccccattgcaccaagcataagccaacaaagcacctgcgggctaagcccgaggtgcgattaaggtctacaaaagggaaagcttaaagggttgcgacacattaaggcaccagcgngagcgtcttgaatgtaaaaagaaacgaggttgccacgccgggcttctgtgtcgctccctttcttcaaacaacagtatgtatcttcaaatcagttgcggcagtcaatcataatcgtgccggcatggcaacgatacacctgcctcactcgtccgtcggcggagtaatgggaggccaaagcctgtcgcagctgttcgtaatcatcgtcggaggccatgctatcaatcttcacattgatgagtcttcccatgggaaacacctggtaaaggccgtcgcgcgtgtacttaatcttatccacgccgccgagaagtccgtagctctggtagtccgtctcgaggctcgacacgaactcgtctgccaagcttagtacctcacgatacttcacctgcccgcaggcccacagctgcaataacataaaaacaaacaatactaccttcttcatacaaacatcagtttagattattttatatacatatcaggtttcccgctttcaaagcggaacatcgagaggtattagcgaccatagaaatacgctcgttcacaacatggcatgtatggaaaaggaaaggcggttgccttacgaaacagggctccgatggctttgttaccacgcgaagtggcttgtctcttggctttcttctctaatccttcgactgaatagttgttgaacttgctatattcttctactggtatttgcgcaaccgccattcgctggatggcgggtgttggggcattggcgtgattccccntcttgtggatttgcgcttgtaaaatacgcgcaccacctgtgaatctctgtttttgttttcaaagactactaagtacttggcaaagataggcatttgtaaaataactgccaaacattttcttcattatttttaatataatgcgaaaaaacttctttactaagtacgaaataagtataaatatcgaataaatacgtcaaaatttcccataacgtgcttaaccaccagcaagtaggtgttactttaaagccnacttgtctccttaaaattcaagcggttcatcagaccgcccatcagatgttttaggnncnccnnttcgtttcgtgttcnttctnngcttgcttgttgggcctattgcccaccattcngctgaagtaacttgccgcaccttcaagaataagacggacnataggcccnacaatcaaacaaaatntgcacagacnctaatgaaccnattgnggtggaatgtttgcggcaagacctgctgttggcggacgaaagggnnnnnannannnntnaannnnnnntnnntnannnnnnnccnaannnttttnncnnnnannttnnnnnnnnannnntnnnnaanttnnnntnnntnannnnnnnancnnnnnnaantnntnngnnangaanttnannntnnnnnnnnnnntttttncnncnannnnncnncntnncnnnaaaaannnnntnnnnnnnangntnnntnnnnnnncnanaagggntnnnnnnnngannnngnnaaannnanttttnnttnaaaannncnncnnncnnnncnnntttngggnnnnttnntnnnnantnnngggnnaaanngnnnnaaannnnnnnnnntttngnnnnnaannnnnnnnnntttngnnnnaaannnnangnnaaanngnnnnaaannnnnnnnnanttnnnnnnnaannnnangnnaaannncnnnnnnnnnnannnnnnnannnnnaannnncnnnnnaanngnnnnaannnnancnttnnaanncnntnaaaannnngnccaaaanggnnaaannngnnntnaaaannngttttttnggggntnaaannnngnnaanngnnntnnnnaaannnnnnnnngnnancnaannnnnaangnnaaanngnnnnaaannnnngnttnangncc

SEQ ID NO: 970 - DNA, 4000 bp, Escherichia coli
  misc_feature (2415)..(2415): n is a, c, g, or t
  misc_feature (2634)..(2634): n is a, c, g, or t
  misc_feature (2640)..(2640): n is a, c, g, or t
  misc_feature (3082)..(3082): n is a, c, g, or t
ttcagggcagggaggtgctacaagaaagcatccccatgaagaccctccgtctcctcgccgcctgcctcggtgtcgtctcgttcgtcgcagcggccactccgccagtccgtccgaacgtgttgctcatcgtcgcagatgacatgggctgggccgacgtcagttggcatggcgggaagtttgccacgccgcggatggcagagattcttaagacttcggtggagctggatcgtcattatgtgcaacccgtgtgcaccccgacccgcacggctttgctctcaggtcgctggacgagccgcttcggtccccatgtgctcggtccgacgaacatgcgcgctttccccgaggggacctacacgctggcctcggcgttaaagtccgtaggctatcgcacatccatctcgggcaagtggcatctgggtggcaagtttgcttggggaccccgccagtatgggttcgaccagtcgtatggcttcctctcgggcgccgtcgacccgtggacacacaagtatcggtcgggtatcttggaggatacgtggaatcgtaacgacgtgctgctgaaggaggaaggcaacgccacggaactgatcgctgccgacgccaagcgcgtcatccttgagaagaaagggccgtggtttgcttacgtcccgttcggcgcggtgcataccccgatcgacgccccgaaagagtatttcaaggcctacgaaggcgtgcagttccatgccgaccccgccaaggatgactccattcgtcgctacgccgcctttgtgacgcaactggatgctaaggtgggcgagttctacgacgccctcaaggcctcggggcagctcgagaacacggtgatcatcttcacctcggacaacggtggaatcgaaagcagcggcaatccctatgtcggcaagaccaaggggagtccggccgtgaccacgaatgcccccctccgcggctggaagaatacgccgtatgagggagggatgcgcgtcaacgcgtttgtcagctggccgggtcacctgcccgccggcaagaatagccacccgatgcatgtggcggactggctgccgacgttggctcgcctgacgggagcttccgtccctgcggatgcaaagttagatggcctcgaccgttgggccgtcttgaccggtgccgatgcgacgcccgcgccgcggaccatctatattccccactaccagcgttcggctgtcttttatggcgactggaaactcatcgccccgcataccaacccccaagggaaggcagaactcttcaaccttaccaaagaccccttcgagcaggacgagtgttccgcccgcttccctgaaaagcttaaggagatgcgcgagcgcttcctcgaactccggaagggcgacttactcgaagccccggccgacgccaagtttagcgaaaaatccgcaaaatgaaactacgcctattcctctgcctgctggcgattaccagccaagccgccgaccccatcggcgacgtcacggccccgcccgctgaactaaagctgccgccgttttacaaaaaatacatcagtgcccaaggtttgccgattgtggcctccggtgccgtcaacgactacgccctcaaggagaccgcttacctagctaacctcatgttggccaagcgcccagatgtccgcacagcgatgatcgcgaacggctcgcgggtcatcatcatggggcgggcggagtttaccaccgatgttcctgaatacgctggcttcaagccgaaggattactgggacgcccgcgcccgtggactcggcggctcgcagactgaccccgtctgttcttgtgcggaagagaatatgttggcgttccctggcgacccttacgcttccgagaacatcttcatccatgagttcgcgcacaatatccacctgcgcggcatgctgaaggttgacccgacctttgaccgtcgcctcaaggcaacttaccaagccgccatggccaagggcctgtggaaggggaagtatgctgcgaccaatcacagtgaatactttgccgaaggcgtccagtcgtggttcgataacaaccgcgtcaacgaccacgaccacaaccacgtgcacctgcgcacacagttgctggaatacgaccccggcttggccgcgatgtgccgcgaggtctttggtgacaccgaactaaagtataccaagccgaccacccggctgacgggccacatggcgggctacgacccgtcgacggccccgaaatttgtctggccggaacgcctgacgacggcgaaggccgacatccgcaagaaggtcgacgaacgcgtgcaggcggcagagaagggcccgatcacacagccctatacgaagtaagccagatggaccgccgacatttctttggggcttctgccacgctggctctcgcggtagccctgcgcgccgccgcccccggccgcgccccgcgnatcctgctgcgctcctcctggcagactgtgaatatcggtgatatcgcgcatacgccgggtatgttggccttgctggagaagcacctacccgaagcggaaattaccttatggcctgggagtgtggataatggggtgggggagatgctgcagcgccgcttcccaaaactccgtatcctcgtccctggaaagatcgacgtcgcccaggcctatgcggatcangatttnctcctgcatggttcagggccttccctcgtcgccgaaaaagacgttgtccgctggcgtcagctcgggtccaagccctatggcgtgctcggtattacccaaggtaaaccgacccctgcgaccatcgaagtcctgaatggtgctcagttcgtcttcttccgcgatggcgtctcgcacgccgtcgccatctcctctggcgtgaagtgtcccttgatgggcttagcgcccgatggcgctttcgccacggaccttcgcgatgacgccaaggcaacggctttcctgcaggctaaccagttagaggtcggcggttttctttgctgtatccctcggtaccgctccacgccctattggttgattaagacgggtatacccttcgacccggtgaagcagaagcgtaacgatgagctcaaggaacatgaccacgcccaactgcgtgctgccatcntcgaggtcgttcgccagacgaagctcaaggtgctcatctgccccgaagaccgcacgcagatgaccttagggaaggaagtgctgttcgatcgcttgcccgacgacgtgaagccgcgcgtggtttggcgccccgactattggctcaccgacgaagcgctctcggtctacgtccgcagcgccgggctctttggtaacgagatgcattcgccgatcatgtgcatcggtaatggcgtccccgccatcgtctgccgctgggccgaacagacgtctaaaggcacgatgtggaaagacatcggccttggggagtggctctttgacctcgacgatgagacgcagctgccaggcatcgttcccgccgtcttaacgatggccaaagaccgcgcggcgtccctcgccaaagtgggcaaagctcaagccatcgtccaggcccgtcaggctgcggccatcgccgccctgcggaaggcgctctgagttcccttaggacgccttcgtgaagggattggcctccgtcgtcgctggtgccgctggacgggccatgcggacaatcacgaccataaagacaatggtcgcgaggcccgagagcagcagcagggccagtccgtagccttcggggttcgggctgaggtcaaaggtcagcggaccgtagagcttattccagagtgacacccgctgaggttggccgctcgccatccagcctaacaccaggtagaggtccgtgatcccgtaggccacgcagagcgcggcaatcttcaactgcttcatggcttacttcgcagctttcttaaagacgggcttttctttgtcgccaccgctcaggacgtaggccacgaggtcaaggatttcgtcctgcgtgagcatgctgaggagcatcggcggcatcggggagattgcgctgcgctcgatgctcttcacttccttg

SEQ ID NO: 971 - DNA, 4000 bp, Escherichia coli
  misc_feature (1)..(4): n is a, c, g, or t
  misc_feature (6)..(11): n is a, c, g, or t
  misc_feature (13)..(16): n is a, c, g, or t
  misc_feature (18)..(20): n is a, c, g, or t
  misc_feature (23)..(42): n is a, c, g, or t
  misc_feature (47)..(48): n is a, c, g, or t
  misc_feature (50)..(51): n is a, c, g, or t
  misc_feature (55)..(56): n is a, c, g, or t
  misc_feature (59)..(60): n is a, c, g, or t
  misc_feature (62)..(65): n is a, c, g, or t
  misc_feature (67)..(67): n is a, c, g, or t
  misc_feature (70)..(75): n is a, c, g, or t
  misc_feature (77)..(78): n is a, c, g, or t
  misc_feature (80)..(80): n is a, c, g, or t
  misc_feature (82)..(84): n is a, c, g, or t
  misc_feature (86)..(87): n is a, c, g, or t
  misc_feature (89)..(89): n is a, c, g, or t
  misc_feature (91)..(98): n is a, c, g, or t
  misc_feature (100)..(101): n is a, c, g, or t
  misc_feature (103)..(103): n is a, c, g, or t
  misc_feature (106)..(107): n is a, c, g, or t
  misc_feature (110)..(111): n is a, c, g, or t
  misc_feature (115)..(116): n is a, c, g, or t
  misc_feature (118)..(118): n is a, c, g, or t
  misc_feature (120)..(123): n is a, c, g, or t
  misc_feature (125)..(127): n is a, c, g, or t
  misc_feature (129)..(129): n is a, c, g, or t
  misc_feature (132)..(132): n is a, c, g, or t
  misc_feature (134)..(137): n is a, c, g, or t
  misc_feature (139)..(140): n is a, c, g, or t
  misc_feature (142)..(148): n is a, c, g, or t
  misc_feature (150)..(150): n is a, c, g, or t
  misc_feature (155)..(157): n is a, c, g, or t
  misc_feature (159)..(161): n is a, c, g, or t
  misc_feature (163)..(163): n is a, c, g, or t
  misc_feature (169)..(175): n is a, c, g, or t
  misc_feature (180)..(184): n is a, c, g, or t
  misc_feature (187)..(188): n is a, c, g, or t
  misc_feature (190)..(194): n is a, c, g, or t
  misc_feature (198)..(198): n is a, c, g, or t
  misc_feature (200)..(204): n is a, c, g, or t
  misc_feature (206)..(206): n is a, c, g, or t
  misc_feature (208)..(210): n is a, c, g, or t
  misc_feature (214)..(214): n is a, c, g, or t
  misc_feature (216)..(222): n is a, c, g, or t
  misc_feature (224)..(225): n is a, c, g, or t
  misc_feature (227)..(228): n is a, c, g, or t
  misc_feature (230)..(230): n is a, c, g, or t
  misc_feature (233)..(239): n is a, c, g, or t
  misc_feature (244)..(248): n is a, c, g, or t
  misc_feature (250)..(251): n is a, c, g, or t
  misc_feature (253)..(258): n is a, c, g, or t
  misc_feature (260)..(260): n is a, c, g, or t
  misc_feature (263)..(266): n is a, c, g, or t
  misc_feature (268)..(272): n is a, c, g, or t
  misc_feature (275)..(277): n is a, c, g, or t
  misc_feature (279)..(279): n is a, c, g, or t
  misc_feature (282)..(282): n is a, c, g, or t
  misc_feature (284)..(284): n is a, c, g, or t
  misc_feature (287)..(287): n is a, c, g, or t
  misc_feature (289)..(289): n is a, c, g, or t
  misc_feature (292)..(304): n is a, c, g, or t
  misc_feature (306)..(309): n is a, c, g, or t
  misc_feature (311)..(311): n is a, c, g, or t
  misc_feature (314)..(316): n is a, c, g, or t
  misc_feature (320)..(320): n is a, c, g, or t
  misc_feature (322)..(324): n is a, c, g, or t
  misc_feature (326)..(327): n is a, c, g, or t
  misc_feature (332)..(332): n is a, c, g, or t
  misc_feature (334)..(335): n is a, c, g, or t
  misc_feature (337)..(337): n is a, c, g, or t
  misc_feature (339)..(341): n is a, c, g, or t
  misc_feature (343)..(348): n is a, c, g, or t
  misc_feature (350)..(360): n is a, c, g, or t
  misc_feature (363)..(365): n is a, c, g, or t
  misc_feature (367)..(371): n is a, c, g, or t
  misc_feature (374)..(375): n is a, c, g, or t
  misc_feature (378)..(381): n is a, c, g, or t
  misc_feature (383)..(388): n is a, c, g, or t
  misc_feature (391)..(396): n is a, c, g, or t
  misc_feature (398)..(398): n is a, c, g, or t
  misc_feature (400)..(401): n is a, c, g, or t
  misc_feature (403)..(404): n is a, c, g, or t
  misc_feature (406)..(410): n is a, c, g, or t
  misc_feature (412)..(413): n is a, c, g, or t
  misc_feature (415)..(416): n is a, c, g, or t
  misc_feature (418)..(422): n is a, c, g, or t
  misc_feature (424)..(435): n is a, c, g, or t
  misc_feature (437)..(438): n is a, c, g, or t
  misc_feature (441)..(442): n is a, c, g, or t
  misc_feature (444)..(444): n is a, c, g, or t
  misc_feature (447)..(454): n is a, c, g, or t
  misc_feature (458)..(460): n is a, c, g, or t
  misc_feature (463)..(471): n is a, c, g, or t
  misc_feature (474)..(476): n is a, c, g, or t
  misc_feature (478)..(482): n is a, c, g, or t
  misc_feature (484)..(484): n is a, c, g, or t
  misc_feature (486)..(488): n is a, c, g, or t
  misc_feature (491)..(495): n is a, c, g, or t
  misc_feature (497)..(497): n is a, c, g, or t
  misc_feature (499)..(503): n is a, c, g, or t
  misc_feature (505)..(508): n is a, c, g, or t
  misc_feature (511)..(514): n is a, c, g, or t
  misc_feature (517)..(521): n is a, c, g, or t
  misc_feature (525)..(526): n is a, c, g, or t
  misc_feature (528)..(533): n is a, c, g, or t
  misc_feature (538)..(538): n is a, c, g, or t
  misc_feature (540)..(540): n is a, c, g, or t
  misc_feature (542)..(546): n is a, c, g, or t
  misc_feature (548)..(556): n is a, c, g, or t
  misc_feature (558)..(561): n is a, c, g, or t
  misc_feature (563)..(572): n is a, c, g, or t
  misc_feature (574)..(576): n is a, c, g, or t
  misc_feature (578)..(583): n is a, c, g, or t
  misc_feature (587)..(590): n is a, c, g, or t
  misc_feature (592)..(600): n is a, c, g, or t
  misc_feature (602)..(604): n is a, c, g, or t
  misc_feature (606)..(606): n is a, c, g, or t
  misc_feature (608)..(608): n is a, c, g, or t
  misc_feature (612)..(614): n is a, c, g, or t
  misc_feature (616)..(620): n is a, c, g, or t
  misc_feature (622)..(622): n is a, c, g, or t
  misc_feature (625)..(627): n is a, c, g, or t
  misc_feature (631)..(632): n is a, c, g, or t
  misc_feature (634)..(634): n is a, c, g, or t
  misc_feature (637)..(639): n is a, c, g, or t
  misc_feature (642)..(643): n is a, c, g, or t
  misc_feature (645)..(645): n is a, c, g, or t
  misc_feature (648)..(655): n is a, c, g, or t
  misc_feature (657)..(660): n is a, c, g, or t
  misc_feature (666)..(668): n is a, c, g, or t
  misc_feature (671)..(675): n is a, c, g, or t
  misc_feature (677)..(679): n is a, c, g, or t
  misc_feature (681)..(682): n is a, c, g, or t
  misc_feature (685)..(692): n is a, c, g, or t
  misc_feature (696)..(696): n is a, c, g, or t
  misc_feature (700)..(700): n is a, c, g, or t
  misc_feature (702)..(708): n is a, c, g, or t
  misc_feature (710)..(716): n is a, c, g, or t
  misc_feature (718)..(718): n is a, c, g, or t
  misc_feature (720)..(720): n is a, c, g, or t
  misc_feature (723)..(723): n is a, c, g, or t
  misc_feature (725)..(726): n is a, c, g, or t
  misc_feature (728)..(728): n is a, c, g, or t
  misc_feature (730)..(743): n is a, c, g, or t
  misc_feature (745)..(747): n is a, c, g, or t
  misc_feature (749)..(755): n is a, c, g, or t
  misc_feature (757)..(760): n is a, c, g, or t
  misc_feature (762)..(764): n is a, c, g, or t
  misc_feature (768)..(770): n is a, c, g, or t
  misc_feature (772)..(781): n is a, c, g, or t
  misc_feature (783)..(791): n is a, c, g, or t
  misc_feature (793)..(802): n is a, c, g, or t
  misc_feature (804)..(805): n is a, c, g, or t
  misc_feature (807)..(808): n is a, c, g, or t
  misc_feature (810)..(812): n is a, c, g, or t
  misc_feature (814)..(821): n is a, c, g, or t
  misc_feature (823)..(828): n is a, c, g, or t
  misc_feature (834)..(850): n is a, c, g, or t
  misc_feature (852)..(852): n is a, c, g, or t
  misc_feature (854)..(856): n is a, c, g, or t
  misc_feature (858)..(858): n is a, c, g, or t
  misc_feature (860)..(862): n is a, c, g, or t
  misc_feature (864)..(866): n is a, c, g, or t
  misc_feature (869)..(879): n is a, c, g, or t
  misc_feature (881)..(887): n is a, c, g, or t
  misc_feature (890)..(896): n is a, c, g, or t
  misc_feature (898)..(898): n is a, c, g, or t
  misc_feature (901)..(907): n is a, c, g, or t
  misc_feature (909)..(910): n is a, c, g, or t
  misc_feature (912)..(912): n is a, c, g, or t
  misc_feature (914)..(921): n is a, c, g, or t
  misc_feature (923)..(929): n is a, c, g, or t
  misc_feature (932)..(932): n is a, c, g, or t
  misc_feature (934)..(935): n is a, c, g, or t
  misc_feature (937)..(940): n is a, c, g, or t
  misc_feature (942)..(942): n is a, c, g, or t
  misc_feature (944)..(944): n is a, c, g, or t
  misc_feature (948)..(955): n is a, c, g, or t
  misc_feature (957)..(957): n is a, c, g, or t
  misc_feature (959)..(973): n is a, c, g, or t
  misc_feature (975)..(976): n is a, c, g, or t
  misc_feature (978)..(978): n is a, c, g, or t
  misc_feature (980)..(984): n is a, c, g, or t
  misc_feature (987)..(988): n is a, c, g, or t
  misc_feature (991)..(992): n is a, c, g, or t
  misc_feature (994)..(1003): n is a, c, g, or t
  misc_feature (1005)..(1010): n is a, c, g, or t
  misc_feature (1012)..(1013): n is a, c, g, or t
  misc_feature (1015)..(1015): n is a, c, g, or t
  misc_feature (1018)..(1020): n is a, c, g, or t
  misc_feature (1022)..(1024): n is a, c, g, or t
  misc_feature (1026)..(1028): n is a, c, g, or t
  misc_feature (1030)..(1030): n is a, c, g, or t
  misc_feature (1032)..(1033): n is a, c, g, or t
  misc_feature (1037)..(1041): n is a, c, g, or t
  misc_feature (1044)..(1045): n is a, c, g, or t
  misc_feature (1049)..(1053): n is a, c, g, or t
  misc_feature (1055)..(1055): n is a, c, g, or t
  misc_feature (1059)..(1062): n is a, c, g, or t
  misc_feature (1064)..(1069): n is a, c, g, or t
  misc_feature (1071)..(1073): n is a, c, g, or t
  misc_feature (1078)..(1081): n is a, c, g, or t
  misc_feature (1083)..(1083): n is a, c, g, or t
  misc_feature (1088)..(1094): n is a, c, g, or t
  misc_feature (1096)..(1099): n is a, c, g, or t
  misc_feature (1101)..(1101): n is a, c, g, or t
  misc_feature (1105)..(1105): n is a, c, g, or t
  misc_feature (1107)..(1107): n is a, c, g, or t
  misc_feature (1111)..(1112): n is a, c, g, or t
  misc_feature (1114)..(1116): n is a, c, g, or t
  misc_feature (1118)..(1118): n is a, c, g, or t
  misc_feature (1123)..(1123): n is a, c, g, or t
  misc_feature (1131)..(1131): n is a, c, g, or t
  misc_feature (1141)..(1144): n is a, c, g, or t
  misc_feature (1146)..(1149): n is a, c, g, or t
  misc_feature (1152)..(1152): n is a, c, g, or t
  misc_feature (1154)..(1154): n is a, c, g, or t
  misc_feature (1156)..(1159): n is a, c, g, or t
  misc_feature (1161)..(1165): n is a, c, g, or t
  misc_feature (1167)..(1167): n is a, c, g, or t
  misc_feature (1171)..(1174): n is a, c, g, or t
  misc_feature (1176)..(1181): n is a, c, g, or t
  misc_feature (1183)..(1194): n is a, c, g, or t
  misc_feature (1196)..(1199): n is a, c, g, or t
  misc_feature (1357)..(1357): n is a, c, g, or t
  misc_feature (1624)..(1624): n is a, c, g, or t
  misc_feature (1651)..(1651): n is a, c, g, or t
  misc_feature (1663)..(1663): n is a, c, g, or t
  misc_feature (1669)..(1669): n is a, c, g, or t
  misc_feature (1672)..(1674): n is a, c, g, or t
  misc_feature (1681)..(1681): n is a, c, g, or t
  misc_feature (1691)..(1691): n is a, c, g, or t
  misc_feature (1989)..(1990): n is a, c, g, or t
  misc_feature (2518)..(2518): n is a, c, g, or t
  misc_feature (3269)..(3269): n is a, c, g, or t
  misc_feature (3286)..(3286): n is a, c, g, or t
  misc_feature (3382)..(3382): n is a, c, g, or t
  misc_feature (3538)..(3538): n is a, c, g, or t
  misc_feature (3640)..(3640): n is a, c, g, or t
  misc_feature (3790)..(3790): n is a, c, g, or t
nnnntnnnnnnannnngnnnagnnnnnnnnnnnnnnnnnnnnttttnnannaaannaanntnnnnanggnnnnnntnnantnnnanntngnnnnnnnnanncngannaanntaanntntnnnntnnnanaanannnngnnannnnnnnancggannncnnnanaaaaannnnnnngaaannnnnaanngnnnnnaaangnnnnntntnnngaantnnnnnnncnntnngnaannnnnnnaaaannnnntnnannnnnnangannnnannnnnaannntnttnanttnanggnnnnnnnnnnnnngnnnnanaannntttnannntnnttttnannantnnnannnnnntnnnnnnnnnnngtnnntnnnnnaanngtnnnntnnnnnnaannnnnngnanngnnannnnnannannannnnnannnnnnnnnnnnannaanngnaannnnnnnnaaannnagnnnnnnnnnaannnannnnngntnnnttnnnnngntnnnnntnnnnaannnnggnnnnnaatnntnnnnnnaaaantnannnnntnnnnnnnnnannnntnnnnnnnnnngnnngnnnnnnaaannnngnnnnnnnnnannnananttannntnnnnngnttnnngaannanttnnngannanaannnnnnnnannnnaacaannntgnnnnngnnntnnatnnnnnnnntttnaaanannnnnnnannnnnnngnanttnanngntnnnnnnnnnnnnnnannngnnnnnnntnnnnannnaaannnannnnnnnnnntnnnnnnnnntnnnnnnnnnnannannannnannnnnnnntnnnnnnttaaannnnnnnnnnnnnnnnnangnnnantnnntnnnttnnnnnnnnnnncnnnnnnnaannnnnnnanccnnnnnnntnnantnnnnnnnngnnnnnnnttngnngnnnntngnaaannnnnnnnangnnnnnnnnnnnnnnngnntngnnnnnggnnttnnannnnnnnnnnannnnnnanngnttnnnannngnnnananntttnnnnnaannaaannnnntntgannnnannnnnntnnnaaaannnnanaaagnnnnnnngnnnngnaaantnaatnnannngnaaaanaaaaaatngaaacaccannnntnnnnaantncnnnnannnnntnaaannnnannnnnntnnnnnnnnnnnntnnnnttttgaaaagaagtttagaggatacgaaaagaatgtcgacgaaagcagaagatacacagaaaaacatattagatacagccagaaaacattttctgaaagatggtttgacaggagcatctttaagaaatattgtaaaagatgcagggcttactactggngcattttacaaatattatccgacgaaagaggcactttttgatgcactgacggatccttatatggaacatatttatcagatttatgaccagatcgttgaggagtttgaaaagctttctgccagtgatcagacaaggaatatgtcggatacatccagtgatgggatggagcagatggttgattatatctatgatcattatgataatttcagattattgttgaaatgcggagacagtggaaaatttgaattattcatacacaatatggtngagcgggaaatgaagtccagcctgaantatatggaaaanatgaangannncggtgtnaaaataccgnttgtagaggaaagccttatgcatatgatctatacgggatttttttcatcagtatttcagatcattgagcatgatatagacagggagactgcaaagaaaaatgtacatcaactgaaagaatttaatacaggtggctgggaacgattgtggaatattgaatttccagtataactgatgcaggaattctgaataggttatgtgtgttgcaggttctggatttctgaataaagttcagacaggataataatatcaggtggttgatgccagtaaaccacctattttattatatgttggttagnncgaactaacagaaggtaaaacaataaaacgaaacaataaaacgaacgtaaggagtgaacagatgtgaaagaaaaaaagaagtcggcagtcagctggatcctgacgtgggccggacaaaaaagaattgcctatgtgtggagtgtgttacttgcaataggaaatgtgatttttaagattttgccgtattttattattgcagatgtagtaaagctgtttttaaatggtgaaaaggagtttgaaatatatcttgcaaaagcggttctgattgcattatcgtttatcattgcagaactgcttcattcactttcgacagcattgtcacataaagcaacgtttgcagtacttgcaaatataagaaaatcctgctgtgacaagctggcgcgggtacctcttggctatgtgaaagacacaccttccggtacatttaaaaatattatggtggaaagaatcgacagtatcgagacaacactggcgcatattgtcccggaattcacgtccaatctgctggcaccgattgtgattttgatntatttcttcctgacagactggagactggcactctggtcattggtgccggttatagtgggatttctttcctattttggaatgatgctggattataaaccaagcttcgagagaacggttcagacaacaaaagatctgaatgatgcggcagtggaatatattgacggaatcgaagtgatcaaggcatttggaaagacagaaagttcttatgcaaaatttacaaaggcggctatggcttatgcagattcctttatttcctggatgaaacggtgctcgatctttcatggactgatgatggtggtcacaccttatacgcttcttacggtattgccgtttggggcacattatgtagccaatggaacacttgcgatttcagattttgtcatctgcattattttatcacttggaatcgttggaccgttgatcacagtgggttcctatacagatgatcttggcaagatcggagtgattgttggtgaagtggcaggaattctggaacagccggagcttgaacgtccagagaaaagtaaaagtgttccaaaagataactccgttactcttgaagatgtcagatttggttatcacgacaaagaaatcctgcacggagtaactatggagctgaaagcaggaacggtaaatgcaatcgtaggaccttccggaagcggcaagtcgaccatcgcaaagctgattgcgtccctgtgggatgtggattccggaagcatcaaaatcggtggagttgatgtcaaagaactgncatttgcagattttaancggaaaattgcatatgttgcacaggacaattatctgtttaatgaaacagtccgtgaaaatatcagacagggaaatccggatgctacagatgaacanatcatcgaggtgacaaagaaaagtggatgctatgaatttatcatgcagttggagaatggatttgatacggttgtaggaggtgcaggaggacatctgtcaggtggcgagaggcagcgtatctccattgcaagagcaatgttaaaggatgctccgatngtgatccttgatgaggcaactgcctacacagatccggaaaatgaggcaattctgcagaattctatcgcaaaactggtagcagggaagaccctgatcgtaatngcacacagactttctactgttaaggacagtgaccagatctttgttgtaaatgatggaaatgtaacagcacatggcacacatgaggaacttctggtgtcatgcccgctttataaggaaatgtggaatgcccatatttctgtaaaagatacngtgaaggagggagaatgatatgtttgggattctggcaaaattctttcgtttttcaggcagggaaaatggcaataaatttaaactgtcgatagtgatcggactcatagaggctcttgcctcagcaatgaagattccggctattatgtacatactgattggtctgctgagtgggaaaccgacaggaaaatatattggaggctccgttgcgat

SEQ ID NO: 972 - DNA, 4000 bp, Escherichia coli
  misc_feature (242)..(242): n is a, c, g, or t
  misc_feature (287)..(287): n is a, c, g, or t
  misc_feature (290)..(290): n is a, c, g, or t
  misc_feature (598)..(598): n is a, c, g, or t
  misc_feature (1300)..(1300): n is a, c, g, or t
  misc_feature (1321)..(1321): n is a, c, g, or t
  misc_feature (1330)..(1330): n is a, c, g, or t
  misc_feature (1762)..(1762): n is a, c, g, or t
  misc_feature (1768)..(1768): n is a, c, g, or t
  misc_feature (2191)..(2193): n is a, c, g, or t
  misc_feature (2197)..(2197): n is a, c, g, or t
  misc_feature (2199)..(2199): n is a, c, g, or t
  misc_feature (2205)..(2205): n is a, c, g, or t
  misc_feature (2217)..(2217): n is a, c, g, or t
  misc_feature (2220)..(2220): n is a, c, g, or t
  misc_feature (2224)..(2224): n is a, c, g, or t
  misc_feature (2228)..(2228): n is a, c, g, or t
  misc_feature (2232)..(2232): n is a, c, g, or t
  misc_feature (2240)..(2240): n is a, c, g, or t
  misc_feature (2249)..(2249): n is a, c, g, or t
  misc_feature (2251)..(2251): n is a, c, g, or t
  misc_feature (2255)..(2255): n is a, c, g, or t
  misc_feature (2262)..(2262): n is a, c, g, or t
  misc_feature (2272)..(2272): n is a, c, g, or t
  misc_feature (2274)..(2274): n is a, c, g, or t
  misc_feature (2279)..(2279): n is a, c, g, or t
  misc_feature (2281)..(2281): n is a, c, g, or t
  misc_feature (2288)..(2288): n is a, c, g, or t
  misc_feature (2298)..(2298): n is a, c, g, or t
  misc_feature (2301)..(2301): n is a, c, g, or t
  misc_feature (2311)..(2311): n is a, c, g, or t
  misc_feature (2319)..(2319): n is a, c, g, or t
  misc_feature (2323)..(2323): n is a, c, g, or t
  misc_feature (2325)..(2325): n is a, c, g, or t
  misc_feature (2328)..(2331): n is a, c, g, or t
  misc_feature (2338)..(2338): n is a, c, g, or t
  misc_feature (2341)..(2342): n is a, c, g, or t
  misc_feature (2345)..(2345): n is a, c, g, or t
  misc_feature (2350)..(2350): n is a, c, g, or t
  misc_feature (2352)..(2352): n is a, c, g, or t
  misc_feature (2363)..(2363): n is a, c, g, or t
  misc_feature (2365)..(2366): n is a, c, g, or t
  misc_feature (2370)..(2370): n is a, c, g, or t
  misc_feature (2374)..(2374): n is a, c, g, or t
  misc_feature (2376)..(2376): n is a, c, g, or t
  misc_feature (2383)..(2385): n is a, c, g, or t
  misc_feature (2388)..(2388): n is a, c, g, or t
  misc_feature (2390)..(2390): n is a, c, g, or t
  misc_feature (2407)..(2408): n is a, c, g, or t
  misc_feature (2423)..(2423): n is a, c, g, or t
  misc_feature (2432)..(2433): n is a, c, g, or t
  misc_feature (2438)..(2438): n is a, c, g, or t
  misc_feature (2440)..(2440): n is a, c, g, or t
  misc_feature (2443)..(2444): n is a, c, g, or t
  misc_feature (2448)..(2448): n is a, c, g, or t
  misc_feature (2450)..(2450): n is a, c, g, or t
  misc_feature (2458)..(2458): n is a, c, g, or t
  misc_feature (2460)..(2460): n is a, c, g, or t
  misc_feature (2464)..(2464): n is a, c, g, or t
  misc_feature (2467)..(2467): n is a, c, g, or t
  misc_feature (2477)..(2477): n is a, c, g, or t
  misc_feature (2479)..(2479): n is a, c, g, or t
  misc_feature (2490)..(2490): n is a, c, g, or t
  misc_feature (2492)..(2492): n is a, c, g, or t
  misc_feature (2496)..(2496): n is a, c, g, or t
  misc_feature (2501)..(2501): n is a, c, g, or t
  misc_feature (2505)..(2505): n is a, c, g, or t
  misc_feature (2509)..(2510): n is a, c, g, or t
  misc_feature (2512)..(2513): n is a, c, g, or t
  misc_feature (2517)..(2517): n is a, c, g, or t
  misc_feature (2521)..(2521): n is a, c, g, or t
  misc_feature (2532)..(2532): n is a, c, g, or t
  misc_feature (2534)..(2534): n is a, c, g, or t
  misc_feature (2539)..(2539): n is a, c, g, or t
  misc_feature (2541)..(2541): n is a, c, g, or t
  misc_feature (2543)..(2543): n is a, c, g, or t
  misc_feature (2552)..(2553): n is a, c, g, or t
  misc_feature (2556)..(2556): n is a, c, g, or t
  misc_feature (2560)..(2561): n is a, c, g, or t
  misc_feature (2565)..(2565): n is a, c, g, or t
  misc_feature (2568)..(2569): n is a, c, g, or t
  misc_feature (2578)..(2578): n is a, c, g, or t
  misc_feature (2581)..(2581): n is a, c, g, or t
  misc_feature (2585)..(2587): n is a, c, g, or t
  misc_feature (2591)..(2591): n is a, c, g, or t
  misc_feature (2595)..(2595): n is a, c, g, or t
  misc_feature (2597)..(2597): n is a, c, g, or t
  misc_feature (2599)..(2599): n is a, c, g, or t
  misc_feature (2610)..(2611): n is a, c, g, or t
  misc_feature (2615)..(2615): n is a, c, g, or t
  misc_feature (2620)..(2620): n is a, c, g, or t
  misc_feature (2623)..(2623): n is a, c, g, or t
  misc_feature (2627)..(2628): n is a, c, g, or t
  misc_feature (2631)..(2631): n is a, c, g, or t
  misc_feature (2634)..(2635): n is a, c, g, or t
  misc_feature (2645)..(2646): n is a, c, g, or t
  misc_feature (2648)..(2649): n is a, c, g, or t
  misc_feature (2652)..(2652): n is a, c, g, or t
  misc_feature (2656)..(2656): n is a, c, g, or t
  misc_feature (2658)..(2658): n is a, c, g, or t
  misc_feature (2662)..(2662): n is a, c, g, or t
  misc_feature (2664)..(2664): n is a, c, g, or t
  misc_feature (2669)..(2669): n is a, c, g, or t
  misc_feature (2671)..(2672): n is a, c, g, or t
  misc_feature (2679)..(2679): n is a, c, g, or t
  misc_feature (2683)..(2686): n is a, c, g, or t
  misc_feature (2693)..(2693): n is a, c, g, or t
  misc_feature (2699)..(2699): n is a, c, g, or t
  misc_feature (2704)..(2704): n is a, c, g, or t
  misc_feature (2712)..(2712): n is a, c, g, or t
  misc_feature (2714)..(2714): n is a, c, g, or t
  misc_feature (2719)..(2720): n is a, c, g, or t
  misc_feature (2723)..(2726): n is a, c, g, or t
  misc_feature (2728)..(2728): n is a, c, g, or t
  misc_feature (2731)..(2732): n is a, c, g, or t
  misc_feature (2734)..(2734): n is a, c, g, or t
  misc_feature (2736)..(2736): n is a, c, g, or t
  misc_feature (2740)..(2742): n is a, c, g, or t
  misc_feature (2744)..(2745): n is a, c, g, or t
  misc_feature (2747)..(2747): n is a, c, g, or t
  misc_feature (2753)..(2753): n is a, c, g, or t
  misc_feature (2761)..(2762): n is a, c, g, or t
  misc_feature (2767)..(2768): n is a, c, g, or t
  misc_feature (2773)..(2774): n is a, c, g, or t
  misc_feature (2777)..(2777): n is a, c, g, or t
  misc_feature (2781)..(2781): n is a, c, g, or t
  misc_feature (2783)..(2783): n is a, c, g, or t
  misc_feature (2785)..(2788): n is a, c, g, or t
  misc_feature (2800)..(2800): n is a, c, g, or t
  misc_feature (2812)..(2812): n is a, c, g, or t
  misc_feature (2815)..(2816): n is a, c, g, or t
  misc_feature (2818)..(2818): n is a, c, g, or t
  misc_feature (2821)..(2821): n is a, c, g, or t
  misc_feature (2824)..(2827): n is a, c, g, or t
  misc_feature (2829)..(2829): n is a, c, g, or t
  misc_feature (2839)..(2839): n is a, c, g, or t
  misc_feature (2844)..(2845): n is a, c, g, or t
  misc_feature (2849)..(2854): n is a, c, g, or t
  misc_feature (2856)..(2858): n is a, c, g, or t
  misc_feature (2862)..(2862): n is a, c, g, or t
  misc_feature (2867)..(2867): n is a, c, g, or t
  misc_feature (2870)..(2871): n is a, c, g, or t
  misc_feature (2873)..(2873): n is a, c, g, or t
  misc_feature (2875)..(2881): n is a, c, g, or t
  misc_feature (2885)..(2886): n is a, c, g, or t
  misc_feature (2894)..(2895): n is a, c, g, or t
  misc_feature (2897)..(2897): n is a, c, g, or t
  misc_feature (2902)..(2902): n is a, c, g, or t
  misc_feature (2909)..(2909): n is a, c, g, or t
  misc_feature (2916)..(2916): n is a, c, g, or t
  misc_feature (2918)..(2919): n is a, c, g, or t
  misc_feature (2923)..(2924): n is a, c, g, or t
  misc_feature (2927)..(2928): n is a, c, g, or t
  misc_feature (2940)..(2940): n is a, c, g, or t
  misc_feature (2945)..(2945): n is a, c, g, or t
  misc_feature (2949)..(2950): n is a, c, g, or t
  misc_feature (2955)..(2955): n is a, c, g, or t
  misc_feature (2959)..(2962): n is a, c, g, or t
  misc_feature (2966)..(2966): n is a, c, g, or t
  misc_feature (2968)..(2968): n is a, c, g, or t
  misc_feature (2971)..(2971): n is a, c, g, or t
  misc_feature (2974)..(2974): n is a, c, g, or t
  misc_feature (2984)..(2984): n is a, c, g, or t
  misc_feature (2987)..(2987): n is a, c, g, or t
  misc_feature (2990)..(2990): n is a, c, g, or t
  misc_feature (3000)..(3000): n is a, c, g, or t
  misc_feature (3005)..(3005): n is a, c, g, or t
  misc_feature (3011)..(3011): n is a, c, g, or t
  misc_feature (3015)..(3015): n is a, c, g, or t
  misc_feature (3017)..(3017): n is a, c, g, or t
  misc_feature (3024)..(3025): n is a, c, g, or t
  misc_feature (3028)..(3028): n is a, c, g, or t
  misc_feature (3033)..(3033): n is a, c, g, or t
  misc_feature (3038)..(3038): n is a, c, g, or t
  misc_feature (3040)..(3041): n is a, c, g, or t
  misc_feature (3052)..(3052): n is a, c, g, or t
  misc_feature (3057)..(3057): n is a, c, g, or t
  misc_feature (3060)..(3061): n is a, c, g, or t
  misc_feature (3071)..(3071): n is a, c, g, or t
  misc_feature (3077)..(3077): n is a, c, g, or t
  misc_feature (3082)..(3085): n is a, c, g, or t
  misc_feature (3089)..(3089): n is a, c, g, or t
  misc_feature (3096)..(3096): n is a, c, g, or t
  misc_feature (3101)..(3103): n is a, c, g, or t
  misc_feature (3105)..(3106): n is a, c, g, or t
  misc_feature (3109)..(3112): n is a, c, g, or t
  misc_feature (3119)..(3119): n is a, c, g, or t
  misc_feature (3125)..(3125): n is a, c, g, or t
  misc_feature (3131)..(3132): n is a, c, g, or t
  misc_feature (3136)..(3136): n is a, c, g, or t
  misc_feature (3140)..(3140): n is a, c, g, or t
  misc_feature (3149)..(3149): n is a, c, g, or t
  misc_feature (3152)..(3152): n is a, c, g, or t
  misc_feature (3154)..(3154): n is a, c, g, or t
  misc_feature (3157)..(3160): n is a, c, g, or t
  misc_feature (3162)..(3162): n is a, c, g, or t
  misc_feature (3183)..(3183): n is a, c, g, or t
  misc_feature (3194)..(3194): n is a, c, g, or t
  misc_feature (3203)..(3204): n is a, c, g, or t
  misc_feature (3214)..(3214): n is a, c, g, or t
  misc_feature (3216)..(3216): n is a, c, g, or t
  misc_feature (3218)..(3218): n is a, c, g, or t
  misc_feature (3221)..(3223): n is a, c, g, or t
  misc_feature (3227)..(3228): n is a, c, g, or t
  misc_feature (3233)..(3233): n is a, c, g, or t
  misc_feature (3240)..(3240): n is a, c, g, or t
  misc_feature (3242)..(3243): n is a, c, g, or t
  misc_feature (3254)..(3255): n is a, c, g, or t
  misc_feature (3258)..(3259): n is a, c, g, or t
  misc_feature (3262)..(3262): n is a, c, g, or t
  misc_feature (3265)..(3265): n is a, c, g, or t
  misc_feature (3267)..(3267): n is a, c, g, or t
  misc_feature (3270)..(3270): n is a, c, g, or t
  misc_feature (3272)..(3276): n is a, c, g, or t
  misc_feature (3282)..(3282): n is a, c, g, or t
  misc_feature (3285)..(3285): n is a, c, g, or t
  misc_feature (3290)..(3290): n is a, c, g, or t
  misc_feature (3295)..(3295): n is a, c, g, or t
  misc_feature (3297)..(3297): n is a, c, g, or t
  misc_feature (3299)..(3299): n is a, c, g, or t
  misc_feature (3302)..(3303): n is a, c, g, or t
  misc_feature (3306)..(3306): n is a, c, g, or t
  misc_feature (3311)..(3311): n is a, c, g, or t
  misc_feature (3314)..(3314): n is a, c, g, or t
  misc_feature (3324)..(3324): n is a, c, g, or t
  misc_feature (3326)..(3327): n is a, c, g, or t
  misc_feature (3332)..(3332): n is a, c, g, or t
  misc_feature (3335)..(3335): n is a, c, g, or t
  misc_feature (3337)..(3338): n is a, c, g, or t
  misc_feature (3351)..(3351): n is a, c, g, or t
  misc_feature (3356)..(3356): n is a, c, g, or t
  misc_feature (3361)..(3361): n is a, c, g, or t
  misc_feature (3368)..(3369): n is a, c, g, or t
  misc_feature (3377)..(3377): n is a, c, g, or t
  misc_feature (3381)..(3382): n is a, c, g, or t
  misc_feature (3388)..(3388): n is a, c, g, or t
  misc_feature (3393)..(3393): n is a, c, g, or t
  misc_feature (3395)..(3395): n is a, c, g, or t
  misc_feature (3397)..(3397): n is a, c, g, or t
  misc_feature (3402)..(3405): n is a, c, g, or t
  misc_feature (3409)..(3409): n is a, c, g, or t
  misc_feature (3413)..(3413): n is a, c, g, or t
  misc_feature (3415)..(3415): n is a, c, g, or t
  misc_feature (3417)..(3417): n is a, c, g, or t
  misc_feature (3422)..(3423): n is a, c, g, or t
  misc_feature (3426)..(3426): n is a, c, g, or t
  misc_feature (3438)..(3438): n is a, c, g, or t
  misc_feature (3440)..(3442): n is a, c, g, or t
  misc_feature (3444)..(3446): n is a, c, g, or t
  misc_feature (3449)..(3449): n is a, c, g, or t
  misc_feature (3451)..(3456): n is a, c, g, or t
  misc_feature (3464)..(3464): n is a, c, g, or t
  misc_feature (3466)..(3466): n is a, c, g, or t
  misc_feature (3474)..(3474): n is a, c, g, or t
  misc_feature (3481)..(3481): n is a, c, g, or t
  misc_feature (3487)..(3487): n is a, c, g, or t
  misc_feature (3490)..(3490): n is a, c, g, or t
  misc_feature (3493)..(3493): n is a, c, g, or t
  misc_feature (3495)..(3495): n is a, c, g, or t
  misc_feature (3502)..(3502): n is a, c, g, or t
  misc_feature (3505)..(3507): n is a, c, g, or t
  misc_feature (3510)..(3511): n is a, c, g, or t
  misc_feature (3516)..(3516): n is a, c, g, or t
  misc_feature (3519)..(3519): n is a, c, g, or t
  misc_feature (3528)..(3528): n is a, c, g, or t
  misc_feature (3534)..(3534): n is a, c, g, or t
  misc_feature (3538)..(3538): n is a, c, g, or t
  misc_feature (3540)..(3541): n is a, c, g, or t
  misc_feature (3544)..(3545): n is a, c, g, or t
  misc_feature (3549)..(3549): n is a, c, g, or t
  misc_feature (3551)..(3552): n is a, c, g, or t
  misc_feature (3557)..(3560): n is a, c, g, or t
  misc_feature (3563)..(3563): n is a, c, g, or t
  misc_feature (3567)..(3567): n is a, c, g, or t
  misc_feature (3570)..(3572): n is a, c, g, or t
  misc_feature (3580)..(3582): n is a, c, g, or t
  misc_feature (3586)..(3589): n is a, c, g, or t
  misc_feature (3596)..(3597): n is a, c, g, or t
  misc_feature (3601)..(3601): n is a, c, g, or t
  misc_feature (3606)..(3606): n is a, c, g, or t
  misc_feature (3608)..(3608): n is a, c, g, or t
  misc_feature (3610)..(3610): n is a, c, g, or t
  misc_feature (3613)..(3613): n is a, c, g, or t
  misc_feature (3616)..(3618): n is a, c, g, or t
  misc_feature (3620)..(3620): n is a, c, g, or t
  misc_feature (3623)..(3623): n is a, c, g, or t
  misc_feature (3629)..(3632): n is a, c, g, or t
  misc_feature (3634)..(3635): n is a, c, g, or t
  misc_feature (3640)..(3640): n is a, c, g, or t
  misc_feature (3643)..(3644): n is a, c, g, or t
  misc_feature (3672)..(3673): n is a, c, g, or t
  misc_feature (3685)..(3685): n is a, c, g, or t
  misc_feature (3689)..(3690): n is a, c, g, or t
  misc_feature (3692)..(3693): n is a, c, g, or t
  misc_feature (3699)..(3699): n is a, c, g, or t
  misc_feature (3701)..(3701): n is a, c, g, or t
  misc_feature (3706)..(3706): n is a, c, g, or t
  misc_feature (3718)..(3718): n is a, c, g, or t
  misc_feature (3721)..(3722): n is a, c, g, or t
  misc_feature (3725)..(3726): n is a, c, g, or t
  misc_feature (3732)..(3732): n is a, c, g, or t
  misc_feature (3734)..(3736): n is a, c, g, or t
  misc_feature (3739)..(3739): n is a, c, g, or t
  misc_feature (3742)..(3744): n is a, c, g, or t
  misc_feature (3747)..(3747): n is a, c, g, or t
  misc_feature (3753)..(3753): n is a, c, g, or t
  misc_feature (3757)..(3758): n is a, c, g, or t
  misc_feature (3761)..(3761): n is a, c, g, or t
  misc_feature (3763)..(3763): n is a, c, g, or t
  misc_feature (3767)..(3767): n is a, c, g, or t
  misc_feature (3769)..(3770): n is a, c, g, or t
  misc_feature (3773)..(3773): n is a, c, g, or t
  misc_feature (3775)..(3775): n is a, c, g, or t
  misc_feature (3777)..(3777): n is a, c, g, or t
  misc_feature (3783)..(3784): n is a, c, g, or t
  misc_feature (3787)..(3791): n is a, c, g, or t
  misc_feature (3796)..(3796): n is a, c, g, or t
  misc_feature (3808)..(3808): n is a, c, g, or t
  misc_feature (3811)..(3811): n is a, c, g, or t
  misc_feature (3814)..(3816): n is a, c, g, or t
  misc_feature (3818)..(3818): n is a, c, g, or t
  misc_feature (3820)..(3820): n is a, c, g, or t
  misc_feature (3827)..(3828): n is a, c, g, or t
  misc_feature (3850)..(3850): n is a, c, g, or t
  misc_feature (3853)..(3853): n is a, c, g, or t
  misc_feature (3857)..(3858): n is a, c, g, or t
  misc_feature (3861)..(3861): n is a, c, g, or t
  misc_feature (3864)..(3864): n is a, c, g, or t
  misc_feature (3868)..(3868): n is a, c, g, or t
  misc_feature (3870)..(3871): n is a, c, g, or t
  misc_feature (3875)..(3876): n is a, c, g, or t
  misc_feature (3880)..(3881): n is a, c, g, or t
  misc_feature (3884)..(3884): n is a, c, g, or t
  misc_feature (3886)..(3887): n is a, c, g, or t
  misc_feature (3889)..(3889): n is a, c, g, or t
  misc_feature (3891)..(3891): n is a, c, g, or t
  misc_feature (3893)..(3893): n is a, c, g, or t
  misc_feature (3898)..(3901): n is a, c, g, or t
  misc_feature (3903)..(3907): n is a, c, g, or t
  misc_feature (3911)..(3911): n is a, c, g, or t
  misc_feature (3920)..(3920): n is a, c, g, or t
  misc_feature (3923)..(3923): n is a, c, g, or t
  misc_feature (3925)..(3925): n is a, c, g, or t
  misc_feature (3927)..(3928): n is a, c, g, or t
  misc_feature (3930)..(3931): n is a, c, g, or t
  misc_feature (3936)..(3939): n is a, c, g, or t
  misc_feature (3942)..(3942): n is a, c, g, or t
  misc_feature (3945)..(3945): n is a, c, g, or t
  misc_feature (3950)..(3950): n is a, c, g, or t
  misc_feature (3954)..(3954): n is a, c, g, or t
  misc_feature (3957)..(3957): n is a, c, g, or t
  misc_feature (3960)..(3961): n is a, c, g, or t
  misc_feature (3963)..(3964): n is a, c, g, or t
  misc_feature (3970)..(3970): n is a, c, g, or t
  misc_feature (3973)..(3974): n is a, c, g, or t
  misc_feature (3976)..(3976): n is a, c, g, or t
  misc_feature (3982)..(3983): n is a, c, g, or t
  misc_feature (3989)..(3989): n is a, c, g, or t
  misc_feature (3995)..(3997): n is a, c, g, or t
  misc_feature (4000)..(4000): n is a, c, g, or t
ggatgttggagggcttaacgtcgcggtgtaccacgccagcctcgtgcaccacctgcagggcgcgggcggtttgggctagcaacggcaaaatcacgctggggggtagggtgcccttctcagcgatcagctctgacaggggcttaccctgcactagctccataatgatccagccagagccgtcagcctcaccatagtcaagcaccatggctaggttggggtggcgcaggccgcgagcatttttngcttcggtgcgtagacgctgcaaaaacagctcgtcaccggctaantcngggcgcattactttggcggctacaacacgtccagatcgtagatcttgagcacgccaaacttcacccatgccgcccatggcgatgcgttcgatcaggcggtagcggtcctgaagtactagtccagcttctggtttaatcattgctgcgttgccttaaagacagtggctgcgataggggcagcttcactaccgccagtacccgtgtcagcggtctgatcgccgccatcgagtacgacagcgatggcaatggtcggagcctgtccggaaggaccagcgtagccaataaaccaggtgacggggccgccgtcnctaccggtttcagccgtaccagtcttacccgctacatccatgccatcaacctgagccgaggtgccggttcccgaagcaaccacctggatcatcatggttttaagctgtcccgcaaccgtcgaagaaatgggggagcgtgccacctttgggctggtggtggaaatgaccgaaagcttgtcgtccaaagtacgcttaaccaggtagggctgcatctggttaccgtcgtttgccaccgtggcagcaacttgggccatttgcagaggagttacacgtacggactgctgcccgatacccgccattgccaactcagcttgtgacttgactggcgggaagctggagggggtaaccgtcaaggggatcgacgacgacgtgttgaagccccaggcttcagcctcgcgggtgagttcctgctcgcctacgttcatagctagctgagcgaaggtggtgttgcaggactcggcgaaggcgtaagtcagggtgactttaccgttaccgcaggactcacccgcatagttttgcaactggtgggtggtgcccggaagggtgacggtgtcaggggcgtcaacttgggaatcaggggtgaccttacccaggcgcagtgcggctgaggcggtaattaccttgaaggtagaaccgggtgggtacaggtcaccgccaatggcgcggttgatcagcggggtggcgctgtcagagttgagctgnttccaggcggtgtcggcagtngtgccgtcntggctggctagcaggttggggtcaaaagagggggtggagaccattgccaaaatggcgccggtcttagggttgagggccaccacagccccccgcttgttgcccagggcttggtaggcgaccttttgcaaagtggggttgatggttagctcaactgagccaccctggggctggtctccggtgaacaggttctggatgcggctgcgccacagcgacggcgaagagccgtttagcaccgtgttctcggcattctcaatgccggtcatgttggagaaaatagtggagtagtagccggtcactggcgcatatagcggaccgttagagtaaacgcgctggtagcccagggagtcggaggatttaactgaggcggccacagccgtgccgttaaccataatggctccgcgcgccttaccgtactcctggtagatagtgcgngcgttncgcgagtcctcagttagcgagccatactgcgagctagattcccacagggcgggacgcgcaaatccctgcagtgaagtcagggagatgagcagggccaaaaacatgcccgtgacaagtaaagaaacgtggcgaatctgagggttcattcaaaagctcctctgattacttccgtgttctggtggtcttgggccgacggcggcttgggcctgcctggctgtacgggctgcactggttgtacctgctgcaccggctgggcggcgcggcggccgtgagcgcggttaggggtgactgctggggctggctgagcagctggggcgccttgggggccacccatcggtattccctgaggagcggtcccctgcgggccaccagtcggcccttgcgggccgtacgggccagggccgccctgcgggccagggccannnggcncngggccntgggggccgccntgngggncgcnaccnccctgggngccggcggngncgtngccagcngcggcggcgncnggagngnccgcgcnagcagcggcngcnttatcagccnccgcgttntccngngcnnnntggcgcngcnncgnctcangnagctcagtagnannaatnatcngnggggcgnnnacngnggggcgacgggcggcgnnggaaagacgcagcancaaagccannatcancnagnnagcnancaaagacnanccancanaagccaagancngcatagtcaancnggtnagcgnaatnaggnngnngacnccancaaccaccacnancaccngnanggccatggnnaangacnnggcngtnnccagcagcntgncaannncatnacgnancnccaccgcagtnngcangccgngcncaannaanacnnggtacatcannannatngcgntnagancngtcancnncagctcntcannnnaagaggnggtgangaagncagagttngngaaannaannnngntgnngnancccnnncnncngccggnaccaaacnngccgnnagaanncancccnancnnnnccataaccagcngccaggagccancanngnagntgnnnncnttgtcgtccntggcnnagcnnnnnncnnnaacncggcnggnnangnnnnnnnggtnngaggacannangggcncaaacancagccanannaacnncanncccacaatggcnagggnggcnncaatnatcnnnnaggnanganggntggtggccanatncancaccaccacnaacancccgangatnantactganntgnccagntcctncnncatcaccagcnccccnatnntggctgcccncaccancatcnnnngcancaggtgncgccnnngnnggnnnngcacacncaggangcgccnnccanacancgccaggtngtngnggnnnncnaccaggtaggaggcgaagaanatcgacagcancaccttggnnagctctgccngntngannntcanncccangccgggnannacaatccaaanntgnnaancgntnatntnnnnncccaanccngggangaaangnanaannagncaganaanacccagccananncaccnggngnnccagcggcgcagntggcngtagncgcggannaagaacancgcnncgcagnacaanancncgccnnnngaantccnancnacctnnttnaaacccacaatntnnncnnnctncnnnnnnttgcggtngncaatgtcnaggcggntgatcntgnccngncccaggncgnnnagnnccacngcngtgggcagnagcacngggncnncgnngggngnncgccnnnncanccanagnnncacggcannngaannnnccagcanngagncggcnancngcnagnnngnggngggggnnnngnnggtgnggnngaggatggtcagcaagaagccgcccagnncaatgaccaggncgannannagcagnanaaccncagaccagcgtncannacnnggtttnannnaantcnnngtnttgacnccgnngtngncgtngnntcngngntggtgnnggnnnnnggggnggccggggaggnggncgnnncngnaggcggnngggtggacgacgacgtcggcgnggngtcnntcnggngggnanngacnntctnngananntngntncgcgnnnnannnnngganggcagcagnacntntnngnncaggnnnnccngcntctgntggnccnacnngnngggttnggnngnggcaannttttcnacgggnnnggn

SEQ ID NO: 973 - DNA, 4000 bp, Escherichia coli
  misc_feature (1992)..(1992): n is a, c, g, or t
  misc_feature (1995)..(1995): n is a, c, g, or t
  misc_feature (3265)..(3266): n is a, c, g, or t
  misc_feature (3268)..(3272): n is a, c, g, or t
  misc_feature (3274)..(3274): n is a, c, g, or t
  misc_feature (3277)..(3277): n is a, c, g, or t
  misc_feature (3281)..(3283): n is a, c, g, or t
  misc_feature (3285)..(3285): n is a, c, g, or t
  misc_feature (3288)..(3288): n is a, c, g, or t
  misc_feature (3290)..(3290): n is a, c, g, or t
  misc_feature (3292)..(3294): n is a, c, g, or t
  misc_feature (3296)..(3296): n is a, c, g, or t
  misc_feature (3298)..(3298): n is a, c, g, or t
  misc_feature (3300)..(3302): n is a, c, g, or t
  misc_feature (3304)..(3311): n is a, c, g, or t
  misc_feature (3313)..(3317): n is a, c, g, or t
  misc_feature (3319)..(3326): n is a, c, g, or t
  misc_feature (3328)..(3328): n is a, c, g, or t
  misc_feature (3330)..(3331): n is a, c, g, or t
  misc_feature (3338)..(3340): n is a, c, g, or t
  misc_feature (3342)..(3342): n is a, c, g, or t
  misc_feature (3344)..(3347): n is a, c, g, or t
  misc_feature (3350)..(3350): n is a, c, g, or t
  misc_feature (3352)..(3352): n is a, c, g, or t
  misc_feature (3354)..(3355): n is a, c, g, or t
  misc_feature (3357)..(3359): n is a, c, g, or t
  misc_feature (3363)..(3368): n is a, c, g, or t
  misc_feature (3371)..(3371): n is a, c, g, or t
  misc_feature (3373)..(3374): n is a, c, g, or t
  misc_feature (3376)..(3380): n is a, c, g, or t
  misc_feature (3383)..(3384): n is a, c, g, or t
  misc_feature (3386)..(3387): n is a, c, g, or t
  misc_feature (3389)..(3391): n is a, c, g, or t
  misc_feature (3393)..(3394): n is a, c, g, or t
  misc_feature (3397)..(3397): n is a, c, g, or t
  misc_feature (3400)..(3403): n is a, c, g, or t
  misc_feature (3405)..(3406): n is a, c, g, or t
  misc_feature (3408)..(3420): n is a, c, g, or t
  misc_feature (3422)..(3424): n is a, c, g, or t
  misc_feature (3427)..(3438): n is a, c, g, or t
  misc_feature (3440)..(3444): n is a, c, g, or t
  misc_feature (3446)..(3446): n is a, c, g, or t
  misc_feature (3449)..(3449): n is a, c, g, or t
  misc_feature (3454)..(3456): n is a, c, g, or t
  misc_feature (3458)..(3471): n is a, c, g, or t
  misc_feature (3473)..(3473): n is a, c, g, or t
  misc_feature (3475)..(3478): n is a, c, g, or t
  misc_feature (3480)..(3484): n is a, c, g, or t
  misc_feature (3486)..(3486): n is a, c, g, or t
  misc_feature (3488)..(3491): n is a, c, g, or t
  misc_feature (3494)..(3494): n is a, c, g, or t
  misc_feature (3496)..(3498): n is a, c, g, or t
  misc_feature (3500)..(3504): n is a, c, g, or t
  misc_feature (3507)..(3509): n is a, c, g, or t
  misc_feature (3511)..(3511): n is a, c, g, or t
  misc_feature (3513)..(3514): n is a, c, g, or t
  misc_feature (3516)..(3517): n is a, c, g, or t
  misc_feature (3519)..(3525): n is a, c, g, or t
  misc_feature (3527)..(3532): n is a, c, g, or t
  misc_feature (3535)..(3537): n is a, c, g, or t
  misc_feature (3540)..(3541): n is a, c, g, or t
  misc_feature (3543)..(3544): n is a, c, g, or t
  misc_feature (3546)..(3547): n is a, c, g, or t
  misc_feature (3550)..(3555): n is a, c, g, or t
  misc_feature (3557)..(3558): n is a, c, g, or t
  misc_feature (3560)..(3560): n is a, c, g, or t
  misc_feature (3563)..(3564): n is a, c, g, or t
  misc_feature (3567)..(3567): n is a, c, g, or t
  misc_feature (3569)..(3569): n is a, c, g, or t
  misc_feature (3571)..(3575): n is a, c, g, or t
  misc_feature (3577)..(3579): n is a, c, g, or t
  misc_feature (3581)..(3589): n is a, c, g, or t
  misc_feature (3591)..(3591): n is a, c, g, or t
  misc_feature (3593)..(3594): n is a, c, g, or t
  misc_feature (3596)..(3601): n is a, c, g, or t
  misc_feature (3604)..(3607): n is a, c, g, or t
  misc_feature (3609)..(3615): n is a, c, g, or t
  misc_feature (3619)..(3621): n is a, c, g, or t
  misc_feature (3623)..(3624): n is a, c, g, or t
  misc_feature (3626)..(3627): n is a, c, g, or t
  misc_feature (3629)..(3633): n is a, c, g, or t
  misc_feature (3635)..(3636): n is a, c, g, or t
  misc_feature (3639)..(3640): n is a, c, g, or t
  misc_feature (3643)..(3645): n is a, c, g, or t
  misc_feature (3648)..(3651): n is a, c, g, or t
  misc_feature (3653)..(3653): n is a, c, g, or t
  misc_feature (3655)..(3657): n is a, c, g, or t
  misc_feature (3659)..(3665): n is a, c, g, or t
  misc_feature (3667)..(3668): n is a, c, g, or t
  misc_feature (3671)..(3679): n is a, c, g, or t
  misc_feature (3681)..(3682): n is a, c, g, or t
  misc_feature (3684)..(3685): n is a, c, g, or t
  misc_feature (3687)..(3687): n is a, c, g, or t
  misc_feature (3689)..(3692): n is a, c, g, or t
  misc_feature (3694)..(3698): n is a, c, g, or t
  misc_feature (3700)..(3703): n is a, c, g, or t
  misc_feature (3706)..(3711): n is a, c, g, or t
  misc_feature (3714)..(3714): n is a, c, g, or t
  misc_feature (3716)..(3716): n is a, c, g, or t
  misc_feature (3719)..(3720): n is a, c, g, or t
  misc_feature (3723)..(3726): n is a, c, g, or t
  misc_feature (3729)..(3734): n is a, c, g, or t
  misc_feature (3736)..(3746): n is a, c, g, or t
  misc_feature (3752)..(3755): n is a, c, g, or t
  misc_feature (3757)..(3758): n is a, c, g, or t
  misc_feature (3760)..(3762): n is a, c, g, or t
  misc_feature (3764)..(3770): n is a, c, g, or t
  misc_feature (3772)..(3773): n is a, c, g, or t
  misc_feature (3775)..(3777): n is a, c, g, or t
  misc_feature (3779)..(3781): n is a, c, g, or t
  misc_feature (3783)..(3785): n is a, c, g, or t
  misc_feature (3788)..(3789): n is a, c, g, or t
  misc_feature (3791)..(3792): n is a, c, g, or t
  misc_feature (3794)..(3794): n is a, c, g, or t
  misc_feature (3796)..(3814): n is a, c, g, or t
  misc_feature (3816)..(3816): n is a, c, g, or t
  misc_feature (3818)..(3819): n is a, c, g, or t
  misc_feature (3822)..(3822): n is a, c, g, or t
  misc_feature (3824)..(3825): n is a, c, g, or t
  misc_feature (3827)..(3829): n is a, c, g, or t
  misc_feature (3831)..(3831): n is a, c, g, or t
  misc_feature (3833)..(3838): n is a, c, g, or t
  misc_feature (3840)..(3855): n is a, c, g, or t
  misc_feature (3858)..(3863): n is a, c, g, or t
  misc_feature (3865)..(3881): n is a, c, g, or t
  misc_feature (3883)..(3885): n is a, c, g, or t
  misc_feature (3887)..(3888): n is a, c, g, or t
  misc_feature (3890)..(3890): n is a, c, g, or t
  misc_feature (3895)..(3895): n is a, c, g, or t
  misc_feature (3897)..(3907): n is a, c, g, or t
  misc_feature (3909)..(3909): n is a, c, g, or t
  misc_feature (3912)..(3912): n is a, c, g, or t
  misc_feature (3914)..(3917): n is a, c, g, or t
  misc_feature (3921)..(3925): n is a, c, g, or t
  misc_feature (3928)..(3928): n is a, c, g, or t
  misc_feature (3931)..(3932): n is a, c, g, or t
  misc_feature (3935)..(3935): n is a, c, g, or t
  misc_feature (3937)..(3939): n is a, c, g, or t
  misc_feature (3941)..(3942): n is a, c, g, or t
  misc_feature (3946)..(3946): n is a, c, g, or t
  misc_feature (3948)..(3952): n is a, c, g, or t
  misc_feature (3954)..(3956): n is a, c, g, or t
  misc_feature (3959)..(3961): n is a, c, g, or t
  misc_feature (3963)..(3970): n is a, c, g, or t
  misc_feature (3972)..(3978): n is a, c, g, or t
  misc_feature (3981)..(3982): n is a, c, g, or t
  misc_feature (3984)..(3988): n is a, c, g, or t
  misc_feature (3990)..(3990): n is a, c, g, or t
  misc_feature (3994)..(3995): n is a, c, g, or t
  misc_feature (3997)..(3997): n is a, c, g, or t
  misc_feature (3999)..(3999): n is a, c, g, or t
cagttgatatacttaagagcattttcaacatttggagcatccttcggtattgctaattggtcaaaccacattagcgcaccttcatcaggaatcgtatagacaatttcaacaccgttctctgcttcccatgctgcatattgagccataaatatatcacctgaccagccaacaactaaacagatatcaccatttgaaagggcatcgatgtattgagatgaatggaatttttggatataagggcgaacattagagatgacagcttccgctttagcaattacatcagtatcattagttctagggtcctctcctatataggctagagccgctgggattatttcttctggcgcatcaagaagatgaacgccgcaatcggcaaacttcgaaacaacgtcaggatcaaataccatagcaagagaagttgtaggtgcattctccattctttcattgatcatgtcttcgttataaccgatgcctgtcgttccccacatatagtttactgagtagtcatttagaggtccaaattgtgcaacttgatcctcaatatcactccacatatttccaatatttgataattttgatttatccaacttcatgaaaacgcctgcctgtatctggcgcgctaagaaactacttgaagggactacaacgtcatacccagagccaccagctaagagtttggactgaagaaattcatttgaatcgaatacgtcatagactacctttatgcctgtcgcagcagtaaagtcatcattgacttgctcatcaatatagtctgaccagttataaacatttactacttcttctgcaattgcagcttgagctgaaaaagttagagctccagcaatgagaagattatttaacttatttttcattattactctccttttatttttttactttattaattggattatattaagttttattccttaatagttaccatttttttgaaattacaattccagctcatattaaagatgtctcaaatatgagttgtattcaaaatctgtaattgtactctcaaatttttttatttccgactccttaacacattgatatgatttttgaaatcgttcaccaaaaaattcttttactattaatgactcacttgttttatgaacagcctctctccatgttatagctaatgcagcttcatgctgtgcatgagcatttccaagagtttctttatcaagggggtatttttctattattcccgataagacacttgaaagaattgaagcaaatactaagtaggggttcgagtctgcactgggaagtctaaattctagtcttgttgcttctgcagaggcttctggcaatctaattagagcggttctgttttcattgccccagcttaatgttgttggcgcgtggtcagcattgtggaccaagcgtcgatatgaatttgagtgagaggcatagaaagaaagaaaatcaggagtcgtttttaatagacctgaaatggcttcagcaaagattccttggggatgtttatctttgttgactttaaaaacatttttcccatctttgtcaacaatgctaagatgtgcgtgcataccattaccagcttcttcagaaaaaggtttagccataaaggtagcattcatattgaattttcgagcgcagtttttaattagtcgcttcattaagaaagtttgatcagccatcaagagtgcatcatcatgatgaagtaaattaatttcaaactgcccaggagcacactcctttattgcagtttcagaagggattcctagagaatgagcgcttttttctaccatatcaaagaaaccttcaaagtcatccatttcatttaagttaaggagttgaacgtcttcatatcgcctatgagtgccaggaattaatggcatttgagggtgtccatttttttgtagttgtttgtcgacaagataaaattccatttcaggtgcaataactggcttaagattaagtttattaaagcgatcaagaactgaagacaagatatgccttggntcngcatagataggttcaccatcgccactctccatactaacaaggcattgagcagtattacggctactccatggtgtaacagcaagagaacttgcaacgggcctacaaattgcatcaccatccccagacatcactaacccggttcctttagggttgtctccccagacatcaagaacgtaacttgagataggcattctaaggccaccatcaaatgccttaactagagtttttggtgaggcatttttccctctaggaatcccattaaagtcaacatagataaactcaactttttcaaggtcagggtgaagctctaaaaatttttttgcaatattttccataactttaatgttcaatgaattgggtaaatattatcttaaaaaagatttggaaaataatctttgccaacatatttaatattaattgtgagataattgtaacatatttgtgatcacaaattataaatataaatataaatacgaataattaataaaatatgagtaaggatatattatcaaaagttgaaccaagggattcagagcttaatgctaatgaatgggtttataactctctatgccagttaattctttcaggagaatttactcctggtatttcgtttacttttagagggattgctaattcattcggagttagcacaatgcctgtgcgtgaggctgcaaagagacttatttctgagggcgcccttgatatgtctgaaaagcgaagaattactgtctcccagatgactcaatctaagtttgatgaattgaagattgctagattaaatttagagccacagctatctggacttgctttaaaacatattgattctaaaagacttaaactactgataaatatagataaaaatcttgattatgctatctcaactggaaacattgaagactacattaaatacaattatcagtttcattttggtatttatgaggctggatcatcaccagtacttcttcccctggtaaaaactttatggttacgtttttcacctttttatagaattgttgccggtagagcaggaactcaaactctgaaagattttcatcattcagcaattgatgcaattaaagctaaagattctgttgctttggtagaggctatccatagtgatatattagaaggaatggaaatgctcaatgaatctctcaatgagtaatcgtacttgatcttattgtttaattttatttgtatctaatgagtgaaattccttgcgtttactctcgtttatctatattataatctgtgatcacaatattttttnntnnnnnanttntttnnnanttnantnnngnantnnnannnnnnnnannnnntnnnnnnnncnannaaaaaannncnannnnttnantnnannntttnnnnnnttnanntnnnnnaannanncnnnannaanccnnnntnntnnnnnnnnnnnnngnnnttnnnnnnnnnnnnannnnngnaanaaaannntnnnnnnnnnnnnnngncnnnngnnnnntnannnnggntnnngnnnnnaannnantnntnnannnnnnnannnnnnaannnaannanntnnttnnnnnnannanttnnttngntnnnnncnnncnnnnnnnnntnanntnnnnnnaannnntnnnnnnnaaannncnncnngnnnnnannaannttnnnttnnnngntnnngnnnnnnngnnaannnnnnnnntnntnngntnnnnannnnntnnnnggnnnnnnaangnaannccnnnnaannnnnnannnnnnnnnnnaaaaannnntnncnnngnnnnnnnanngnnngnnncnnnttnngnngnannnnnnnnnnnnnnnnnnnangnnggntnncnnntncnnnnnntnnnnnnnnnnnnnnnnccnnnnnntnnnnnnnnnnnnnnnnngnnngnngnaaaantnnnnnnnnnnnanttngnnnnaaannnnnccnaannttngnnnannaaantnnnnnannnggnnnannnnnnnntnnnnnnnttnntnnnnnanccanncnang

SEQ ID NO: 974 - DNA, 4000 bp, Escherichia coli
  misc_feature (545)..(545): n is a, c, g, or t
  misc_feature (578)..(578): n is a, c, g, or t
  misc_feature (1985)..(1985): n is a, c, g, or t
  misc_feature (2210)..(2210): n is a, c, g, or t
  misc_feature (2258)..(2258): n is a, c, g, or t
  misc_feature (2263)..(2263): n is a, c, g, or t
  misc_feature (2272)..(2272): n is a, c, g, or t
  misc_feature (2276)..(2276): n is a, c, g, or t
  misc_feature (2294)..(2294): n is a, c, g, or t
  misc_feature (2297)..(2297): n is a, c, g, or t
  misc_feature (2303)..(2303): n is a, c, g, or t
  misc_feature (2305)..(2306): n is a, c, g, or t
  misc_feature (2309)..(2309): n is a, c, g, or t
  misc_feature (2312)..(2313): n is a, c, g, or t
  misc_feature (2315)..(2315): n is a, c, g, or t
  misc_feature (3671)..(3671): n is a, c, g, or t
  misc_feature (3681)..(3681): n is a, c, g, or t
  misc_feature (3686)..(3686): n is a, c, g, or t
  misc_feature (3689)..(3689): n is a, c, g, or t
  misc_feature (3698)..(3698): n is a, c, g, or t
  misc_feature (3701)..(3706): n is a, c, g, or t
  misc_feature (3708)..(3710): n is a, c, g, or t
  misc_feature (3712)..(3719): n is a, c, g, or t
  misc_feature (3723)..(3726): n is a, c, g, or t
  misc_feature (3728)..(3733): n is a, c, g, or t
  misc_feature (3735)..(3737): n is a, c, g, or t
  misc_feature (3739)..(3745): n is a, c, g, or t
  misc_feature (3747)..(3748): n is a, c, g, or t
  misc_feature (3750)..(3756): n is a, c, g, or t
  misc_feature (3758)..(3759): n is a, c, g, or t
  misc_feature (3761)..(3761): n is a, c, g, or t
  misc_feature (3765)..(3765): n is a, c, g, or t
  misc_feature (3767)..(3767): n is a, c, g, or t
  misc_feature (3769)..(3769): n is a, c, g, or t
  misc_feature (3772)..(3778): n is a, c, g, or t
  misc_feature (3780)..(3790): n is a, c, g, or t
  misc_feature (3792)..(3792): n is a, c, g, or t
  misc_feature (3795)..(3797): n is a, c, g, or t
  misc_feature (3802)..(3804): n is a, c, g, or t
  misc_feature (3807)..(3808): n is a, c, g, or t
  misc_feature (3812)..(3812): n is a, c, g, or t
  misc_feature (3817)..(3817): n is a, c, g, or t
  misc_feature (3823)..(3823): n is a, c, g, or t
  misc_feature (3825)..(3826): n is a, c, g, or t
  misc_feature (3830)..(3835): n is a, c, g, or t
  misc_feature (3838)..(3844): n is a, c, g, or t
  misc_feature (3846)..(3848): n is a, c, g, or t
  misc_feature (3850)..(3850): n is a, c, g, or t
  misc_feature (3852)..(3856): n is a, c, g, or t
  misc_feature (3858)..(3862): n is a, c, g, or t
  misc_feature (3865)..(3869): n is a, c, g, or t
  misc_feature (3871)..(3871): n is a, c, g, or t
  misc_feature (3873)..(3874): n is a, c, g, or t
  misc_feature (3877)..(3882): n is a, c, g, or t
  misc_feature (3884)..(3886): n is a, c, g, or t
  misc_feature (3888)..(3891): n is a, c, g, or t
  misc_feature (3893)..(3895): n is a, c, g, or t
  misc_feature (3897)..(3901): n is a, c, g, or t
  misc_feature (3903)..(3903): n is a, c, g, or t
  misc_feature (3905)..(3909): n is a, c, g, or t
  misc_feature (3911)..(3912): n is a, c, g, or t
  misc_feature (3915)..(3919): n is a, c, g, or t
  misc_feature (3922)..(3922): n is a, c, g, or t
  misc_feature (3924)..(3928): n is a, c, g, or t
  misc_feature (3930)..(3931): n is a, c, g, or t
  misc_feature (3933)..(3934): n is a, c, g, or t
  misc_feature (3936)..(3939): n is a, c, g, or t
  misc_feature (3942)..(3943): n is a, c, g, or t
  misc_feature (3945)..(3948): n is a, c, g, or t
  misc_feature (3952)..(3952): n is a, c, g, or t
  misc_feature (3954)..(3959): n is a, c, g, or t
  misc_feature (3962)..(3964): n is a, c, g, or t
  misc_feature (3966)..(3966): n is a, c, g, or t
  misc_feature (3969)..(3969): n is a, c, g, or t
  misc_feature (3971)..(3971): n is a, c, g, or t
  misc_feature (3974)..(3975): n is a, c, g, or t
  misc_feature (3979)..(3980): n is a, c, g, or t
  misc_feature (3982)..(3984): n is a, c, g, or t
  misc_feature (3986)..(3988): n is a, c, g, or t
  misc_feature (3990)..(3992): n is a, c, g, or t
  misc_feature (3994)..(4000): n is a, c, g, or t
gtgtgtctgaattgattgcaacatcacctgttccatgtggagtaagaatgatgttattattactggcagttgttgaaattgtttgaccattgatgtttatatcatcaatagttgctgttgtgataacagcattagaacctaatgtaactccgtcaatcgcacctgaatctatattaacattagtagttgcttgtgaattcatgtccacattaccagagaatgttgttgttcctgctactgttaatgcacctacgactgcagttgttgaactagcgactgttgcatgtggtgttaaaactaattgtgctactgatgtaccttttgatgctatatcattacctattgataatgttccacctgtggctgtaacaatatcccaagtatcacttgcatcatcaccatcatctgcttgtattgctactctacccgctgctgcttctccacctgttactactaagttagcttgttcacttgccgcagctgcgacttgtaaagtatctgtactcgtaataacattacctgtaccatttggtgcaattgtaatntcaccattagagtttgtagatgagaatgtattnccatctaatcttaaattgtcaacacttagaatagtagctactgcgttgctaccaatagtaactccgtcaacagtaccaccatcgatgcctactgagtctactactaatgtatcaatgtaagcagttccatctaagtataagtctttgaattcagctgaacctgttcctaaatctaaatcatcatctgatgaaggaacgattgcaccatcagtaaatgtaacttgattacctccacctactgaaactgtaatgacatctgaacctgagaatgtgattgctgtgttagtatctccatctcctgttattgaatctaattgaatatctccaacatttgtaatatcagcatcaccgaatgatgttgctgctaaagttgttgaaccactaactgttaatcctgttaatgttcctaaacttgttacatttccttgagctgctgtttgtaatgttcctgttagatcacctgttatgtttcctacaaatgcggtagatgtaattgaagttgctcctgtgactactcctgcgtctacactaatcgtaccatctagtaaaattactgaaccggctgctggctcaagattgattgctgctccagagtctaaagttaaggctcctgttgaatcaatatctactgtaccatctgctgtgatttgaatattggctgcagctgctgcagtatcagttgttacaatactaagtgtaccattagtgcctacagttaatactgcagtatcatcagtagaacctgtcattgtaacaactttaccgtctatagcaacattatcaactgttaatgctgttaaagtacctaaacttgtaacatttccttgtgctgctgtacttaatgttccaacaaatgctgttgatgtaattgaagttgcacctgttacttcacccgcatctacactaatcgttccatctaataagattgctgatcctgaggctggttcaagattaattgctccacctgaatctaatgttattgtagtaccgactgcttcaaaagttccgtctgctgtaagtgtcatgttcgctgcagcggctgcagtatcaacagttgttatatctaatgtaccatttgtgcctactgtcaatattgctgtatcaccactagatccagtcattgtaacaacttttccgtctattgctacatcatcaacagtcaaagctgttagagttcctaaacttgtaacatttccttgtgctgcagtatctaatgttcctacgaatgctgttgatgtaatacttgttgcacctgtaactacacctgcgtctacactaattgttccgtctaataagattgctgatccagctgctggctcaagattaattgctccacctgaatctaatgttactgtagtaccaattgcttcgaaagttccgtctgcagtaagtgtcatgtttgcagcngctgctgctgtatcaacagttgttatagctaatgtaccatttgcacctacagttaatgctgctgtatcaccactagatccagtcattgtaattactttaccattgatagctacatcatcaataaccgcgttagtaattggactgtttgttcctaatgtaactccatcaatagtaccagcattaatatctactgtatcggcaactaaggcatctgttgtgactgtnccatcaaagtaagcatctttaaattctaatgaacctgttcctaagtcnatatngttatctgntgtnggtttaagtactccatcngcnaatatnanntgnctnncngcactattacttacaccaatataaaatgttaatacatcttcgtcttgtcctgccgcactctcggctgtaatctttgtgtcttggtcaacatcaataactccacctaatgatccccaagcggaaccataaccttcaaaagtagaaagtgatgtgttgtatcttatttgtcctgctaccggtgaacctgctctttgtcctgtagttcctaccggtaatttaaatccgtcattcttgtttatgcttacaatacctgtaccgttaggtgtaagtgttaagtttccgtttgagtccgttgaagaaatgtcattaccattaatagttacattatcaatgttaataacatctagttttgaacttgaatcaactaacagagcacttgacgctgttgtagttccaagtgtatgatccattagatcagtaaaatatttaccacctattaaatgtatatctgctgcagaagcattgtttgttgcttctatgtataactttgctgatgctccatcgttagatgcatcgtaagcataagccatttctccgataactagatcactcgttgttggtgccgtagtaccggaatttcttttaatctgaattattgttgacatttattttttatccgtaatatccaccatctataccagatgaggcctcaaatttattagtagatgcatcaaacacaatacaatctccatcagatgctgtaacagtagttgtatctacatttcttaaatcatttaaatcaatattctctgcagcaacttggccaatagctatctgttttactttacctgtagttactgaatttacttttacattaatatttgccattattatctacttacgcttggtgttactgttgcatgtccttctaaaattcttgttttatctcctgaagaatctgttaataaaatatcataaacatatcttccacttgtcatagcagctgtagcaacatctgttaatgtcaatgttacttggccagttgtcggtgccaatgcagttgtgaaagtagccgctactgtacttgaactaaaggtttttcttacctgtcctgtagcactatagcctgtcaagttcaaaacatctccatttgagtcagttaaactcaaagttgtagagaaatctgctccctgatcaatatataaatttgatactgctgccatccctcttattactatttatgaattagaagattttaagtcatctaattctgtttttagctccttaattgattctactaataatggaataagtttcatgtaattaacagcttttattccagtttttcttaattcaacaatttctggtaatatttcttctatctcttgtgccaaaattcctgtgtcatgtccttcnccaagaacancttcnacnttatgatcnttnnnnnnannnannnnnnnnccannnntnnnnnntnnntnnnnnnnannannnnnnntnntnatantntnttnnnnnnntnnnnnnnnnnnantannnaatgnnntannatcncctgntgctantnntgtnnnnnntgnnnnnnntnnncnannnnnannnnntgnnnnntntnntannnnnntnnnannnncnnnannnnnancnnnnncnncannnnnagnannnnntnntnntnnnncannannnnctgnannnnnnaannntntancngcnncgtnngnnnannntnnntnnnnnnn

SEQ ID NO: 975 - DNA, 4000 bp, Escherichia coli
  misc_feature (499)..(499): n is a, c, g, or t
  misc_feature (553)..(553): n is a, c, g, or t
  misc_feature (619)..(619): n is a, c, g, or t
  misc_feature (736)..(736): n is a, c, g, or t
  misc_feature (784)..(784): n is a, c, g, or t
  misc_feature (859)..(859): n is a, c, g, or t
  misc_feature (1101)..(1101): n is a, c, g, or t
  misc_feature (1991)..(1992): n is a, c, g, or t
  misc_feature (1995)..(1995): n is a, c, g, or t
  misc_feature (2581)..(2581): n is a, c, g, or t
  misc_feature (2746)..(2746): n is a, c, g, or t
  misc_feature (2785)..(2785): n is a, c, g, or t
  misc_feature (2787)..(2787): n is a, c, g, or t
  misc_feature (3364)..(3364): n is a, c, g, or t
  misc_feature (3767)..(3772): n is a, c, g, or t
  misc_feature (3774)..(3774): n is a, c, g, or t
  misc_feature (3777)..(3779): n is a, c, g, or t
  misc_feature (3783)..(3785): n is a, c, g, or t
  misc_feature (3787)..(3787): n is a, c, g, or t
  misc_feature (3790)..(3790): n is a, c, g, or t
  misc_feature (3792)..(3793): n is a, c, g, or t
  misc_feature (3795)..(3800): n is a, c, g, or t
  misc_feature (3802)..(3803): n is a, c, g, or t
  misc_feature (3805)..(3808): n is a, c, g, or t
  misc_feature (3811)..(3813): n is a, c, g, or t
  misc_feature (3815)..(3818): n is a, c, g, or t
  misc_feature (3820)..(3820): n is a, c, g, or t
  misc_feature (3822)..(3822): n is a, c, g, or t
  misc_feature (3824)..(3824): n is a, c, g, or t
  misc_feature (3826)..(3830): n is a, c, g, or t
  misc_feature (3832)..(3834): n is a, c, g, or t
  misc_feature (3836)..(3840): n is a, c, g, or t
  misc_feature (3842)..(3843): n is a, c, g, or t
  misc_feature (3847)..(3851): n is a, c, g, or t
  misc_feature (3854)..(3858): n is a, c, g, or t
  misc_feature (3861)..(3863): n is a, c, g, or t
  misc_feature (3865)..(3874): n is a, c, g, or t
  misc_feature (3877)..(3878): n is a, c, g, or t
  misc_feature (3880)..(3885): n is a, c, g, or t
  misc_feature (3889)..(3889): n is a, c, g, or t
  misc_feature (3894)..(3895): n is a, c, g, or t
  misc_feature (3897)..(3900): n is a, c, g, or t
  misc_feature (3902)..(3902): n is a, c, g, or t
  misc_feature (3904)..(3905): n is a, c, g, or t
  misc_feature (3907)..(3907): n is a, c, g, or t
  misc_feature (3910)..(3926): n is a, c, g, or t
  misc_feature (3930)..(3932): n is a, c, g, or t
  misc_feature (3934)..(3934): n is a, c, g, or t
  misc_feature (3936)..(3936): n is a, c, g, or t
  misc_feature (3938)..(3944): n is a, c, g, or t
  misc_feature (3947)..(3967): n is a, c, g, or t
  misc_feature (3969)..(3972): n is a, c, g, or t
  misc_feature (3975)..(3982): n is a, c, g, or t
  misc_feature (3984)..(3985): n is a, c, g, or t
  misc_feature (3987)..(3987): n is a, c, g, or t
  misc_feature (3990)..(3995): n is a, c, g, or t
  misc_feature (4000)..(4000): n is a, c, g, or t
gctgattgtgttgccggatgttgggcattccacctttccactcctgctagccgccgtcgttttgtacttcgtggggcctaatattggcgcgccactctgggcagggctcatggggcagctggtcccagagtctagtcgaggtcgcttcttcgcgcgccgaacccggttatcaaccattgcctcatttagcggcttgatcatcgccgggggcctactgcagtggttcgatcagctcgatctggctcgatacggtttcacctgtattttcgccattggtttgaccgcccgattgatctcggcctattacctcagtcgagttcaggatccgcagaaacaactactgagcacagccgccgcttttccatcgattaagcaaatcgcagcagatccggcttacttaagatttacggctttctttgccatgatgcagttttcggtcgcaatctctggacctttcgtcgtggtatacctgctcacgacgttacattactcctacttngcgctcaccctgaataccgccgcatccgttttcgttcagttcgttgtgctgagncgatggggccggttatcagacctgttcggcaatcgcattattcttagagtcaccggattttcgatnccattcgtgccgctgctttggacgctcaatgaccacttcagctatctcatcggtctgcaaatgctgagcggactcatttggtccggttttaccctgagcgcaaataacgcgttattngacttaacgacaggcagcggtcgcacggggcgcgtcgccctgcataanttactgtcgagcttcgcggtcttttcgggtgctgcatttggcagcctcatcctgctcaactggtcctggattganccccatctaatgggccttatcaccctgccaaccctcacctttaccggcgtctttttagcctcggcgacgcttcgactcgcgacagccgccgcttttttacccaggattacagagccgcgtgcggttcgccggatgacctatcatggcctaatttttcgagtcactcggttttcgccgatctccggcgtcattttcgaaggcattacccgagtcagaaagcgagacgacccaacgaattaaangggctctaaaggcggacccgagccgagttgacccatgaaagggtgccatggttgactccgaagacccttcaaagactaggacgaatcatgaaccctttatctggcctcacggcactcgactttggccaagtctacaacggtccttattgcggctttttaatggcccaagccggcgcgactgtcataaaggttgaatcattgaagggcgaaacactgcgctcgagcaatcccaaagcgtccgcgacctatccctttgcattgctgaacggcaataaaaagagcctcgcaatcaacattaaatcagagcatggccaggcgctcatacaacaacttgctcaaaaggttgatgtgatctcagaaaattttgccccaggcacgatgagcaaatatgggatcggcgggccggcgctgaccgcgcttaacccccgattaatttatgcctccagcaccggctacggcaatgccgatggaccctatcgagactacttgggtatggacatcacgctccaggccatcagcggtgtcatgagcgtcactggtgaagaaggcggcccgcccctcaaaaccgccgccgcgtttgccgactttatcgcggggacccatctttatgcggcgattgtgaccgccctttttcggcgagaaacaaccggtcaaggcgcgatcgtcgatatctcaatgcaggattgcgtgttccccacgcttgccaccaccatcggtagtttctatgcccaaggcaagcaaatgcctcgagccggcaaccgtcatacgggcaatacccttgcgccttacaacacctacgtcgccagtgatggctatatcgccatcatttgcattcgggagggtcattttaagaagctttgccaagcgatggaccgacctgaactcgcagnnganccaaggttccataactttgcagcgcgatgtcagaatgtcacggagcttgatgctgaaattacgcgctggagtgcgcctaaatcccgtcaaaccttgctcgccttaacccaagcccacggcgtcatctgcgccccggtgaatcatttatccgaagttgtaaccgacccacacatgaccgctcgcggcagcttgcaccaaagaccccatgagacgctgggcatgattgcccaaatgcagaccccgttgcggctttcaggtgatacgccgcccgctctgaccagccctgcagcgctcggggccgactcaagcgaggtattgcacgaattgcttgggctctcccaggcggatatggcgaccctcgttgagcagggcgccatcgcactatgagtgccttggcgcccaattagcggtcattgagcgcgagtgggcaacgcgccttagaaattaatccggtaggcccaagacccgtttagcgataatgttcatctggacttcattggtgccaccgtagatcgtgaccgcgcgatcgcgcagccaaccccgggttgcctccagctcgtcttgattaaatccttcgccttcccanccgacacccgccaaaccccgtagctcagatttcaaagcggacgcttctttggcgatcgttgacccaaccagtttaaagattgaggttgtagcgcccggggcgcgacccgatttggcttccgccataacgcgctgcacggtcaactgcatggatttttccaacatnacctgcttggtgatcttttctcgcgcttctaggtcgctnangcggtccccagtttggcccaaatattcgacgccaatctgagcgtacgggttcagcgttttgacggtctttttccgtcttggcgcgggcgctgctgatcgttcgtactgcaacaaccgcttacccacggtccaacctttgttgagctcaccgatcaaatttgagcgcaatgcgatggcgttatcaaaaaatgtttcacaaaacggtgacgatccagagatcagcggaattggtttgaccgtgacaccggcttgatgcatatctaacaagacaaaactaatgccatcgtgcttcgaggcattggggtctgttcgcaccaaagcaaacatccaatcggcgtgatcggccccggatgtccaaatcttttggccattaatgacgaaatgatcaccctccatcaccgctttcgtttgcaaactggcaaggtctgaaccggacccgggttcactataaccctgacaccaacgcacttcgccagaggctattttcggtaggtgctgctgcttctgctcctcagtcccaaactccatcaaggttggaccaatcatggcaaggcccatccccgtttccggcggcaangctttaatcgcggccatttcctcttgaaaaacccggtactcctcgcccgtcatttcggcgccaccataaactttcggccacagcggcgccgtccaaccccgtgctgagcaggcatctcgccaggcccgtgcctcatcggtatcgtagatttcaaaggcatcctcaaagtgaaccggtcggtctcgcatgctcataggacagttggcgccaagccaggctctggtttcttctctaaacgcgtctatcgtcataactcttcctttcgttactcattcaaattctactttagtgccgctggtcttgcagatcgccgtggcggttatcagcgtctcattagcctcatgcgcccctgctgcttgtcctgccaaccaatgtccctttcctctcaggggaaaatcacccnnnnnncnaannntttnnnanccngnntnnnnnngnntnnnnccnnngnnnncnancnannnnnannncnnnnncnntttnnnnnggnnnnnccnnncnnnnnnnnnnaanncnnnnnncctnttttnncnnnncnanncnggnnnnnnnnnnnnnnnnncccnnncngncnnnnnnnaannnnnnnnnnnnnnnnnnnnnannnnttnnnnnnnnannanccnnnnnnacaan

SEQ ID NO: 976 - DNA, 4000 bp, Escherichia coli
  misc_feature (1989)..(1990): n is a, c, g, or t
  misc_feature (2022)..(2022): n is a, c, g, or t
  misc_feature (2474)..(2475): n is a, c, g, or t
  misc_feature (3324)..(3324): n is a, c, g, or t
  misc_feature (3385)..(3385): n is a, c, g, or t
  misc_feature (3667)..(3667): n is a, c, g, or t
atcgatacccccggtcacgtggactttaccgttgaggtagaacgttccatgcgtgttttggacggtttgattgctctcttttctgctgttgatggcgttgagcctcaatcggagacagtttggcgccaggcaaaccgttacggagtacctcgtattggatttgtgaataaaatggatcgtgcgggtgccgactttctgaatgtggtaaagcaggttcgcgaaatgctcggctccaaggctgttcctctacagcttcctattggcgctgaagataatttcaagggtgtggttgatttgatcaagatgaaaggaattatttggcatgctgaaacagagggaatgacttttgatgagattgatgtgcctgctgatatgatggaagaagcaatggagtggagagctaacttggttgaggctgttgccgaatatgatgatacacttatggaaaaattcttcgaagatcctaagagcatctccgaagctgaaattcatgaagcaatccgtaaggctacgatcgatctttctatcgttcctatgatgtgcggttcgtcatttaaaaacaaaggcgtacaaactgcattagatgctgtttgtcgttatttgccttcacctatagatattccagatacaaaaggaacgcatccagatactggtgaagagctgcttcgtaaagctgatccaaaagagccatttgcggcccttgctttcaagatcatgactgacccctttgtaggtcgtttggcgttcttccgtgcttattctggacgtttggatgcaggttcttatgtgcttaacgtacgcagtggtaaaaaagagcgtatcagccgtattatgaagatgtttgccaataagcaaaatccaattgattttattgaggcgggtgatatcggtgcagcagttggttttaaagagatcaaaacaggggatacgctttgtgatgaagatcatccaatcacactggagaacatgttcatccctgagccggtaattgccattgcagttgagcctaaaacacaggctgacgttgataaaatgggtatggctattgcaaagttggtggaagaagatccaacacttcgtgtgaatactgatgaagaaactggtcaaactattcttcgcggaatgggagagttgcacttggaaattatcattgaccgtatgcgtcgtgaattcaaggtggaagtaaaccaaggagcaccacaggtagcttacaaggaagcattcactgctactgttgaacatcgcgaaacgttgaagaagcaaacgggtggtcgtggtaagttcgctgatattattttcagcattggacctgttgatgcagaatggcaaactgagaatcctgacaaacattaccaatttgtaaatgatatttttggaggatctattccccgtgaatttgttccttctattcaaaaaggttttgagcagtccatgacaactggcgtactggcaagttatcctgtagcgaatatgaaaattcgtgtgtatgatggaagcttccacgcggtagactccgactctatgtcctttgaattgtgtgccaagcaaggtttccgtgaagcagctagaaaagctaagcctgtattgcttgagccaatcatgagagtggaagttgttactcctgatcaatacatgggagatgttaccggggacttgaatcgtcgtcgtggtatgatggaaggtatggacagtcgtgcgggtgcacaggtgattaaggcaaaagttccactgagtgaaatgttcggatatgtaacacagcttcgttcactttcttccggacgtgcttcttctaccatggaattctctcactactccccagcgcctaacaacattgctgaggaagtgattgccaaggtaaaagggaaggctactgcctaattttaattgtcttcaactagttgagaccgcttcgaaagaggcggtctttttttgtccaattcatccaaattctcatttgcctgcctgatttgcaatgacttttgtaaaatnntgtatatcaaatagttacattaataacccaanaaaagggaattattatcgaagcgtcctaaaaaatagcgtataactatttggttggtacggacttctcgcttacctttgcatcccctaaagaaaaaggggtacgtacacatgtcgcagcgcattcgaatcaaattgcaatcttacgatcataatctggtggacaagtctgcagataagatcgttaaaactgttcgcagtactggcgcagttgtaacagggcctattcccctgccaactcgcacgaaaattttcactgtattgcgttctcctcacgttaacaagaaaagtcgtgagcagtttcaattagcaacgcataagcgtctattggatatttacacctccactagccgtaccgttgatgcgcttagcaaattggatttgcctagcggtgtggaagtagaaattaaagcgtaatcgctttcaatatgcgtaagggaattcgcaactcccannagttcttattattgatttttgaaacaattgctatctctcaaccggaagtaaaactccgataaaagagcgctggcttttaaacataaaacaagccattcagggtttgtttactaccggtacttccccataaaggaaaaggtcggtggcaaacggggattgaagtccaaacgatcgtgtttggattgtcccaataaccttgcaggcacaaaacctaacgaacatgaaaggtattattgggaaaaaactgggaatgaccagtgtattcgatccctccggtaagcagaccccctgcacgatcatcgaggcgggtccctgtgtagttactcaggtaaagtccaaagagactgatgggtacagcgctctccaattatcttttggagagaaaaaagaaaagcgcgctactaaagccgctgttaatcacttttccaagtcacaaaccactcctaagcgtttctctatagagtttcgcaattattctattgaaaaaaatctgggtgaaaccgtaactgtagacattttctctgaaggagagactgttgaggttgtgggtactaccaagggtaaaggattccagggtgttgtaaagcgtcatggttttagtggtgtgggtcagcagtcgcatggtcagcatgatcgtcagcgtgctcccggatcacttggtaactcctctgatgcgagccgtgttatgaaaggaatgcgcatggctggacgtatgggtaatgatcgtgtgaaaatgaaaggtctgaaagtggtgaaagttttcactgagaaaaattacatccttgtgagcggatctgttccgggtcacaacggttccatcgttcttattcaaaaataatcgcgtacaanacaatcataaactgaacgcaacatgaaactcgacgtcttaaatacaaaaggtactgcaacnggtcgctccgtggaattacccgaggagatctttggtgctgaaccgaacaatcatgtgatttacttagctgtaaagcaatatttagctgcacagcgtcaaggtacacacaaggttaaaacacgtgctgaagtaaagggtgccagccgcaaattgcataagcaaaaaggaacaggcggaagccgtaaaggaaatatccgtaacccattgtacaagggtggtggtaccatttttggtcctaagcctcacagctatgacattaaggtaaaccgtaaggtgaaaganctcgcaaagatttccgcacttagttacaaagcaaaggataacgcaattctggttgttgaggatatcaacatggaaaagccaaagactaagcaactcttggagatcttgggtaacttaaaagtatctgataagaaaactctttttgttactccggactataatgataatgtagagttgtcaatccgtaacgtgccctctgtgatgggtgtattactgagtgatatcaatacctatgacatcatgaactctgaggtgttagtgatgacggagagtgccgcaaagattttcgccgacgatgaaaaaactgaagcttaattaacagcataaaacaag

SEQ ID NO: 977 - DNA, 4000 bp, Escherichia coli
  misc_feature (5)..(6): n is a, c, g, or t
  misc_feature (35)..(35): n is a, c, g, or t
  misc_feature (59)..(59): n is a, c, g, or t
  misc_feature (71)..(71): n is a, c, g, or t
  misc_feature (90)..(90): n is a, c, g, or t
  misc_feature (158)..(158): n is a, c, g, or t
  misc_feature (182)..(182): n is a, c, g, or t
  misc_feature (233)..(233): n is a, c, g, or t
  misc_feature (235)..(235): n is a, c, g, or t
  misc_feature (260)..(260): n is a, c, g, or t
  misc_feature (269)..(269): n is a, c, g, or t
  misc_feature (453)..(453): n is a, c, g, or t
  misc_feature (697)..(697): n is a, c, g, or t
  misc_feature (1324)..(1324): n is a, c, g, or t
  misc_feature (1707)..(1707): n is a, c, g, or t
  misc_feature (1962)..(1962): n is a, c, g, or t
  misc_feature (1986)..(1986): n is a, c, g, or t
  misc_feature (2154)..(2154): n is a, c, g, or t
  misc_feature (2157)..(2157): n is a, c, g, or t
  misc_feature (2162)..(2162): n is a, c, g, or t
  misc_feature (2177)..(2177): n is a, c, g, or t
  misc_feature (2199)..(2199): n is a, c, g, or t
  misc_feature (2225)..(2225): n is a, c, g, or t
  misc_feature (2295)..(2295): n is a, c, g, or t
  misc_feature (2436)..(2436): n is a, c, g, or t
  misc_feature (2520)..(2520): n is a, c, g, or t
  misc_feature (2685)..(2685): n is a, c, g, or t
  misc_feature (2709)..(2709): n is a, c, g, or t
  misc_feature (2943)..(2943): n is a, c, g, or t
  misc_feature (2955)..(2955): n is a, c, g, or t
  misc_feature (3018)..(3018): n is a, c, g, or t
  misc_feature (3448)..(3448): n is a, c, g, or t
  misc_feature (3496)..(3496): n is a, c, g, or t
  misc_feature (3538)..(3538): n is a, c, g, or t
  misc_feature (3595)..(3595): n is a, c, g, or t
  misc_feature (3679)..(3679): n is a, c, g, or t
  misc_feature (3898)..(3898): n is a, c, g, or t
  misc_feature (3997)..(3997): n is a, c, g, or t
tttgnnctgttgtaagaggattaacggttagggtnacacttgaagaagaggttttgccngcctctaccacnacttcattagcagaaaggntaaaacctgttgtaggaagtgctacgtattcggtttcgttgcgcttgttatattctgccaaagcaagngtatcgtaaaccaattcaaaggcnctattagctgtagcaggctctgaaagtgttacgttaatatcttgagttacntntgttgttccgatggttaactttgtngaactgttnccatctgtctttgtttgagcgatgtatgcttgattatctaaagtgggataatcggcgttgttacatgcaacaaacgccatagagccaaacaacactccaccaattacacttaatatattgtatttcatattataattcgttttgagagttgatgcttggtaggatcgaagtcctaccaaacaanattccattatttaaatgagggattcataatttgaatggcttggcgcaaccacttgtaagttccgtttgccgaagatttgccataatcgtattccatgtgataggttcccactccacctttggtgtaagtttgtccgttataggtaggaatccagtaggccatacctaacaacgaaggcacaacaacaccgttgcgagctgtgaagtttgatccacctgtgcttgaatgttgctcgaagtcttcncaaacgataatcttcttagctacctcttctgttgtaagcacgccttggaagtggtctacttgggttttgaaacgactatcaagttgagagtctaagcttgtgttataggcttgaagtaggaagtaatcgaagtgtgttcccaattcttttgggaaggcatcgggctctccatcgacaacaagcatacgaccagtgcctgatttaggaccaattcttttagacagagtttcaacgaacttctgaataaggtcatcgccattggtccacaactctttgtcggtagcaaatggttgagcgtagtttggctcagcatcgatatcgaatccatcgtaattatacttgtctatggtgtcgcaaatggcatttgcatatttttcaaccgcagcaagtttagatgctttatcgcttccccaaccccagaattcgtgtctccattgcttccaagttgtgcctgcagcagctttatcttcaggtatagaaggagtgatttggtcgccaatatcaaatacaaggaaacacattagcactttagtacctttcttttgttgaacaatcttaaggtcttctttttgtgcagtagttaggtttttccagttaccccatagcgaaacgaagtctacactgtcnggtaatccttgcaaagagttttctaagctaacaccagcaccagtccagttaccaaaccaaccgaatgccttttggtggtcagactttttatattcacgcaattttgcataataagcttccgacttattgctacgagttaggtcggcagggttcttcaactccatatcagtagcatcgctacatgcagccaaagtaaataaacctccgaataatgcaagtaatgctttatttagttttttcattttttcgaactttaaatattacacatttatttcttttgccaccacatctttgtagcgtagttgtctgctcctccaagcatttgaaccgcctcttcgtacgaagctcggttgttaatgagctcatcactgtcgaaaggtatncggttaggaacctttattgtgtatccagaagttgactgagcaacagggaatacctttggatatccagtgcgtctaatctcattccagccctcttgtccatcagggaaaagagcaatccacttttgagttataagtctttctaacttcacttcgtctgtagcagagtcgtcccaagcaatggttatgttgctcactgcagtttggttgctaccaaatccgtttgcagcatcttcgtagttagcttgtacagaggtnttgtctgcaagataagcgctcacntttgcggctccccattgttcgaaagaaagagtaattgcttgctcatatagactcttaactgtgcctcccatgttgctccaaccagccaaagcgccttctgctctacagaaagttacttccgaagcagttaaccaaacgcctcgagttgattgctcaacgttagccgcngantatanttttccagcaatagntttatttcctacagctgcaccngctaaacaaccgataaccgaacgagntccttttgtttctgtatctttaaagtatttagagatacgtgggtcgctataaccagtcatatagctttcnatatcagcacaagcacggctatctccccattcaatagaggttttatattgtccgtttggaacgtaagttatagcgcagttttcagagttttgtgttataacaccagcttgcacagcagcttcgcccacttgttttgcatangaagggtcggcaaaacgcattctgatagccatacgaagctttaacgaattggcaagtttaaaccagttagaaagctttccaccntacactttatcatactcttcgttggcctttgcatctgcagaagcaatgatgattggctgaataatatctgtagcagtatttaagttggcaatcaaagtcttataaactttctcttgagaagaatatgcattgacgttagactcttcgccaatgggaagtggtccntacatatctgtaagacgaagaagngcttgtgccttcaaaattaatgcctgagcataagtcactcccgatttatttgtaagacgttcgatatctttaaacgccgaagttaccttaggaagagcatctctaaatgggtaacgtacccagccattaggcgcattaaagcgagcaaagttcttgtcagagaaaccgttattggcataagtcatatagcgaccaaggtagtttccaatcaaatcttcgttcatttgataagcnttttcctgttcngggaaagcgttattctgcatttgaatgaagaaagaaccagttgaatagttgtctcttcccaantcatctgccgatgctctgttgccttgtctgttagcttcttcaaagccatctgtacacgaagccattgttcctacacccatagttacaattaaaccataggtaagagatttaaggattttattgtatttcatatctttttcttgcttttaaaagttcatttactccttagaatttcacctttacgttgaaaccaatagtgcgaagacttggttgcatgaagtaatcaaagccctgatagtaggttcctgttgatgcaactgcttcgggatcgaatggagctttgttataaataaagaacaagttgttcgctgttaagcctaaagaaagctcagctcctttcaagaatttcttagggaatgtgtagccaatgtgtgcttcttgcaaacgagcattggtagcactatagatgtattcgctccaaattgggttntcaccacctactactgaatagtagctttcagcgtttacacgacctccnttcactgcaattccaccattatcacgtgctacagcagatgcnttagacacgccataagagtctaatatcgcttgagtttgtgaaagcacaatacctccnaagcgtgcagtaattaagaaaccgaagttaaatcctttccatgcaaactcgttagagaaaccgatgttagccttaggaagtacngaaccacgatacaatggattgttaaggttggtttgaagaacgcccttcttgtcgtcaacagcaatgtttccttctgcatctcttgcgaaatcagtagtcatatacacgtctcccatggtgccacccttcttcaaaatgatctcagctccactcaaaccgccttgtttaagcacttcgttttcgtcgtcaagaagcttgataatcttgttacggttagcnctataagtgaatgaagtgttccaagataggtcgccaaagttgcggttatagccaatagctagctcgataccacggttacgaacgttacctgtttggatntat

SEQ ID NO: 978 - DNA, 4000 bp, Escherichia coli
  misc_feature (563)..(563): n is a, c, g, or t
  misc_feature (3815)..(3815): n is a, c, g, or t
ttaccaccttaaatccttccatagctgcttgtaatgcacatataggatcaatttctgtaatccaaacaatcgcgccagcatttctcaaggattgagcagagccttttccgacatctccaaaaccacataccaatgctgtttttccagaaatcattacatctgttgctcttttaatgccatcaactaatgattctctgcaaccataaagattatcaaattttgattttgttacggaatcatttacattaaatgctggtacttttaattcatttttttcaaccatttcatataatctatgaacaccggtagtagtctcctcggataaaccactaatatgactaagcatttcaggatatttcttgtgtattattgatgttaaatcaccgccgtcatctaatatcatattaggtttccagcttgggtcgcctataatagtttgatcaatacaccacaaatattcctcctcagtctcacctttccaagcaaaaacaggtatacctttttcggcaatagctgctgctgcatgatcttgagtggaataaatgttgcaagaagaccacctnacgcttgcaccaagcgcaactagcgtctcaattagaactgctgtttgaattgtcatatgaaggcaaccaacaatccttgctcctttaagtggttgctcttttgcatatttctctcttaaagccataagaccaggcatttctgtttctgcgatttttatttctttattaccccacgctgaaagcgaaatatctgcaaccttatagtctggtccaattttttcaacaaccttactcatactttactccgttataataaacttttaattttatctacctgatctattctttcccatggtaagtttaaatcacttctaccaaaatggccgtatgccgctgtacctttatatatcggctctagtaagttaagcatattaattatgccccaaggacgcaagtcaaatacttcctttataatatgtacaatttttgattcctcaatttttgaagttccaaaagtatcaatgctgatagaagttggttttgcaactccaatcgcatatgagacctgtaattcacatttgtctgctaatcctgcagcaacaatatttttgacgacatatcttgaagcataagccgctgatctatcaacctttgacggatctttacctgaaaaagctcctccaccgtgtcttgccattccaccatatgtatcaacaattatttttcttccagtcaaaccacaatctccaactgggcctccaatctcaaatgaaccagttgggttaatgtgaatttttgtatttttatttaaaaaactttttggcaatacttcttgaataactttctcataaacatattgttgaatttctttttgtttaacattaggagaatgctgggttgaaatcactatagtatctatagaatgtatcttttcattctcatatttaaatgttatttggctctttgcatccggtcttagccaacctacatctttttcttttctcaaaagagataactggtgaaccaatctatgtgaatatgttattggtgctggcatcaatacatcagtttcattattggcataaccaaacatcaatccttggtcacctgcgccttgatcttcatcaatttctctatcaacaccttgcgctatatctttagactgaatacctattttattaacaaattctacattatcgccactaaaacctaaatcctctgaattatatccaatatcattaattgtatttctaacaatgttctcataatcaatttgtgctgaggttgatatttctccgccaattacaacaataccttttgaaccttcttcagatttaactaacgcttcacaggcaactcttgcttttttatcttttgatattaccgcatctaaaatcgcatcggatatctgatcacataacttatctggatgaccctctgacactgattcagaagtaaacactttagaaaccataataatttccccgcaatagattaaaataataatatcataatcaaattttttgggctataaatattgccctcgatattggtggaaatccttctattgtctttccattaggtaataaaaaatcacttaaacttttaccagtcatccattttgtagatctttgctcattcttatctgtaaaactttcattaatacattcaatatttttaaaaccattttgtttaagtaaattaattatgtttttttttcttaaaattattttaatatttcgcattcctgcataagtttgatttttttcaataataatatcttcttttttagttgaaataattgattctagaattagatacccatttttttttaataatttatttatagtttgaaaatgagtaacaggatctttcgtgtgatatagaattcccatagataataacagatcaaaatcaaaactttttattaaaaaatcttcagcagtacaaggcaatataataatattatttagattcttggcataaaattttgtagataaaaattgataaatatataaaggagttctatccaacccaactattaaatctggttctagattcaataacttatatgaatagtagccgttgctacagcctaaatctccaatacgcataccttttaattttggaaaaaaatttttgagtctattccacttaatatccgatcgccattctgaatctatatcaataccaaataatgaaaagggtccttttctccaaggacttaaatttaataaacttttttcaagaatttttttttggttagtattaatttctgaagacctaccaaaaataattttattattttgtatattaaaataatttgtacttatacctggcagggaatttaagatattcctccatttttctgtatcaccatggttacagaaatttttattttctaaataaaaatcaaataaagatttgtattcattcattaaaatttcagaaaaatattcattaatttttaaatatgaaagaatatttattttattagcacccatgatgcaaaattataacatttaaaccattgataaaagttattgcacccaatatttttgaatcttttttcatgatctttttcactctctatgatcatagaatcagcaagcgcaagcttctttctatctatttcttctttagaatacccattattttctttaaagaaatcgtgaaaattttgtaataaaatattatcttgcatcttatttaattttactttttcggtaataattattacaccgccagtattaagttctttgaataatctccttaataaattttctcttttagttgtaggtacgaattgaagagttaaatttaaaataactactgaaggatttacgatattatattcgcatatatctgaattaataaaattaatttttgggtctttaatactttttttgcaaatatttatcattgcttttgatgaatcaatcgcaaatacttttccatctaaattttttacattcttgagtattgataaagaacaagcagacaatgaagatcccaaatcgtatacatttgtgcccggctggtaaaatttttttgcgactatgcctatattgttaattaaaaattcgtaccctggaacagatctttttaccatatcttcaaaaacatctgcaacttcgctattaaaagaaaatttatggttttttggatactgctttttgtataaattatcttttttatcgtttttcatttaattttttttggaacttttttatttttaaatgaagtatatattggagtaccattcctaaatttaggataatcttcgccttttattagtggttcaatataatncctacaagattttgtgatatggtacccatcagaagaaatatattttcttggcagtttcttttccacatttgctactttcgataatggaacggaagcaagtttccatctatatggtttatttgaaactctctttatgcttgccattacagcgttttttcctctgacagctatatcaaccgcatata

SEQ ID NO: 979 - DNA, 4000 bp, Escherichia coli
  misc_feature (1985)..(1985): n is a, c, g, or t
  misc_feature (1991)..(1991): n is a, c, g, or t
acaacgccgagcgaagcgccgaccccggggtcacggcgaggggctgccgacagatggatgcgctcgaggcgcgtttcgcgagactgcgcgccgacacggcgagagggatcgcgctgtacgcgtcaccgatgcgtcggtgcttgctcacggcgaacgcgatggcgcgagggatgcggacgcgggccaaggtgatgatcgacgcgcacgagcacggcggatgctttcgcggcgcgcgcggacgagacgcggacgcggacgggacgagtcgagcgatcggcgagcgcgggatgacgagagatgagatcgagagcgagttcgagctcgtggatgcgagcgatgtgccgacgatcgggtggtgggacgcctcgcgagggtgcgagacggtggcggaggcgcagacgcgcgcgcgcggcgtggcgaagtatttaatgcacaaggcgcgcgcgatggcggcgggtgaggaggaagagatggacgtgtgcatcgtcacgcacggaatgtttatcgatatgctgctcaagacgctgttcgatgtgccgagaacgcgaggaaagcagggggcgctgttttgctcgcaaaacgcgtgcgtgcacgaacttcatctcgacatcgccgaagacggcgattcggtgggattgcaggtgtttaacgacgtcacgcacattcccgaagaggcacgctcgggtggcaccgtcgacgggctctcggaggcgtacacgaacgaaggttcggcgtgagacgcgttcgagtcggcgtaagtttcgccgtaatattttacagtacatttgatgttgcaatatatctaggtttgagctaaacacgagcgcttgtcgtttgcgcactacagacgagccttcttcccgcttcgcatgaacggtcgcaggctccattcgatgtcgcaatcgtccatttccaccgtcccgagcttgatttggtacaagcgcatctcgaacctcggaccgatttccgtgagcgcgactgatttcgcccctttcggcatctcgtacatgtgatggcgcaaagaaatataatcagcatcgttcgcaaacgtcacgacgcgctttgacttcgccttgggctcggggaacaagtgcttcagcaccgtcgccgtgcgcttgccgagcggcgacgtaaaattttctaaaatcaagtgcggaaacacctcgctgacgtgaccgatgtcctgatccttgatatcgtgccgcatcaccgtgttggacaacccaaagtaacacgtcggcccgaacggtaggtgcgaaatcaccaacccatccggctcgccccggtgttcgtgcaccatgactaaatccgtgaacccgccgtttcgacacaaatccaccaaatccggcaagatttgactcccgcggttgatcctttgcgacgtgggaaacaacaacttgagctctttcgcgaattgttgcaaccgactcgacggatctcgcgacgtcgtcagaagcactctcggttcccgttccgccgccttcgcgtactcgtcgtcaatcacccctcgcgccccgtacgacgccgtcttcgcgtcttccgcgtgcacttcctcccgcaatcgcgcttcttccttccgcaactccgtcgggatcgccttgccgtcctccaggcactgtcgaatcgttcgtttcttttcgtacagctcgcgctccttgccttcgagcgattttcgatacacaaactctcgccgcaggcgcgccgtgcgtcgaagcatgccgacgaatcacggggcgttcgaacccgaacgcgtcgcgccgtcgcgtcggtccgtcgcgccgtcgcgtccgcgtcgacgtcgtcgccccgttcgacgcgtcgcgcacttcggccgccgccgccgcgcgcgacggcgcgacgtcgcccggcgccggacgcgccgcgcgcgccgtacgcgacgcgatcgaaccgccatcaaacgtcgcgcgtcgatcgcatcataaaacgacgaccgcgtcgaatgatggcgccgcgaaccacgaatntgcgcntggggtttacgcgatggatcgataaaaatcatccgcgcgcgatccgaacgcgcccgcgtcgtcccggcgcgcgcgcgcccgcgcggggcgtcacaacgcgcgcgcgctctctcgacacaccgatcgatcatggcgtctctcacgcaatccgccgtcttcggcaagaagttcacgaccgtgaaggcgtccacgaagcggtgcgtgcgcgcgcgcgcgtcgacgacgatcgaatcgcccgcgcgcgatcgatcgcgtatcccgttcgcgatagggtgatggcgacggcgatggccggcgcgccggcgcgcgtcgtcgcggcgtcgtcgcgatcgagcggaattccgcgcgaaaggaatttcacgcgtcgatcgcgcgacgccgcgagacgcgagacgcgtcgccgtcgccgtcgccgccgtcgacatcgatcgatccacgtccacgatcgcgcgtcgcgctcgatctcgagactgacgaacgtcgtcgcgttcgcgcgtctcgtccacagcgccaccaagaccacggtcgctcgcgcgtcgatgaacgacttcgcggagaaggtgtccaaggcgtccgtcgcgctcggcgtcgccggtgccgtgctcgcgcaggtgcgtcgaacgaatcgaatcctcgaacgagatacgagcgcgcgatacggttggggcgtgcgcgcgcgagggagagacgacgcgcgcgggtcggcgcgtcggacgtcgagtgggcgttcgtcggacgcagaaaattgcccgcgacgcggacggcgacgcgcggcgcgcgcgccgacggcgtcgacgtcgcgcgttcgcgcgttcgcgccatcgtgaaacgccccgtatcgcgagagatctctggactgacgaatttgaaacccttttgtatgcgcaaacagtctgcgggtgctgtcacgtacgacgaactccaaggcttgacgtacttgcaagtcaagggtactggcttggcgaacacgtgcccggtcgtcgaaggtggtgtgtccggcaaggaaatcaaggctggtgactacgccctcgagcgattctgcatggaaccgacctcgttcacggtgaaggaagagtcgcaattcaagcaaggcgaatccgagttctcgaagacgcgcttgatgacgcgcttgacgtacaccctcgacggcatgactggctccttcaaggttggctccgatggctccgtcaccgtccaagagaacgatggcctcgactacgccccggtcaccgtgcaattgccgggtggcgagcgcgtgccgttcttgttcacgctcaaggagttcactggcaagggtaacacgtcccagttcggcggcgacttcgtcgtcccgtcttaccgtggttcttctttcctcgacccgaagggccgtggtggttccactggttacgacaacgccgtcgccctcccggcgcgcgctgactccgaggaactccaaaaggagaaccaaaagaacaccgccgcgctcaagggctccgccgtgttcaacgtcgccaagtacgacccggccaccggtgaaatcgccggcgttttcgagtccatccagccgtctgacactgatcttggcgccaaggtgccgaaggatgttaagatcaccggcctttggtatgccaaccttggcagcaagtagacgacaggattacgctgtatgagctgcgcgatggcgatttagtgacgttgtgcgcgtcacgctgtatgcgaaccgagtagtcaatttggtgacgtacgaaatagagtaccttagaatgtgtcgatgatccgtgacgggcggtgtcgcgtcagcgattccacacgccgcgattatttcggcgcttgcgaaacctgatttctccgcaaagatatgtaacgaacagagtttcaacttccacaatccttaaaacgctaaatcatctactcgcttcgtcgctcgcgatagtatccgcctctcgcaggatcgagcgcggccaaattttgaaacatttcccgcgggtgttcgtctccgagcgacgcgagcgctaggagcggccact

SEQ ID NO: 980 - DNA, 4000 bp, Escherichia coli
  misc_feature (1510)..(1510): n is a, c, g, or t
  misc_feature (1990)..(1990): n is a, c, g, or t
  misc_feature (2320)..(2321): n is a, c, g, or t
  misc_feature (2324)..(2325): n is a, c, g, or t
  misc_feature (2328)..(2328): n is a, c, g, or t
  misc_feature (2332)..(2333): n is a, c, g, or t
  misc_feature (2339)..(2339): n is a, c, g, or t
  misc_feature (2345)..(2345): n is a, c, g, or t
  misc_feature (2348)..(2348): n is a, c, g, or t
  misc_feature (2350)..(2350): n is a, c, g, or t
  misc_feature (2352)..(2354): n is a, c, g, or t
  misc_feature (2359)..(2359): n is a, c, g, or t
  misc_feature (2361)..(2361): n is a, c, g, or t
  misc_feature (2363)..(2364): n is a, c, g, or t
  misc_feature (2367)..(2367): n is a, c, g, or t
  misc_feature (2373)..(2373): n is a, c, g, or t
  misc_feature (2375)..(2375): n is a, c, g, or t
  misc_feature (2377)..(2377): n is a, c, g, or t
  misc_feature (2379)..(2380): n is a, c, g, or t
  misc_feature (2382)..(2384): n is a, c, g, or t
  misc_feature (2386)..(2386): n is a, c, g, or t
  misc_feature (2388)..(2388): n is a, c, g, or t
  misc_feature (2391)..(2391): n is a, c, g, or t
  misc_feature (2393)..(2393): n is a, c, g, or t
  misc_feature (2396)..(2396): n is a, c, g, or t
  misc_feature (2400)..(2401): n is a, c, g, or t
  misc_feature (2405)..(2405): n is a, c, g, or t
  misc_feature (2408)..(2409): n is a, c, g, or t
  misc_feature (2412)..(2413): n is a, c, g, or t
  misc_feature (2415)..(2417): n is a, c, g, or t
  misc_feature (2420)..(2420): n is a, c, g, or t
  misc_feature (2423)..(2424): n is a, c, g, or t
  misc_feature (2428)..(2429): n is a, c, g, or t
  misc_feature (2431)..(2432): n is a, c, g, or t
  misc_feature (2436)..(2437): n is a, c, g, or t
  misc_feature (2443)..(2444): n is a, c, g, or t
  misc_feature (2449)..(2449): n is a, c, g, or t
  misc_feature (2453)..(2456): n is a, c, g, or t
  misc_feature (2458)..(2458): n is a, c, g, or t
  misc_feature (2460)..(2460): n is a, c, g, or t
  misc_feature (2462)..(2462): n is a, c, g, or t
  misc_feature (2464)..(2465): n is a, c, g, or t
  misc_feature (2467)..(2470): n is a, c, g, or t
  misc_feature (2473)..(2474): n is a, c, g, or t
  misc_feature (2476)..(2477): n is a, c, g, or t
  misc_feature (2482)..(2482): n is a, c, g, or t
  misc_feature (2484)..(2484): n is a, c, g, or t
  misc_feature (2486)..(2487): n is a, c, g, or t
  misc_feature (2492)..(2492): n is a, c, g, or t
  misc_feature (2495)..(2495): n is a, c, g, or t
  misc_feature (2499)..(2500): n is a, c, g, or t
  misc_feature (2503)..(2504): n is a, c, g, or t
  misc_feature (2506)..(2507): n is a, c, g, or t
  misc_feature (2509)..(2510): n is a, c, g, or t
  misc_feature (2512)..(2513): n is a, c, g, or t
  misc_feature (2515)..(2519): n is a, c, g, or t
  misc_feature (2521)..(2522): n is a, c, g, or t
  misc_feature (2525)..(2525): n is a, c, g, or t
  misc_feature (2528)..(2528): n is a, c, g, or t
  misc_feature (2531)..(2533): n is a, c, g, or t
  misc_feature (2536)..(2536): n is a, c, g, or t
  misc_feature (2538)..(2538): n is a, c, g, or t
  misc_feature (2540)..(2541): n is a, c, g, or t
  misc_feature (2543)..(2545): n is a, c, g, or t
  misc_feature (2547)..(2547): n is a, c, g, or t
  misc_feature (2549)..(2551): n is a, c, g, or t
  misc_feature (2558)..(2558): n is a, c, g, or t
  misc_feature (2560)..(2560): n is a, c, g, or t
  misc_feature (2564)..(2566): n is a, c, g, or t
  misc_feature (2568)..(2568): n is a, c, g, or t
  misc_feature (2571)..(2573): n is a, c, g, or t
  misc_feature (2577)..(2578): n is a, c, g, or t
  misc_feature (2582)..(2582): n is a, c, g, or t
  misc_feature (2586)..(2586): n is a, c, g, or t
  misc_feature (2588)..(2588): n is a, c, g, or t
  misc_feature (2590)..(2590): n is a, c, g, or t
  misc_feature (2592)..(2593): n is a, c, g, or t
  misc_feature (2595)..(2595): n is a, c, g, or t
  misc_feature (2597)..(2597): n is a, c, g, or t
  misc_feature (2601)..(2603): n is a, c, g, or t
  misc_feature (2605)..(2606): n is a, c, g, or t
  misc_feature (2610)..(2610): n is a, c, g, or t
  misc_feature (2612)..(2613): n is a, c, g, or t
  misc_feature (2616)..(2617): n is a, c, g, or t
  misc_feature (2620)..(2621): n is a, c, g, or t
  misc_feature (2623)..(2624): n is a, c, g, or t
  misc_feature (2627)..(2627): n is a, c, g, or t
  misc_feature (2629)..(2629): n is a, c, g, or t
  misc_feature (2631)..(2631): n is a, c, g, or t
  misc_feature (2633)..(2633): n is a, c, g, or t
  misc_feature (2635)..(2636): n is a, c, g, or t
  misc_feature (2640)..(2640): n is a, c, g, or t
  misc_feature (2642)..(2642): n is a, c, g, or t
  misc_feature (2644)..(2646): n is a, c, g, or t
  misc_feature (2648)..(2651): n is a, c, g, or t
  misc_feature (2653)..(2653): n is a, c, g, or t
  misc_feature (2658)..(2659): n is a, c, g, or t
  misc_feature (2661)..(2661): n is a, c, g, or t
  misc_feature (2663)..(2671): n is a, c, g, or t
  misc_feature (2673)..(2674): n is a, c, g, or t
  misc_feature (2679)..(2683): n is a, c, g, or t
  misc_feature (2686)..(2686): n is a, c, g, or t
  misc_feature (2688)..(2688): n is a, c, g, or t
  misc_feature (2691)..(2692): n is a, c, g, or t
  misc_feature (2694)..(2694): n is a, c, g, or t
  misc_feature (2697)..(2697): n is a, c, g, or t
  misc_feature (2699)..(2699): n is a, c, g, or t
  misc_feature (2703)..(2706): n is a, c, g, or t
  misc_feature (2710)..(2712): n is a, c, g, or t
  misc_feature (2715)..(2716): n is a, c, g, or t
  misc_feature (2719)..(2719): n is a, c, g, or t
  misc_feature (2723)..(2723): n is a, c, g, or t
  misc_feature (2725)..(2725): n is a, c, g, or t
  misc_feature (2728)..(2728): n is a, c, g, or t
  misc_feature (2730)..(2735): n is a, c, g, or t
  misc_feature (2737)..(2737): n is a, c, g, or t
  misc_feature (2739)..(2739): n is a, c, g, or t
  misc_feature (2742)..(2742): n is a, c, g, or t
  misc_feature (2744)..(2744): n is a, c, g, or t
  misc_feature (2746)..(2747): n is a, c, g, or t
  misc_feature (2749)..(2749): n is a, c, g, or t
  misc_feature (2751)..(2751): n is a, c, g, or t
  misc_feature (2755)..(2756): n is a, c, g, or t
  misc_feature (2758)..(2759): n is a, c, g, or t
  misc_feature (2761)..(2761): n is a, c, g, or t
  misc_feature (2764)..(2764): n is a, c, g, or t
  misc_feature (2767)..(2767): n is a, c, g, or t
  misc_feature (2769)..(2769): n is a, c, g, or t
  misc_feature (2771)..(2771): n is a, c, g, or t
  misc_feature (2773)..(2773): n is a, c, g, or t
  misc_feature (2776)..(2779): n is a, c, g, or t
  misc_feature (2781)..(2782): n is a, c, g, or t
  misc_feature (2784)..(2784): n is a, c, g, or t
  misc_feature (2786)..(2786): n is a, c, g, or t
  misc_feature (2788)..(2789): n is a, c, g, or t
  misc_feature (2792)..(2792): n is a, c, g, or t
  misc_feature (2797)..(2798): n is a, c, g, or t
  misc_feature (2800)..(2800): n is a, c, g, or t
  misc_feature (2803)..(2803): n is a, c, g, or t
  misc_feature (2806)..(2808): n is a, c, g, or t
  misc_feature (2813)..(2813): n is a, c, g, or t
  misc_feature (2815)..(2818): n is a, c, g, or t
  misc_feature (2820)..(2820): n is a, c, g, or t
  misc_feature (2822)..(2823): n is a, c, g, or t
  misc_feature (2825)..(2826): n is a, c, g, or t
  misc_feature (2832)..(2832): n is a, c, g, or t
  misc_feature (2839)..(2842): n is a, c, g, or t
  misc_feature (2845)..(2845): n is a, c, g, or t
  misc_feature (2848)..(2848): n is a, c, g, or t
  misc_feature (2850)..(2850): n is a, c, g, or t
  misc_feature (2854)..(2854): n is a, c, g, or t
  misc_feature (2856)..(2857): n is a, c, g, or t
  misc_feature (2859)..(2859): n is a, c, g, or t
  misc_feature (2861)..(2861): n is a, c, g, or t
  misc_feature (2868)..(2869): n is a, c, g, or t
  misc_feature (2871)..(2871): n is a, c, g, or t
  misc_feature (2876)..(2876): n is a, c, g, or t
  misc_feature (2879)..(2881): n is a, c, g, or t
  misc_feature (2883)..(2884): n is a, c, g, or t
  misc_feature (2886)..(2886): n is a, c, g, or t
  misc_feature (2888)..(2890): n is a, c, g, or t
  misc_feature (2892)..(2892): n is a, c, g, or t
  misc_feature (2895)..(2895): n is a, c, g, or t
  misc_feature (2897)..(2898): n is a, c, g, or t
  misc_feature (2900)..(2901): n is a, c, g, or t
  misc_feature (2903)..(2904): n is a, c, g, or t
  misc_feature (2907)..(2908): n is a, c, g, or t
  misc_feature (2910)..(2912): n is a, c, g, or t
  misc_feature (2914)..(2914): n is a, c, g, or t
  misc_feature (2916)..(2916): n is a, c, g, or t
  misc_feature (2919)..(2920): n is a, c, g, or t
  misc_feature (2925)..(2925): n is a, c, g, or t
  misc_feature (2928)..(2929): n is a, c, g, or t
  misc_feature (2931)..(2932): n is a, c, g, or t
  misc_feature (2935)..(2936): n is a, c, g, or t
  misc_feature (2938)..(2940): n is a, c, g, or t
  misc_feature (2943)..(2943): n is a, c, g, or t
  misc_feature (2946)..(2947): n is a, c, g, or t
  misc_feature (2950)..(2950): n is a, c, g, or t
  misc_feature (2954)..(2954): n is a, c, g, or t
  misc_feature (2956)..(2956): n is a, c, g, or t
  misc_feature (2959)..(2959): n is a, c, g, or t
  misc_feature (2962)..(2963): n is a, c, g, or t
  misc_feature (2967)..(2968): n is a, c, g, or t
  misc_feature (2970)..(2970): n is a, c, g, or t
  misc_feature (2972)..(2973): n is a, c, g, or t
  misc_feature (2975)..(2975): n is a, c, g, or t
  misc_feature (2977)..(2977): n is a, c, g, or t
  misc_feature (2981)..(2982): n is a, c, g, or t
  misc_feature (2984)..(2988): n is a, c, g, or t
  misc_feature (2990)..(2990): n is a, c, g, or t
  misc_feature (2993)..(2996): n is a, c, g, or t
  misc_feature (2998)..(3001): n is a, c, g, or t
  misc_feature (3004)..(3006): n is a, c, g, or t
  misc_feature (3009)..(3010): n is a, c, g, or t
  misc_feature (3012)..(3013): n is a, c, g, or t
  misc_feature (3017)..(3019): n is a, c, g, or t
  misc_feature (3021)..(3022): n is a, c, g, or t
  misc_feature (3024)..(3024): n is a, c, g, or t
  misc_feature (3028)..(3028): n is a, c, g, or t
  misc_feature (3031)..(3033): n is a, c, g, or t
  misc_feature (3038)..(3038): n is a, c, g, or t
  misc_feature (3040)..(3043): n is a, c, g, or t
  misc_feature (3045)..(3045): n is a, c, g, or t
  misc_feature (3048)..(3049): n is a, c, g, or t
  misc_feature (3051)..(3051): n is a, c, g, or t
  misc_feature (3055)..(3055): n is a, c, g, or t
  misc_feature (3058)..(3058): n is a, c, g, or t
  misc_feature (3060)..(3060): n is a, c, g, or t
  misc_feature (3064)..(3066): n is a, c, g, or t
  misc_feature (3068)..(3069): n is a, c, g, or t
  misc_feature (3071)..(3073): n is a, c, g, or t
  misc_feature (3075)..(3076): n is a, c, g, or t
  misc_feature (3078)..(3079): n is a, c, g, or t
  misc_feature (3081)..(3081): n is a, c, g, or t
  misc_feature (3084)..(3087): n is a, c, g, or t
  misc_feature (3089)..(3093): n is a, c, g, or t
  misc_feature (3095)..(3095): n is a, c, g, or t
  misc_feature (3097)..(3098): n is a, c, g, or t
  misc_feature (3100)..(3100): n is a, c, g, or t
  misc_feature (3102)..(3103): n is a, c, g, or t
  misc_feature (3107)..(3108): n is a, c, g, or t
  misc_feature (3110)..(3110): n is a, c, g, or t
  misc_feature (3112)..(3114): n is a, c, g, or t
  misc_feature (3118)..(3121): n is a, c, g, or t
  misc_feature (3123)..(3123): n is a, c, g, or t
  misc_feature (3126)..(3127): n is a, c, g, or t
  misc_feature (3131)..(3131): n is a, c, g, or t
  misc_feature (3135)..(3138): n is a, c, g, or t
  misc_feature (3143)..(3145): n is a, c, g, or t
  misc_feature (3148)..(3148): n is a, c, g, or t
  misc_feature (3150)..(3150): n is a, c, g, or t
  misc_feature (3152)..(3152): n is a, c, g, or t
  misc_feature (3156)..(3159): n is a, c, g, or t
  misc_feature (3163)..(3166): n is a, c, g, or t
  misc_feature (3168)..(3170): n is a, c, g, or t
  misc_feature (3179)..(3180): n is a, c, g, or t
  misc_feature (3182)..(3183): n is a, c, g, or t
  misc_feature (3191)..(3191): n is a, c, g, or t
  misc_feature (3194)..(3195): n is a, c, g, or t
  misc_feature (3203)..(3203): n is a, c, g, or t
  misc_feature (3206)..(3207): n is a, c, g, or t
  misc_feature (3216)..(3216): n is a, c, g, or t
  misc_feature (3218)..(3219): n is a, c, g, or t
  misc_feature (3223)..(3223): n is a, c, g, or t
  misc_feature (3228)..(3229): n is a, c, g, or t
  misc_feature (3239)..(3242): n is a, c, g, or t
  misc_feature (3246)..(3246): n is a, c, g, or t
  misc_feature (3250)..(3252): n is a, c, g, or t
  misc_feature (3254)..(3254): n is a, c, g, or t
  misc_feature (3257)..(3257): n is a, c, g, or t
  misc_feature (3260)..(3262): n is a, c, g, or t
  misc_feature (3264)..(3274): n is a, c, g, or t
  misc_feature (3276)..(3276): n is a, c, g, or t
  misc_feature (3279)..(3283): n is a, c, g, or t
  misc_feature (3285)..(3288): n is a, c, g, or t
  misc_feature (3290)..(3296): n is a, c, g, or t
  misc_feature (3299)..(3300): n is a, c, g, or t
  misc_feature (3302)..(3320): n is a, c, g, or t
  misc_feature (3323)..(3323): n is a, c, g, or t
  misc_feature (3325)..(3326): n is a, c, g, or t
  misc_feature (3329)..(3331): n is a, c, g, or t
  misc_feature (3334)..(3334): n is a, c, g, or t
  misc_feature (3336)..(3338): n is a, c, g, or t
  misc_feature (3341)..(3342): n is a, c, g, or t
  misc_feature (3344)..(3345): n is a, c, g, or t
  misc_feature (3348)..(3348): n is a, c, g, or t
  misc_feature (3350)..(3359): n is a, c, g, or t
  misc_feature (3362)..(3363): n is a, c, g, or t
  misc_feature (3365)..(3371): n is a, c, g, or t
  misc_feature (3374)..(3374): n is a, c, g, or t
  misc_feature (3377)..(3383): n is a, c, g, or t
  misc_feature (3385)..(3399): n is a, c, g, or t
  misc_feature (3401)..(3404): n is a, c, g, or t
  misc_feature (3406)..(3412): n is a, c, g, or t
  misc_feature (3414)..(3424): n is a, c, g, or t
  misc_feature (3426)..(3436): n is a, c, g, or t
  misc_feature (3439)..(3441): n is a, c, g, or t
  misc_feature (3445)..(3448): n is a, c, g, or t
  misc_feature (3450)..(3460): n is a, c, g, or t
  misc_feature (3462)..(3469): n is a, c, g, or t
  misc_feature (3471)..(3473): n is a, c, g, or t
  misc_feature (3475)..(3477): n is a, c, g, or t
  misc_feature (3479)..(3484): n is a, c, g, or t
  misc_feature (3486)..(3491): n is a, c, g, or t
  misc_feature (3493)..(3495): n is a, c, g, or t
  misc_feature (3497)..(3500): n is a, c, g, or t
  misc_feature (3503)..(3511): n is a, c, g, or t
  misc_feature (3513)..(3522): n is a, c, g, or t
  misc_feature (3527)..(3533): n is a, c, g, or t
  misc_feature (3535)..(3559): n is a, c, g, or t
  misc_feature (3562)..(3573): n is a, c, g, or t
  misc_feature (3575)..(3594): n is a, c, g, or t
  misc_feature (3596)..(3598): n is a, c, g, or t
  misc_feature (3600)..(3602): n is a, c, g, or t
  misc_feature (3604)..(3619): n is a, c, g, or t
  misc_feature (3622)..(3629): n is a, c, g, or t
  misc_feature (3631)..(3643): n is a, c, g, or t
  misc_feature (3645)..(3645): n is a, c, g, or t
  misc_feature (3647)..(3653): n is a, c, g, or t
  misc_feature (3655)..(3663): n is a, c, g, or t
  misc_feature (3665)..(3667): n is a, c, g, or t
  misc_feature (3669)..(3670): n is a, c, g, or t
  misc_feature (3672)..(3675): n is a, c, g, or t
  misc_feature (3679)..(3685): n is a, c, g, or t
  misc_feature (3690)..(3694): n is a, c, g, or t
  misc_feature (3696)..(3700): n is a, c, g, or t
  misc_feature (3702)..(3705): n is a, c, g, or t
  misc_feature (3707)..(3711): n is a, c, g, or t
  misc_feature (3713)..(3717): n is a, c, g, or t
  misc_feature (3719)..(3729): n is a, c, g, or t
  misc_feature (3731)..(3735): n is a, c, g, or t
  misc_feature (3738)..(3741): n is a, c, g, or t
  misc_feature (3743)..(3753): n is a, c, g, or t
  misc_feature (3756)..(3795): n is a, c, g, or t
  misc_feature (3797)..(3811): n is a, c, g, or t
  misc_feature (3813)..(3814): n is a, c, g, or t
  misc_feature (3816)..(3819): n is a, c, g, or t
  misc_feature (3821)..(3822): n is a, c, g, or t
  misc_feature (3825)..(3832): n is a, c, g, or t
  misc_feature (3835)..(3839): n is a, c, g, or t
  misc_feature (3841)..(3843): n is a, c, g, or t
  misc_feature (3845)..(3849): n is a, c, g, or t
  misc_feature (3851)..(3855): n is a, c, g, or t
  misc_feature (3858)..(3859): n is a, c, g, or t
  misc_feature (3862)..(3864): n is a, c, g, or t
  misc_feature (3866)..(3866): n is a, c, g, or t
  misc_feature (3869)..(3879): n is a, c, g, or t
  misc_feature (3881)..(3884): n is a, c, g, or t
  misc_feature (3886)..(3889): n is a, c, g, or t
  misc_feature (3891)..(3895): n is a, c, g, or t
  misc_feature (3897)..(3907): n is a, c, g, or t
  misc_feature (3910)..(3910): n is a, c, g, or t
  misc_feature (3912)..(3912): n is a, c, g, or t
  misc_feature (3914)..(3918): n is a, c, g, or t
  misc_feature (3924)..(3924): n is a, c, g, or t
  misc_feature (3926)..(3926): n is a, c, g, or t
  misc_feature (3928)..(3931): n is a, c, g, or t
  misc_feature (3938)..(3938): n is a, c, g, or t
  misc_feature (3940)..(3945): n is a, c, g, or t
  misc_feature (3947)..(3948): n is a, c, g, or t
  misc_feature (3955)..(3961): n is a, c, g, or t
  misc_feature (3963)..(3964): n is a, c, g, or t
  misc_feature (3966)..(3980): n is a, c, g, or t
  misc_feature (3982)..(3984): n is a, c, g, or t
  misc_feature (3986)..(3988): n is a, c, g, or t
  misc_feature (3992)..(3992): n is a, c, g, or t
  misc_feature (3994)..(3995): n is a, c, g, or t
  misc_feature (3997)..(3998): n is a, c, g, or t
  misc_feature (4000)..(4000): n is a, c, g, or t
tggacagaatgtcttggggccaattgttatttttgacatattccccattaggctttgttgtcttgtcggtaatgattgctttaggtgcgtttcattgcattaacggcatcagattgatgttaaatcaaggagggataggaataggaactccaactagacccgattacccatatcaaattcaatcaatgggaaaaaagaacagattgtgcatttacgttaccatgggtgtttcagcattggcattatacgctgcattaggggtgtttttcaaattttgagagtaagggaaagccatattcgaaaaatccattacggtacagctttaggcgccatagggttagtcgcattacacatttcagttagatttgcaacggggaattttgcatcttcattatcgtacgagtatgtaatttctaattatcaaaatttcacttatgcattacttttggaaatgatattaattttagtgtcagttcatggtttcaatggtcttcgaggtattttgcttgattatagaagtggatacaaatatgaaaaagctgtgaattggggatgtttcatttcggtcatatcattagtcacctatggaactatcaccataattcttgcaaaccaaattaaaatttgattgtgatggatagtttaatcttggaggatttgatttagaatatcttttagttttggatgggtaatctcgttttctgcagatttaaaaaaagactcaactgcatcttttgatgacccttgtttttgatacatttttgcttgtaatgccatttctaatttatcaatttgatgtacaattattgattcaggagattcttgatcttgatactcattccaaatttgagtatattgcaattttatagattctggcaaggtgctgagaattttaccatatgcattattttcaattattattttatcttctttgcttatttggtttggagtataatctccaatttctgattcagccaaatcatgcaataatatcattttgagtattttctcagaattgtaatttcctaaatcagatattatcattcccattatggccatagagtaactatgatcagccacggattcagggttctttagagataatttgtccatccacccctgtctggaaatatttttcaaatttactgcagttttaaaaaaatctaaaatcatgattacattatagataatattttgtcctaatgaattttcatatgtggtttttcgaatcacataataattaagttaaattaaacaagatgtgaaaatttacacaaaaacaggggatgacggaaatacaggtttgcagggtaattttagaattgcaaaatcacatccaagaattatggcatatgggacagtggatgaagcgaatgccgcaattggggttatcttgacaaatgtgttggatgatgatgtcagtcaacttttgagtcaaattcaaaatgatttatttttactgggttccgatttatccaaccagaatctaaacgatcttaaaaacagggtntccttggagatgattgaaaaattagaaaaatcaattgatctgtttgaattagaattatccccgctaacaaattttattctacctggtggggatttagcagctgcacagacacatcaagttagaacaattgtaagaagggcagaaacactggtagtaaaattaagcgataaggatgaaattaattctaattgcataaaatatctgaacagattatctgatttgatgtttgtattgggtcgcttgatcaataagcgaaaaggaatagaggacatcctctggaaaccataaaaagacaaactttaatgtctcatcttgagtattttttttagtgccagggtagctcagcctggaagagcactcggctgaagaccgggctgtcgcttgttcaaatcatgcccctggcactcttgatttaatttactttagatccaatattctcaaaaatcattaatttgataaatatctaatattcatccacangattcaaaaaatttattcctgttttttatgttaattagaattaatgaacacacttgagttagatgttgttatcatttctactgctttaattgacatattttctttttttgaaattttcaatagttcatcagaatgttcttccttcaaatgtttgagaaattctatttcttcgacattattacacttaaaatgacataaggggaacacacaattaaaattcaataaaataagtatagtcatctaataaaaaaattcatctaatgataaaatttactgtgaattaggatgtatttttaaaaaaatcccattagaattagaaataaaattaannttnnaanattnnagaaanaaaaanatngnannngaaantnanntcnaaaaantntntnngnnnancnaantnaanaaanntttnccnnaanntnnnttntcnnaaanncnntttnnacaaanngtttntttnnnngnantnanntnnnnccnnannttttngntnnaaaanttntttnnaanngnnanncnngnnnnntnnaanttnttnnnttngntnncnnntntnnnaaaaaantntttnnntnttnnntttnncccntttntnananncncncccnnngnntaantnnaannttnnanntgngntntngnnaaanantnnncnnnnanttttnncnannnnnnnnnannttttnnnnnaananaanntnttnantttnnnntttnnnttnnccncccnanaanannnnnnantnttnantnnananaaanngnnanaanagncnantnttnnnntnnananannctnttttnnanaanttnnnaaaanannnnananntnnaaaaanaaaaaannnncanaananaaantnnananaaaaaanncnaaaanatnnntnnanannnanagntnngnnannggnntnnngnanttnnccccncanntnnaanngnnnttntcnnggngttnanagnccnngttnnananncnanattnnannnnntnaannnnannnnttnnnggnnanngggnnncnnanaggnaannnaaaangnnnntnttnnanaaanaananagannncnnannnanncnnanaannnnannnnnantnngngnnaaanntncnnnaaannnnanaanntttnaaannnncaccnnnccnanantttnnnnattnnnngnnnaaaaaaaanntnnaaaaaaanttnnaaaaaaanttnnaaaaaaaantnnaaanaaaannaaaaaaaaannnnaaanaaannntnaanaannnannnnnnnnnnnantgnnnnngnnnntnnnnnnnttnntnnnnnnnnnnnnnnnnnnnaanannaannnaangnnnaanntnnagnannnnnnnnnnaannannnnnnnaanaannnnnnnannnnnnnnnnnnnnntnnnntnnnnnnnannnnnnnnnnnannnnnnnnnnnaannncaannnnannnnnnnnnnnannnnnnnntnnnannnannnnnntnnnnnnannnannnnttnnnnnnnnnannnnnnnnnnaaaannnnnnngnnnnnnnnnnnnnnnnnnnnnnnnnaannnnnnnnnnnncnnnnnnnnnnnnnnnnnnnngnnngnnntnnnnnnnnnnnnnnnnaannnnnnnngnnnnnnnnnnnnngnannnnnnnannnnnnnnntnnntnntnnnntaannnnnnnaaaannnnnannnnntnnnntnnnnntnnnnntnnnnnnnnnnntnnnnnttnnnntnnnnnnnnnnnttnnnnnnnnnnnnnnnnnnnnnnnnnnnnnnnnnnnnnnnncnnnnnnnnnnnnnnntnntnnnntnnttnnnnnnnnttnnnnncnnnannnnnannnnnatnnaannnanaannnnnnnnnnnannnnannnncnnnnntnnnnnnnnnnnttnanannnnnatttantntnnnnttttaantnnnnnntnnatttttnnnnnnntnntnnnnnnnnnnnnnnnannncnnnaaanannanncn

SEQ ID NO: 981 - DNA, 4000 bp, Escherichia coli
  misc_feature (835)..(835): n is a, c, g, or t
  misc_feature (1325)..(1325): n is a, c, g, or t
  misc_feature (1334)..(1334): n is a, c, g, or t
  misc_feature (2123)..(2123): n is a, c, g, or t
  misc_feature (3040)..(3040): n is a, c, g, or t
  misc_feature (3984)..(3984): n is a, c, g, or t
  misc_feature (3990)..(3990): n is a, c, g, or t
cgcatggtggctatgttggccaaaagcctgatgcatggtttgttgcaagcgggcatggccaattgcggcaagcatttcccaggccacggctatgtgaaagccgattcacacaccgacattcctatcgacacgcgcagcttgaaaaccatcttgcatgacgacgctttgccttatgcgtggcttagcaccagtttgagcagtgtcatgcccgcgcatgtgatttaccccaaggtagaccagcgccccgccggtttttctgcgcgctggctcaaagacatactgcgtcatcaactggggtttcagggcgcggtgttcagcgatgacttgtcaatggcaggcgcgcgtttgattgatggccaagaggtgagttacacccaagctgcggtcaccgctttgcaagcgggctgcgatttggtgttgttgtgcaaccaaagcaacccagacagcgcgggcggcggtcaagccttggatgatttactggcgggcctcgcccaagcgcagcaggcatctgcgtggcaacccagccctgtcagtgagcagcgccgcttggcactgctgccagcctgcaaggccttggattgggaagctttgatgcaatccccaagctatttgaatgctttaagcctgctgccctgacaaaactgggcctagggagtacccaccccagagcctcgtcaaaacagttaaaatagataacttaccccgacgacaacgggggcttaagcaggactaaaggaaacccatggcaaccaaatctggcaaaacctctgttgacgagagcggtcttcgttttaccagtcgtgagaatggctctcccttcgctggcatgggcaanatgggtgaaaccatgtcttgcatcaagtgcggcatgcacaaaccccgacgtcaaggcagccagcagcgctttgcaggcagcttggcttttttctgccacgactgcaaaccacctaagcccgctgtgccagcaacccctgccgccgccaaagcagcttaagcctatttcagcttattgatggcccaggttttcccgacgcaaggcggggaacaaaatcacgtcccgaatactggggctgtcggttaagagcatcatcaaacggtcaatgccaatgccgcaaccaccggcgggcggcatgccgtactccagtgcacgcacaaaatcatggtcaaacaacatggcctcatcgtcgccactgtctttggcattgacctgcgcatgaaagcgagcggcttggtcttctgcatcattcaactcgctgaaaccattgccaaattctcgtcctgtgatgtagagctcaaagcgctcggtcacctcggggtggctgtcnctggcgcgngccaagggtgaaatttccaccgggtgctcgcaaatgaaggtgggctcccagagtttttcttccacggtttcttcaaagtaaagaacctgcaagctggccaaactgcgtgccgacagtttgtgtttttcttcggagtggcccagctttttcagggcatgaaccaaccatgcactgtcgtcaacatggtctgcggcttcggtgtgcgccatgatggcttcgcggatggtgagtcgggcaaagggcttggacaagtccaccggtttgccgtcataggtcagcagcaaagtgcccacggctttgtgggcggcgtcgcggatcaggctttcggtgaactgcatcaggtcttggtagttccaataggccgcgtaaaactccatcatggtgaattcggggttgtgccgcacggaaataccttcattgcgaaagttgcggttaatttcaaacacccgctcgaacccgcccaccaacaggcgcttcaagtacaactcaggcgcgatgcgcaagaacatttgctggtcgagtgcgttgtggtgagtctcgaaaggcctggcattggcgccccctgggatggggtgcaacatgggtgtttcgacttccaaaaagtcatggttcaccatgaactcgcgaataccgctgaccgctttgctgcgcgcgatgaagcgctggcgagcggtctcatcggtgatcaagtcgatatagcgttggcggtatttaatttcttggtcgtggatgccatggaatttgtctggcaggggacgcaggcttttggtcagcatgcgaagggacgtnacatgcaccgacaattcaccggttttggttttgaacagatagccttcagcgcccacgatgtcacccaaatcccagtgtttgaagtcttcataaacctcaacgcctacttcctcacctttgacatacacctgcatgcgctcggtgctgtcttgcaaggtggcaaaactggccttgcccatgacgcgtttcaaaaccatgcgaccggcaatacgcaccgtgtgtttttcttctgccagcacctcggcggttttggcaccgtgcgcggtgtgcagggattgcgcgtggtgcgcgggtttgaagtcgttggggaaagccaccgggccgccaagggcttggcgagcgcgcatggcgctcaatttttcgcggcgttctgcgataagttggttttcgtcttggggttcgggggagcttgtgttttcggacatccaaggattctaagagttcgcagacaatagaagctgtctcctagcagaacgaactgaaacaccatgagcgacacgcctacccgtcccgaactccctgaccgtttgtctatcgatgcacgcagtccgcactacctagaagcggtgttccaccacgacatcggcattcgttttaacgacaaagagcgccacgatgtggaggagtactgcatcagcgagggctgggtgaaagtgcctgcgggtaaaaccttggaccgcaaaggcaagcccttgctgattaccttaaagggcagggttgaggtgtactaccgctgaagtcaggcgactgaatccgcgggttgcttggtcagcatggccaaagcattggcaatggttttgcgcaggtcgcggcggtcgcaaatcaggtcgagtgcacccttttccagcaaaaattccgaacgctgaaacccttcaggcagggtcacgcgcaccgtgctttcaatcacccttggcccngcaaagccaatcagcgctttgggttcggcaatcaccaagtcgcccatgaaagcaaagcccgccgacacgccgcccatggtggggtcggtcagtacgctgatatagggcaggcctttttgcgccaaacgggtgagggaggcattggttttggccatttgcatcagcgacagcaagccctcttgcatgcgcgcgccaccggtggcggtgaagcaaatgaaaggcactttttgttcgatggcggtatgcacgccgcgcacaaagcgctcgccaaccaccgagcccatagagccacccatgaagtcgaactcgaaacaagccgccaccacattgatgctgtgcaccgcaccgcccatgaccaccagcgcatcggtctcgccggtattctctaaagcttctttcaagcgttcggggtatttgcggctgtccttgaatttcaaggggtccatgggcaacacctcttggccaatttcatagcggccttcggggtcgaggaaggcgtctagacgctttcgggcggtaatacggtgatggtggctgcacttgggacagacattttggttttcttccaaatcgtttttgtagagcaccgtctcgcagctggggcacttaacccacaagccttctggcacggttcgccgatccgaaggatcggtttgctggattttggagggcagcagtttttcaagccagctcatcggtattccttaatcaaagtgcaaaggcattatgcgtccagcgcttggcgaatctcggccatgaagctgcgcgcttgttcgggtgcatggcccggtgcggcggcctcgaccagctgaatcagcttgctgccaatcaccaccgcgtcggccacttgaccaatggtgcgcgctgtggccgcgtcgcgtatgccaaagcctacgcccacgggaatatgcacatgctggcgaatgcgcggcagcatggcttcnacctcntcggtattga

SEQ ID NO: 982 - DNA, 4000 bp, Escherichia coli
  misc_feature (1)..(30): n is a, c, g, or t
  misc_feature (32)..(74): n is a, c, g, or t
  misc_feature (76)..(77): n is a, c, g, or t
  misc_feature (79)..(80): n is a, c, g, or t
  misc_feature (82)..(83): n is a, c, g, or t
  misc_feature (85)..(86): n is a, c, g, or t
  misc_feature (88)..(89): n is a, c, g, or t
  misc_feature (91)..(92): n is a, c, g, or t
  misc_feature (94)..(95): n is a, c, g, or t
  misc_feature (97)..(98): n is a, c, g, or t
  misc_feature (100)..(100): n is a, c, g, or t
  misc_feature (103)..(104): n is a, c, g, or t
  misc_feature (106)..(107): n is a, c, g, or t
  misc_feature (109)..(110): n is a, c, g, or t
  misc_feature (112)..(113): n is a, c, g, or t
  misc_feature (115)..(115): n is a, c, g, or t
  misc_feature (117)..(142): n is a, c, g, or t
  misc_feature (144)..(159): n is a, c, g, or t
  misc_feature (161)..(162): n is a, c, g, or t
  misc_feature (164)..(165): n is a, c, g, or t
  misc_feature (167)..(168): n is a, c, g, or t
  misc_feature (170)..(170): n is a, c, g, or t
  misc_feature (172)..(176): n is a, c, g, or t
  misc_feature (178)..(185): n is a, c, g, or t
  misc_feature (187)..(197): n is a, c, g, or t
  misc_feature (199)..(214): n is a, c, g, or t
  misc_feature (216)..(256): n is a, c, g, or t
  misc_feature (258)..(259): n is a, c, g, or t
  misc_feature (261)..(296): n is a, c, g, or t
  misc_feature (298)..(310): n is a, c, g, or t
  misc_feature (312)..(348): n is a, c, g, or t
  misc_feature (350)..(355): n is a, c, g, or t
  misc_feature (357)..(388): n is a, c, g, or t
  misc_feature (390)..(391): n is a, c, g, or t
  misc_feature (393)..(393): n is a, c, g, or t
  misc_feature (396)..(397): n is a, c, g, or t
  misc_feature (399)..(403): n is a, c, g, or t
  misc_feature (405)..(412): n is a, c, g, or t
  misc_feature (415)..(424): n is a, c, g, or t
  misc_feature (426)..(427): n is a, c, g, or t
  misc_feature (429)..(479): n is a, c, g, or t
  misc_feature (481)..(491): n is a, c, g, or t
  misc_feature (493)..(516): n is a, c, g, or t
  misc_feature (518)..(518): n is a, c, g, or t
  misc_feature (520)..(520): n is a, c, g, or t
  misc_feature (523)..(529): n is a, c, g, or t
  misc_feature (531)..(559): n is a, c, g, or t
  misc_feature (561)..(568): n is a, c, g, or t
  misc_feature (570)..(572): n is a, c, g, or t
  misc_feature (574)..(574): n is a, c, g, or t
  misc_feature (576)..(576): n is a, c, g, or t
  misc_feature (578)..(581): n is a, c, g, or t
  misc_feature (583)..(587): n is a, c, g, or t
  misc_feature (589)..(593): n is a, c, g, or t
  misc_feature (595)..(596): n is a, c, g, or t
  misc_feature (598)..(641): n is a, c, g, or t
  misc_feature (643)..(680): n is a, c, g, or t
  misc_feature (682)..(935): n is a, c, g, or t
  misc_feature (937)..(954): n is a, c, g, or t
  misc_feature (956)..(967): n is a, c, g, or t
  misc_feature (969)..(1021): n is a, c, g, or t
  misc_feature (1023)..(1078): n is a, c, g, or t
  misc_feature (1080)..(1114): n is a, c, g, or t
  misc_feature (1116)..(1117): n is a, c, g, or t
  misc_feature (1119)..(1121): n is a, c, g, or t
  misc_feature (1123)..(1123): n is a, c, g, or t
  misc_feature (1125)..(1126): n is a, c, g, or t
  misc_feature (1129)..(1129): n is a, c, g, or t
  misc_feature (1132)..(1132): n is a, c, g, or t
  misc_feature (1135)..(1135): n is a, c, g, or t
  misc_feature (1138)..(1142): n is a, c, g, or t
  misc_feature (1144)..(1145): n is a, c, g, or t
  misc_feature (1147)..(1160): n is a, c, g, or t
  misc_feature (1162)..(1166): n is a, c, g, or t
  misc_feature (1168)..(1253): n is a, c, g, or t
  misc_feature (1255)..(1327): n is a, c, g, or t
  misc_feature (1329)..(1330): n is a, c, g, or t
  misc_feature (1332)..(1362): n is a, c, g, or t
  misc_feature (1364)..(1365): n is a, c, g, or t
  misc_feature (1367)..(1370): n is a, c, g, or t
  misc_feature (1372)..(1450): n is a, c, g, or t
  misc_feature (1452)..(1461): n is a, c, g, or t
  misc_feature (1463)..(1492): n is a, c, g, or t
  misc_feature (1494)..(1539): n is a, c, g, or t
  misc_feature (1542)..(1542): n is a, c, g, or t
  misc_feature (1544)..(1570): n is a, c, g, or t
  misc_feature (1572)..(1636): n is a, c, g, or t
  misc_feature (1638)..(1642): n is a, c, g, or t
  misc_feature (1644)..(1675): n is a, c, g, or t
  misc_feature (1677)..(1677): n is a, c, g, or t
  misc_feature (1680)..(1681): n is a, c, g, or t
  misc_feature (1684)..(1687): n is a, c, g, or t
  misc_feature (1690)..(1701): n is a, c, g, or t
  misc_feature (1703)..(1704): n is a, c, g, or t
  misc_feature (1707)..(1707): n is a, c, g, or t
  misc_feature (1709)..(1709): n is a, c, g, or t
  misc_feature (1711)..(1714): n is a, c, g, or t
  misc_feature (1716)..(1720): n is a, c, g, or t
  misc_feature (1722)..(1722): n is a, c, g, or t
  misc_feature (1724)..(1727): n is a, c, g, or t
  misc_feature (1729)..(1731): n is a, c, g, or t
  misc_feature (1733)..(1739): n is a, c, g, or t
  misc_feature (1742)..(1743): n is a, c, g, or t
  misc_feature (1745)..(1750): n is a, c, g, or t
  misc_feature (1752)..(1755): n is a, c, g, or t
  misc_feature (1757)..(1757): n is a, c, g, or t
  misc_feature (1761)..(1768): n is a, c, g, or t
  misc_feature (1770)..(1770): n is a, c, g, or t
  misc_feature (1774)..(1774): n is a, c, g, or t
  misc_feature (1776)..(1779): n is a, c, g, or t
  misc_feature (1781)..(1782): n is a, c, g, or t
  misc_feature (1784)..(1787): n is a, c, g, or t
  misc_feature (1789)..(1790): n is a, c, g, or t
  misc_feature (1792)..(1797): n is a, c, g, or t
  misc_feature (1799)..(1799): n is a, c, g, or t
  misc_feature (1805)..(1805): n is a, c, g, or t
  misc_feature (1808)..(1808): n is a, c, g, or t
  misc_feature (1811)..(1811): n is a, c, g, or t
  misc_feature (1816)..(1817): n is a, c, g, or t
  misc_feature (1819)..(1820): n is a, c, g, or t
  misc_feature (1825)..(1825): n is a, c, g, or t
  misc_feature (1828)..(1828): n is a, c, g, or t
  misc_feature (1834)..(1839): n is a, c, g, or t
  misc_feature (1847)..(1852): n is a, c, g, or t
  misc_feature (1854)..(1858): n is a, c, g, or t
  misc_feature (1860)..(1860): n is a, c, g, or t
  misc_feature (1862)..(1863): n is a, c, g, or t
  misc_feature (1869)..(1869): n is a, c, g, or t
  misc_feature (1875)..(1877): n is a, c, g, or t
  misc_feature (1989)..(1989): n is a, c, g, or t
  misc_feature (1995)..(1995): n is a, c, g, or t
  misc_feature (2268)..(2268): n is a, c, g, or t
  misc_feature (3232)..(3232): n is a, c, g, or t
  misc_feature (3410)..(3410): n is a, c, g, or t
  misc_feature (3412)..(3413): n is a, c, g, or t
  misc_feature (3416)..(3416): n is a, c, g, or t
  misc_feature (3419)..(3421): n is a, c, g, or t
  misc_feature (3423)..(3424): n is a, c, g, or t
  misc_feature (3426)..(3432): n is a, c, g, or t
  misc_feature (3434)..(3450): n is a, c, g, or t
  misc_feature (3452)..(3456): n is a, c, g, or t
  misc_feature (3459)..(3462): n is a, c, g, or t
  misc_feature (3464)..(3475): n is a, c, g, or t
  misc_feature (3479)..(3480): n is a, c, g, or t
  misc_feature (3482)..(3483): n is a, c, g, or t
  misc_feature (3485)..(3485): n is a, c, g, or t
  misc_feature (3487)..(3489): n is a, c, g, or t
  misc_feature (3491)..(3498): n is a, c, g, or t
  misc_feature (3500)..(3504): n is a, c, g, or t
  misc_feature (3506)..(3508): n is a, c, g, or t
  misc_feature (3511)..(3517): n is a, c, g, or t
  misc_feature (3519)..(3519): n is a, c, g, or t
  misc_feature (3523)..(3524): n is a, c, g, or t
  misc_feature (3527)..(3527): n is a, c, g, or t
  misc_feature (3530)..(3530): n is a, c, g, or t
  misc_feature (3532)..(3536): n is a, c, g, or t
  misc_feature (3538)..(3547): n is a, c, g, or t
  misc_feature (3550)..(3552): n is a, c, g, or t
  misc_feature (3554)..(3556): n is a, c, g, or t
  misc_feature (3561)..(3568): n is a, c, g, or t
  misc_feature (3570)..(3572): n is a, c, g, or t
  misc_feature (3574)..(3574): n is a, c, g, or t
  misc_feature (3578)..(3578): n is a, c, g, or t
  misc_feature (3580)..(3584): n is a, c, g, or t
  misc_feature (3586)..(3587): n is a, c, g, or t
  misc_feature (3590)..(3590): n is a, c, g, or t
  misc_feature (3593)..(3593): n is a, c, g, or t
  misc_feature (3598)..(3599): n is a, c, g, or t
  misc_feature (3601)..(3603): n is a, c, g, or t
  misc_feature (3607)..(3607): n is a, c, g, or t
  misc_feature (3609)..(3615): n is a, c, g, or t
  misc_feature (3617)..(3629): n is a, c, g, or t
  misc_feature (3631)..(3631): n is a, c, g, or t
  misc_feature (3633)..(3646): n is a, c, g, or t
  misc_feature (3650)..(3653): n is a, c, g, or t
  misc_feature (3655)..(3655): n is a, c, g, or t
  misc_feature (3657)..(3659): n is a, c, g, or t
  misc_feature (3662)..(3662): n is a, c, g, or t
  misc_feature (3665)..(3665): n is a, c, g, or t
  misc_feature (3667)..(3670): n is a, c, g, or t
  misc_feature (3672)..(3698): n is a, c, g, or t
  misc_feature (3701)..(3702): n is a, c, g, or t
  misc_feature (3704)..(3704): n is a, c, g, or t
  misc_feature (3706)..(3711): n is a, c, g, or t
  misc_feature (3713)..(3723): n is a, c, g, or t
  misc_feature (3725)..(3729): n is a, c, g, or t
  misc_feature (3731)..(3732): n is a, c, g, or t
  misc_feature (3735)..(3739): n is a, c, g, or t
  misc_feature (3741)..(3765): n is a, c, g, or t
  misc_feature (3767)..(3772): n is a, c, g, or t
  misc_feature (3774)..(3774): n is a, c, g, or t
  misc_feature (3776)..(3779): n is a, c, g, or t
  misc_feature (3781)..(3781): n is a, c, g, or t
  misc_feature (3783)..(3786): n is a, c, g, or t
  misc_feature (3788)..(3792): n is a, c, g, or t
  misc_feature (3794)..(3798): n is a, c, g, or t
  misc_feature (3800)..(3800): n is a, c, g, or t
  misc_feature (3802)..(3807): n is a, c, g, or t
  misc_feature (3809)..(3823): n is a, c, g, or t
  misc_feature (3825)..(3827): n is a, c, g, or t
  misc_feature (3829)..(3836): n is a, c, g, or t
  misc_feature (3838)..(3863): n is a, c, g, or t
  misc_feature (3865)..(3877): n is a, c, g, or t
  misc_feature (3879)..(3880): n is a, c, g, or t
  misc_feature (3882)..(3882): n is a, c, g, or t
  misc_feature (3884)..(3889): n is a, c, g, or t
  misc_feature (3891)..(3891): n is a, c, g, or t
  misc_feature (3893)..(3893): n is a, c, g, or t
  misc_feature (3895)..(3898): n is a, c, g, or t
  misc_feature (3900)..(3906): n is a, c, g, or t
  misc_feature (3908)..(3914): n is a, c, g, or t
  misc_feature (3916)..(3917): n is a, c, g, or t
  misc_feature (3919)..(3922): n is a, c, g, or t
  misc_feature (3924)..(3943): n is a, c, g, or t
  misc_feature (3945)..(3955): n is a, c, g, or t
  misc_feature (3957)..(3957): n is a, c, g, or t
  misc_feature (3959)..(3960): n is a, c, g, or t
  misc_feature (3962)..(3962): n is a, c, g, or t
  misc_feature (3964)..(3964): n is a, c, g, or t
  misc_feature (3969)..(3970): n is a, c, g, or t
  misc_feature (3972)..(3975): n is a, c, g, or t
  misc_feature (3980)..(3980): n is a, c, g, or t
  misc_feature (3982)..(4000): n is a, c, g, or t
nnnnnnnnnnnnnnnnnnnnnnnnnnnnnnannnnnnnnnnnnnnnnnnnnnnnnnnnnnnnnnnnnnnnnnnnannannannannannannannannanaannannannannanannnnnnnnnnnnnnnnnnnnnnnnnnannnnnnnnnnnnnnnnannannannanannnnnannnnnnnnannnnnnnnnnnannnnnnnnnnnnnnnnannnnnnnnnnnnnnnnnnnnnnnnnnnnnnnnnnnnnnnnnannannnnnnnnnnnnnnnnnnnnnnnnnnnnnnnnnnnnannnnnnnnnnnnnannnnnnnnnnnnnnnnnnnnnnnnnnnnnnnnnnnnnannnnnntnnnnnnnnnnnnnnnnnnnnnnnnnnnnnnnnannanaannannnnnannnnnnnnaannnnnnnnnnannannnnnnnnnnnnnnnnnnnnnnnnnnnnnnnnnnnnnnnnnnnnnnnnnnncnnnnnnnnnnncnnnnnnnnnnnnnnnnnnnnnnnntntnttnnnnnnntnnnnnnnnnnnnnnnnnnnnnnnnnnnnntnnnnnnnntnnntntntnnnntnnnnntnnnnntnntnnnnnnnnnnnnnnnnnnnnnnnnnnnnnnnnnnnnnnnnnnnnannnnnnnnnnnnnnnnnnnnnnnnnnnnnnnnnnnnnnannnnnnnnnnnnnnnnnnnnnnnnnnnnnnnnnnnnnnnnnnnnnnnnnnnnnnnnnnnnnnnnnnnnnnnnnnnnnnnnnnnnnnnnnnnnnnnnnnnnnnnnnnnnnnnnnnnnnnnnnnnnnnnnnnnnnnnnnnnnnnnnnnnnnnnnnnnnnnnnnnnnnnnnnnnnnnnnnnnnnnnnnnnnnnnnnnnnnnnnnnnnnnnnnnnnnnnnnnnnnnnnnnnnnnnnnnnnnnnnnnnnnnnnnnnnnncnnnnnnnnnnnnnnnnnnannnnnnnnnnnnannnnnnnnnnnnnnnnnnnnnnnnnnnnnnnnnnnnnnnnnnnnnnnnnnnnngnnnnnnnnnnnnnnnnnnnnnnnnnnnnnnnnnnnnnnnnnnnnnnnnnnnnnnnncnnnnnnnnnnnnnnnnnnnnnnnnnnnnnnnnnnntnntnnncntnntcntcntcntcnnnnncnncnnnnnnnnnnnnnncnnnnncnnnnnnnnnnnnnnnnnnnnnnnnnnnnnnnnnnnnnnnnnnnnnnnnnnnnnnnnnnnnnnnnnnnnnnnnnnnnnnnnnnnnnncnnnnnnnnnnnnnnnnnnnnnnnnnnnnnnnnnnnnnnnnnnnnnnnnnnnnnnnnnnnnnnnnnnnnnnnnnannannnnnnnnnnnnnnnnnnnnnnnnnnnnnnntnntnnnntnnnnnnnnnnnnnnnnnnnnnnnnnnnnnnnnnnnnnnnnnnnnnnnnnnnnnnnnnnnnnnnnnnnnnnnnnnnnnnntnnnnnnnnnntnnnnnnnnnnnnnnnnnnnnnnnnnnnnnncnnnnnnnnnnnnnnnnnnnnnnnnnnnnnnnnnnnnnnnnnnnnnnaanannnnnnnnnnnnnnnnnnnnnnnnnnnannnnnnnnnnnnnnnnnnnnnnnnnnnnnnnnnnnnnnnnnnnnnnnnnnnnnnnnnnnnnnnnnannnnnannnnnnnnnnnnnnnnnnnnnnnnnnnnnnnnancannagnnnngannnnnnnnnnnntnnttntntnnnnannnnntntnnnnannntnnnnnnnttnntnnnnnncnnnngngggnnnnnnnntnttcntnnnnannannnntnntnnnnnnantagtantantantactnntnnttctnctncttctnnnnnntcttcttnnnnnngnnnnntntnntcatcntcgtcnnnacgaaaagcggcgacgagtaagaataggacgacgacgagaattattcggtgcgaacaacaaacggtgatgcgggaaattaaagtgtgcacgaagaaagagtgcagacgattngggtcncaaaaaacgctcgagtttctggaagcgcgaggagaaaagtttgatttaaaagtcaccgcggtgaagtgcctctcggaatgtgggatgggaccgaacgtggaacttccgtgcggaacaatcttgaacagagtgaaaggagaggagagctgcttgaaagctttggcgagaacggtgaacgaaggcgaggagtgcggcgcatttatgtgacgtaggaagagggtgtgagttcgcgtttaaatccgttgttgttacttcgctgtgtattgttatatntgtattttattttgcctgtttatattgcctgtctacgcgtcatcaacttcttcttcatcgttatcgttttcatcatcactaatgtccgccgccgccgcccgagctttctaacagccctctctccttcaactcatctttcaaaatcttcgcccctgtgaccataaacagcgtctgccaaatgcctaaaccgactcttggaacgatcccgcgaaacaacccgccgacgccgttctctttgacgatgtccttcatcacgctcaccatgctcccggtttcttgtcccaaactccctctggtttgcgcttctattcgagcgacttcaaacggatggttccaacacgccatcgtcccgccaattaccccgcatataacttcttgtcctttcgtcatcttcacttctttcgaatcgacgtccgggtaccaaaccgccttcgctttctcgcgaacgatttcggtgaaaccttgacgactggcccagttcgtcgcctgtcgaaacgcgatggcggttcctcccgggtaaaaccctttcactccagatctcgcgtacgtttcttttattctctccacgctcgatttcccggacggatcgttcaccgcgccggtgactaaatacgtgcacggacccatgacggaaacttgcgcgatccctccaccggcgccggcgagaaccccggcgacgcctggatccacgtcgtttttcaacaaactctcgtttattccctctttcgcgtacatcaatatcgcgcctttcgtcccactttcgaccattttcgccgacgtgcctctccaaaacgcgtgtattccgcctccggatttgtacacgtttttcaacgcctccacagttccttccgttcggtgtcttcccattcgtgttttccagacttcgaaaggcatgcctaaagacgccgcttcggccatttggatagccggaccgatgatgatatcaatcgcaggcattttatantatttatttgtgtgtgtgctcttctatgatctatctttattaaactactatagtgtgtaagtgttaagtgtgtacgactaatgtggaaagacttgtctgttcgtttgttttcataaaagtatatagaaaattttacattttgctgctaaaaaaaagtaatacaaagagaacctccttncnntcntcnnntnnannnnnnnannnnnnnnnnnnnnnnncnnnnntgnnnnannnnnnnnnnnngttnntnntntnnntnnnnnnnntnnnnnannnatnnnnnnntntatnntanatntnnnnncnnnnnnnnnnttnnnannnaaaannnnnnnncnnncngcgncnnnnnannaanaanaaaanntnnntccncnnnnnnnannnnnnnnnnnnncncnnnnnnnnnnnnnntctnnnntntnnntcnttntnnnntnnnnnnnnnnnnnnnnnnnnnnnnnnnaanncncnnnnnncnnnnnnnnnnncnnnnncnnccnnnnncnnnnnnnnnnnnnnnnnnnnnnnnncnnnnnncncnnnncncnnnntnnnnncnnnnncncnnnnnncnnnnnnnnnnnnnnncnnntnnnnnnnntnnnnnnnnnnnnnnnnnnnnnnnnnncnnnnnnnnnnnnncnncncnnnnnncncncnnnncnnnnnnncnnnnnnncnncnnnncnnnnnnnnnnnnnnnnnnnncnnnnnnnnnnntntnntntntttcnntnnnntctcncnnnnnnnnnnnnnnnnnnn

SEQ ID NO: 983 - DNA, 4000 bp, Escherichia coli
  misc_feature (2)..(4): n is a, c, g, or t
  misc_feature (7)..(7): n is a, c, g, or t
  misc_feature (10)..(10): n is a, c, g, or t
  misc_feature (13)..(13): n is a, c, g, or t
  misc_feature (18)..(20): n is a, c, g, or t
  misc_feature (30)..(30): n is a, c, g, or t
  misc_feature (38)..(39): n is a, c, g, or t
  misc_feature (42)..(42): n is a, c, g, or t
  misc_feature (45)..(50): n is a, c, g, or t
  misc_feature (54)..(64): n is a, c, g, or t
  misc_feature (67)..(67): n is a, c, g, or t
  misc_feature (74)..(74): n is a, c, g, or t
  misc_feature (83)..(84): n is a, c, g, or t
  misc_feature (181)..(181): n is a, c, g, or t
  misc_feature (286)..(286): n is a, c, g, or t
  misc_feature (307)..(307): n is a, c, g, or t
  misc_feature (421)..(421): n is a, c, g, or t
  misc_feature (460)..(460): n is a, c, g, or t
  misc_feature (880)..(880): n is a, c, g, or t
  misc_feature (916)..(916): n is a, c, g, or t
  misc_feature (948)..(948): n is a, c, g, or t
  misc_feature (1141)..(1141): n is a, c, g, or t
  misc_feature (1596)..(1596): n is a, c, g, or t
  misc_feature (1644)..(1644): n is a, c, g, or t
  misc_feature (1971)..(1971): n is a, c, g, or t
  misc_feature (2353)..(2353): n is a, c, g, or t
  misc_feature (2520)..(2520): n is a, c, g, or t
  misc_feature (2992)..(2992): n is a, c, g, or t
annnaanttnttnaaggnnntttaaaattnttttgggnnaanttnnnnnntttnnnnnnnnnnnaanttttaanttttttaannaaaaaattaagaaagaactggaattgtaaactctggaccactattatcttccgaccatgttactgttgcagttttcaatttagtatagaatcttacnccttcaggaccatgcatagaatgatccccaaataatgatctcttccaaccaccaaagctatggtacgcaacaggtacaggaatgggaacatttactcctatcatnccaatttttgcattttcagtnaaatgttttgctatcataccactttttgtaaatacagcagctccatttcctaattcatgatcattgactaattttaaagcttcttcataagtatctgttgtcatcatgctgagnactggaccaaaaatttcttctttataaattttcatatcnggttttacatcttcaaaaatggtaggacctacaaaatatccattctcatacccttgtagtttcatatttcttccatctgcaagaagcttagctccttctttttcacccgtatctatgtatcccaaaactttttcatagtgagctttgttattaagtgggccaaaatcacttttttcgtctgtgtatggtccaacatttagttttagtgtttcttctaataatttagtttttaaattttcagcagtcttttttcctacacaaacagcaacagaaatagccatacatctctcaccagcagacccaaaagcagagcctataatagcgtctgttgttttattaacatctgcgtcaggcatcacaaccatatggtttttagctccaccaagagcttgaactcttttattgttttttgttcctgtntgataaacatattccgcaattggagtcgaacctacnaaactaatcgcttgaacatctttactctctantagagtatcaacagattctttatcaccatttacaacatttaaaacacccggtggcataccagcttcaatagctaattctccaagtctaattggacaactcggatctttttctgatggtttaagtacaaaagtatttccacatgcaatagcaactgggtacatccacataggtaccattgctggaaaattaaanggagtaattccagcacaaacacccaagggctgtctcattgaataagagtcaacattagttcccacacttgcagagtgatctccttttaaagaatcggtgataccagttgcatactcaacaacttcaattcctctttgaatagaaccttttgcatctggaatagtttttccatgttgttcggaaaccattacagccatatcttccatattttttattaataaatctttatattttgctaaaattcttgctctgtttataggtgtggttttagaccattttaaaaaagctttcttagagctctctatagccatttcaacagtagctttacttgctaattcaacttctgctatttgttctccaatagcggggttaaaaattggaccggttctagaatcttttacagtaaaaacttttccatcaatgaaatgactaacttttttcatacttctcctttnatatataatttaaagttatactagctcaattttctttgcaatatattnttccttaaatgagaaaaatattatcaattaaaagctttcagttgttgactcctaaaattacttaagtttagattaagcattaacaaattagatgaaaagagagaggaccgtttgattaaaagagaaaatgttcgtatttgtgttcctagatacttgcaaattggcaagggtagcttgaatgaactccctgatataataaaaattttaggatctataaaatcattactaattgtaactgataaacaaatggtatcatttggttatgtaaaaaaactacaagatgttttaactaaagcaggattaaattctgatgtttttgatgacacngttcctgatccaacagactcagtagttttaaatggaattaaatttttagaaaaatgtaaaaatgatgccgtaattggttttggtggaggaagtccaatagatactgcaaaagcaatagccgcaatggctaaatttagtaaaaatattcaagattataagccaccatcaatgtttgataaaaagggtcttccaataattgcaatccctactacagctggtacaggctcggaagtaacacatcacgcagtagttatagactcaaataataatgaaaaaatttcttgtagaggagaaggatttgtccctatagttgcaattgttgattatgatttaactttatcgaaacccagaagattaactattgatagcgcaattgacactntaactcatggaatagaagcatacgtaagcaaaaaagccacactcttttctgatcgaatggctttagacacaataagacttgttacccaaaatatttatgcagttgataaaaatccaaaagatttaaaagcaagagaaggcttaatgttagctgctacattaggaggnttagcattttccaatgcttcaatatgtttggtgcatggaatgagtaggccgctaggtagtaatttcaaagttcctcatggacttagtaatgcaatgttactaccaactataactaaattttcgatagatcatgcaaaaagtagatatgcagattgtagtcgtgctggagattttgcactacctggtgacaatgatgatgtggcctgtgataaattgattaaaggtctgtacaaaattaataatgattttgaagttccatcaatgcaaaattttggaattaatcaaaaaaattttgaggaagagttaaaaaatatggcaactgatgcagaaaattcaggggcgccaaacctcaatccgagagtgccttctgtaaatgagatggtagatctttacagacaagcatggagagcattttaaaatgagttggaaatgcacttcttttagacgaacaactcgaaacaaaagagagggnaaaaatatgatagataaatcaaaatcactaatgaaatcgttcgttagtattttggctgtatttgctttaatgataactttttcatttcagcaggtaaatgcagctgaaaaaatcagatggaaagtacaatctactttcaatactggttggccagcgctgggtgacccagttgctcgtttagcagacactttagataaagctacagatggaagaataaaattaaaggtttatgagcctggaaaaattcttcctccattagagatctcaccatcaattagtaaaggtgatttgcctgcagcttataactatatggcttatgaccaaggtagaattccagcggccgttttatttgcggcagtaccgttcggaatggaaccatgggagtatgctgcatggtggtttgaaggagaaggttcaaagttagcaaatgaaatttacaacaagcaaaatattaaagttttgttatgtagtacaattggacctgaaactgctggttggtatagaaatccaatcacaagtttagatgatcttaaaggtttaaaaattcgtttctcaggattaggaggaatggttttaaatgaaataggagcatctgcaactttaatggccggtggtgaaatttttgctgctttagaaaaaggaactctagatgcaacagaatattcgatgccagcaattgatgaagttcttggttttcacaaaattactaagttcaacttgtttccaggttggcaccaagtatcaacatctactcacttcatggtcaacttagacttatggaaaaaaatgggtgcagctgaccaagctttattcgaaatggcttgtacagcagcagctatgagagcaattacaactggtgaatttttacaaggaaaacaaattgcaagtttcccttctaaaggtgtaacagctgctagattgcctgatagtgtattgagagaacttcaaaaagttagtgcaaaagttatggcagaacagtctgctaaagatgctgactttaaaaaagtt

SEQ ID NO: 984 - DNA, 4000 bp, Escherichia coli
  misc_feature (241)..(241): n is a, c, g, or t
  misc_feature (311)..(311): n is a, c, g, or t
  misc_feature (904)..(904): n is a, c, g, or t
  misc_feature (948)..(948): n is a, c, g, or t
  misc_feature (1290)..(1290): n is a, c, g, or t
  misc_feature (1299)..(1299): n is a, c, g, or t
  misc_feature (1386)..(1386): n is a, c, g, or t
  misc_feature (1422)..(1422): n is a, c, g, or t
  misc_feature (1449)..(1449): n is a, c, g, or t
  misc_feature (1479)..(1479): n is a, c, g, or t
attcttagacgacatgcatcgtccagcgcttccatacaaaatgaaatttaaagtttcaggttgtgcgaacgattgtatgaattcagttcaacgtgctgactttgccgtgattggtacttggagagacgacattaaaatcaaccaagatttatggaagaaaatggttgccgataaaggtactcaatacgtggttgataacatcacttctcgttgtcctacttcagcgatgactttaaatgangacagttctttaaccatcgataataagaactgtgtgaaatgtatgcattgtttaaatgcaacttcacctntgactcataactacattgctaaaggtgatatagagcctatcttagcaacgggtgacgacaaaggcgttagcattatcatgggtggtaagcgtacactgaaaattggtgacttatttggcacagtggttgttccatttatgaaactagagactgaagacgattacgaagaaatcgaagaattagccggtgaagtgattgacttttttgctgaaaacgcactagagcatgaaagaacaggtgaaatgatcgagcgtattggcattgtaaacttccttgatggcattggtcttaaggttgatcctaacatggttaactcgactcgtactatctcttatgttcgtatggaccaatgggatgaagaagctgttaagtggtttgaaaacaaagccgaagcaagcgcgtaatttaattttaaagaacaatacacggagaaaatattatggctgaagcaccaagaatgccaatcgaatcaggttgccctgatcctattcaatacatgcacccaaccatgcgtcgtaactacggccaatgggcttatcacgatcgtccacgtccaggtgtattgcaccacacttcaaagaacagtgaagaantttggacagttcgttgtggtactgcacgtcaaatggatgttcanacgattaaaaaattagctgatattgctgatgagtttgccgatggctacgttcgttttaccatgcgctcaaacgttgagtacatggtggctgatgaagctaaagttgaaccactgattaaaacattaacagacgctggtttcccagtgggtggtactggtccatcagtgactatgatttcacacactcaaggctggttacactgtgatattccaggtactgatgcatcaggcgtggttaaatcattaatggacgatttacacgaagagtacattaaagaagaaatgccaaaccgtgtacacatgactacctcttgttgtcaaattaactgtggtggtcaaggngatatcgcncttaacattcaacacactaagccacctaagattaatcatgatttagtggctaacgtttgtgagcgtccaacggttgttgcacgttgnccagtagcggcgattcgtcctgcgatggtaaacggnaaacctactttggaagttgatgagaanaaatgtatctgttgtggtgcatgtttcccnccgtgtcctccaatgcaaattaacgatcctgagcattctaagattgcagtatggattggtggcaagaactctaacgcaagaagcaagccttctttccacaagttagtagcgtctaaccttcctaataacccaccaagatggccggaagttggtgccgttgttaagaaaattttaggtgtttataaagaagatgctcgtgattgggaaagaatgggtgagtgggttgaccgtattggttggccagcgttctttgaaaagaccggtttgccgtttactaaattccacatctctgattggaaaggtacacgtcaccagttgaattcttctgcacacattcgtttctaggcaattaataagatatgaaaatttctattcaaattaacgaaggcccgtatcagcaccaagcgtctgatacggcgtatcaatttgccaaagcggcgattgacaaagggcacgagattttccgtgtatttttctatcatgacggcgtaaataatgcatcacgctttaccttgccaccgcaagatgatcgtaacgttgtaaaccaatgggccgaattaggcattaagaatgccgatggcgagcctgagcttgtggtttgtattgcagcagcgcttcgtcgcggcatgcttgacgagtctgaagccagtaagaatggcattgatggtaataatattcatcctgcgttccgtatttctggcttgggtcagttgattgaggccggtattcaatcggatcgtttagtggtatttggagattaagatggcaataaagaaatttatgtatttaaatcgtaaggcttcttacggcactgtgtacgccattgaatctttagaagtggtgttaatcgctgcagcgtttgagcaagatgtatctttagcttttgttgacgatggtgtttatcaaatcgtagaaggtcaaaatacggatggtattggcatgaaaaatttttctaaaacctatcatgcattaggtgattacgacattaacaaactttatgtatccgctgaatctctagaagaaagaggcttgactgaagcagatcttatgcctttggtgtatgaagatgaagacgatgattgggcagaaaaaccttcgattaaggttgtgtctaatgctgatcttacaaaaatcatgtctgagcaagacgtttgtttaagtttttaaaggatatttaatatgctacacacagtaaataaatcatctttcgagcgtaattcattacagtcttgtcttaatattattgatgacactagtgtcatcttattgattgaagacggtgtaatttccgctgcgaataatgctaactcatccatgctagctgaacttgccacacaaggtagagtttatgcattgcaaggcgatgtggaagcaagaggaatttcatcaaaagttgcagataatatcaaattagttgattatgcaggttttgttgatttagttgttgaacacggaactgcggtttcttgggtttaacgtaatttatatataggagtaaaactatggctgatattttaggcgcagaagtagacgaagaaggttttttagtaaaccttagtgattggacaaaagaaattgccgatagtatggcaaaagacgatgacattgaattgtctgaagagcattgggatgttattaatttcttacgtgattattttgaagagtatcaaattgcaccagcagtacgtgtactaacgaaagcaattggtaaaaaattcggtaaagaaaaaggtaactctaagtacttgtattctttattcccttatggtcctggtaagcaaggttgtcgtttcgccggtcttccaaagccaacgggctgtatctaaacgatacaaagcactgaaaacacctgccttggtaggtgtttttatcttatttaacacattgagtttgagagcaatatgtctgcaataagcattttttttacggctttattttacatttcattatttgtattccttattggaatggcaagaaaaatctatcagtattggattacgccagctcctttaaagatccctactgcaccaaccccattaacacaaacaggtgtggttatgcgcatggctcgcgaagtagtcttgttcgaaagtttatttaaatccaacaaatggacttggctgttcggttggttgtttcacattggtttattgttagtactagttcgtcatgtccgatatttttggccgggtgatttacctgagatttttttattaattcaaccgtttaaatacgcagcctttgcgatggtgattggcttgacaggacttatgggtcgccgtatttttgttgaacgtattcgttacatttcagcaccatcggattatttaatgctaattttattgctgattattggcgtgagtggcgtggtaatgacctttaccagtaatcatactgatgtgatgatggtgaaagagtttgcttcgggattgatcgctttcccatggattggttggtcaaacttaccaacagaagtgcactttttaactcatattttcttagtatttgtgctgatggcaat

SEQ ID NO: 985 - DNA, 4000 bp, Escherichia coli
  misc_feature (160)..(160): n is a, c, g, or t
  misc_feature (313)..(313): n is a, c, g, or t
  misc_feature (377)..(377): n is a, c, g, or t
  misc_feature (400)..(400): n is a, c, g, or t
  misc_feature (403)..(403): n is a, c, g, or t
  misc_feature (796)..(796): n is a, c, g, or t
  misc_feature (982)..(982): n is a, c, g, or t
  misc_feature (1223)..(1223): n is a, c, g, or t
  misc_feature (1337)..(1337): n is a, c, g, or t
  misc_feature (1985)..(1985): n is a, c, g, or t
  misc_feature (1991)..(1991): n is a, c, g, or t
  misc_feature (2041)..(2041): n is a, c, g, or t
  misc_feature (2141)..(2141): n is a, c, g, or t
  misc_feature (2198)..(2198): n is a, c, g, or t
  misc_feature (2200)..(2200): n is a, c, g, or t
  misc_feature (2294)..(2294): n is a, c, g, or t
  misc_feature (2306)..(2306): n is a, c, g, or t
  misc_feature (2315)..(2315): n is a, c, g, or t
  misc_feature (2687)..(2687): n is a, c, g, or t
  misc_feature (2722)..(2722): n is a, c, g, or t
  misc_feature (2726)..(2727): n is a, c, g, or t
  misc_feature (2729)..(2732): n is a, c, g, or t
  misc_feature (2734)..(2735): n is a, c, g, or t
  misc_feature (2737)..(2737): n is a, c, g, or t
  misc_feature (2740)..(2741): n is a, c, g, or t
  misc_feature (2743)..(2743): n is a, c, g, or t
  misc_feature (2745)..(2746): n is a, c, g, or t
  misc_feature (2748)..(2749): n is a, c, g, or t
  misc_feature (2751)..(2752): n is a, c, g, or t
  misc_feature (2756)..(2761): n is a, c, g, or t
  misc_feature (2764)..(2768): n is a, c, g, or t
  misc_feature (2770)..(2771): n is a, c, g, or t
  misc_feature (2773)..(2776): n is a, c, g, or t
  misc_feature (2779)..(2781): n is a, c, g, or t
  misc_feature (2783)..(2785): n is a, c, g, or t
  misc_feature (2787)..(2789): n is a, c, g, or t
  misc_feature (2791)..(2794): n is a, c, g, or t
  misc_feature (2796)..(2797): n is a, c, g, or t
  misc_feature (2799)..(2803): n is a, c, g, or t
  misc_feature (2805)..(2810): n is a, c, g, or t
  misc_feature (2812)..(2812): n is a, c, g, or t
  misc_feature (2814)..(2814): n is a, c, g, or t
  misc_feature (2817)..(2821): n is a, c, g, or t
  misc_feature (2823)..(2823): n is a, c, g, or t
  misc_feature (2826)..(2827): n is a, c, g, or t
  misc_feature (2829)..(2832): n is a, c, g, or t
  misc_feature (2834)..(2840): n is a, c, g, or t
  misc_feature (2845)..(2845): n is a, c, g, or t
  misc_feature (2847)..(2851): n is a, c, g, or t
  misc_feature (2853)..(2863): n is a, c, g, or t
  misc_feature (2867)..(2872): n is a, c, g, or t
  misc_feature (2875)..(2876): n is a, c, g, or t
  misc_feature (2881)..(2881): n is a, c, g, or t
  misc_feature (2883)..(2884): n is a, c, g, or t
  misc_feature (2886)..(2890): n is a, c, g, or t
  misc_feature (2892)..(2894): n is a, c, g, or t
  misc_feature (2896)..(2896): n is a, c, g, or t
  misc_feature (2898)..(2898): n is a, c, g, or t
  misc_feature (2900)..(2902): n is a, c, g, or t
  misc_feature (2904)..(2906): n is a, c, g, or t
  misc_feature (2909)..(2910): n is a, c, g, or t
  misc_feature (2912)..(2917): n is a, c, g, or t
  misc_feature (2919)..(2919): n is a, c, g, or t
  misc_feature (2921)..(2923): n is a, c, g, or t
  misc_feature (2925)..(2931): n is a, c, g, or t
  misc_feature (2933)..(2935): n is a, c, g, or t
  misc_feature (2937)..(2938): n is a, c, g, or t
  misc_feature (2940)..(2940): n is a, c, g, or t
  misc_feature (2943)..(2945): n is a, c, g, or t
  misc_feature (2947)..(2949): n is a, c, g, or t
  misc_feature (2952)..(2958): n is a, c, g, or t
  misc_feature (2960)..(2969): n is a, c, g, or t
  misc_feature (2972)..(2977): n is a, c, g, or t
  misc_feature (2979)..(2981): n is a, c, g, or t
  misc_feature (2983)..(2986): n is a, c, g, or t
  misc_feature (2988)..(2990): n is a, c, g, or t
  misc_feature (2992)..(2994): n is a, c, g, or t
  misc_feature (2996)..(2998): n is a, c, g, or t
  misc_feature (3000)..(3001): n is a, c, g, or t
  misc_feature (3005)..(3006): n is a, c, g, or t
  misc_feature (3008)..(3010): n is a, c, g, or t
  misc_feature (3012)..(3013): n is a, c, g, or t
  misc_feature (3016)..(3017): n is a, c, g, or t
  misc_feature (3019)..(3020): n is a, c, g, or t
  misc_feature (3023)..(3024): n is a, c, g, or t
  misc_feature (3028)..(3028): n is a, c, g, or t
  misc_feature (3031)..(3038): n is a, c, g, or t
  misc_feature (3040)..(3040): n is a, c, g, or t
  misc_feature (3042)..(3043): n is a, c, g, or t
  misc_feature (3046)..(3047): n is a, c, g, or t
  misc_feature (3053)..(3057): n is a, c, g, or t
  misc_feature (3061)..(3062): n is a, c, g, or t
  misc_feature (3065)..(3067): n is a, c, g, or t
  misc_feature (3070)..(3073): n is a, c, g, or t
  misc_feature (3075)..(3076): n is a, c, g, or t
  misc_feature (3079)..(3082): n is a, c, g, or t
  misc_feature (3084)..(3085): n is a, c, g, or t
  misc_feature (3087)..(3088): n is a, c, g, or t
  misc_feature (3090)..(3090): n is a, c, g, or t
  misc_feature (3092)..(3092): n is a, c, g, or t
  misc_feature (3094)..(3101): n is a, c, g, or t
  misc_feature (3103)..(3103): n is a, c, g, or t
  misc_feature (3106)..(3113): n is a, c, g, or t
  misc_feature (3115)..(3119): n is a, c, g, or t
  misc_feature (3121)..(3121): n is a, c, g, or t
  misc_feature (3123)..(3126): n is a, c, g, or t
  misc_feature (3128)..(3130): n is a, c, g, or t
  misc_feature (3132)..(3135): n is a, c, g, or t
  misc_feature (3137)..(3139): n is a, c, g, or t
  misc_feature (3141)..(3141): n is a, c, g, or t
  misc_feature (3143)..(3143): n is a, c, g, or t
  misc_feature (3145)..(3146): n is a, c, g, or t
  misc_feature (3148)..(3148): n is a, c, g, or t
  misc_feature (3150)..(3150): n is a, c, g, or t
  misc_feature (3152)..(3152): n is a, c, g, or t
  misc_feature (3154)..(3155): n is a, c, g, or t
  misc_feature (3157)..(3158): n is a, c, g, or t
  misc_feature (3160)..(3161): n is a, c, g, or t
  misc_feature (3163)..(3168): n is a, c, g, or t
  misc_feature (3170)..(3170): n is a, c, g, or t
  misc_feature (3172)..(3172): n is a, c, g, or t
  misc_feature (3175)..(3176): n is a, c, g, or t
  misc_feature (3178)..(3183): n is a, c, g, or t
  misc_feature (3186)..(3186): n is a, c, g, or t
  misc_feature (3188)..(3190): n is a, c, g, or t
  misc_feature (3192)..(3194): n is a, c, g, or t
  misc_feature (3196)..(3196): n is a, c, g, or t
  misc_feature (3201)..(3201): n is a, c, g, or t
  misc_feature (3203)..(3208): n is a, c, g, or t
  misc_feature (3210)..(3213): n is a, c, g, or t
  misc_feature (3215)..(3217): n is a, c, g, or t
  misc_feature (3219)..(3223): n is a, c, g, or t
  misc_feature (3225)..(3234): n is a, c, g, or t
  misc_feature (3236)..(3236): n is a, c, g, or t
  misc_feature (3238)..(3238): n is a, c, g, or t
  misc_feature (3241)..(3241): n is a, c, g, or t
  misc_feature (3245)..(3246): n is a, c, g, or t
  misc_feature (3248)..(3248): n is a, c, g, or t
  misc_feature (3253)..(3254): n is a, c, g, or t
  misc_feature (3259)..(3261): n is a, c, g, or t
  misc_feature (3263)..(3265): n is a, c, g, or t
  misc_feature (3268)..(3273): n is a, c, g, or t
  misc_feature (3275)..(3278): n is a, c, g, or t
  misc_feature (3280)..(3281): n is a, c, g, or t
  misc_feature (3283)..(3287): n is a, c, g, or t
  misc_feature (3290)..(3293): n is a, c, g, or t
  misc_feature (3296)..(3297): n is a, c, g, or t
  misc_feature (3300)..(3304): n is a, c, g, or t
  misc_feature (3308)..(3313): n is a, c, g, or t
  misc_feature (3317)..(3317): n is a, c, g, or t
  misc_feature (3319)..(3319): n is a, c, g, or t
  misc_feature (3321)..(3324): n is a, c, g, or t
  misc_feature (3327)..(3332): n is a, c, g, or t
  misc_feature (3334)..(3338): n is a, c, g, or t
  misc_feature (3340)..(3344): n is a, c, g, or t
  misc_feature (3346)..(3346): n is a, c, g, or t
  misc_feature (3348)..(3348): n is a, c, g, or t
  misc_feature (3350)..(3357): n is a, c, g, or t
  misc_feature (3364)..(3365): n is a, c, g, or t
  misc_feature (3367)..(3367): n is a, c, g, or t
  misc_feature (3369)..(3374): n is a, c, g, or t
  misc_feature (3377)..(3377): n is a, c, g, or t
  misc_feature (3379)..(3380): n is a, c, g, or t
  misc_feature (3383)..(3386): n is a, c, g, or t
  misc_feature (3388)..(3389): n is a, c, g, or t
  misc_feature (3391)..(3391): n is a, c, g, or t
  misc_feature (3393)..(3393): n is a, c, g, or t
  misc_feature (3397)..(3404): n is a, c, g, or t
  misc_feature (3406)..(3410): n is a, c, g, or t
  misc_feature (3412)..(3412): n is a, c, g, or t
  misc_feature (3414)..(3418): n is a, c, g, or t
  misc_feature (3421)..(3421): n is a, c, g, or t
  misc_feature (3423)..(3423): n is a, c, g, or t
  misc_feature (3425)..(3432): n is a, c, g, or t
  misc_feature (3434)..(3435): n is a, c, g, or t
  misc_feature (3437)..(3437): n is a, c, g, or t
  misc_feature (3439)..(3440): n is a, c, g, or t
  misc_feature (3442)..(3442): n is a, c, g, or t
  misc_feature (3444)..(3444): n is a, c, g, or t
  misc_feature (3446)..(3449): n is a, c, g, or t
  misc_feature (3451)..(3453): n is a, c, g, or t
  misc_feature (3456)..(3458): n is a, c, g, or t
  misc_feature (3460)..(3469): n is a, c, g, or t
  misc_feature (3471)..(3474): n is a, c, g, or t
  misc_feature (3477)..(3482): n is a, c, g, or t
  misc_feature (3484)..(3484): n is a, c, g, or t
  misc_feature (3490)..(3493): n is a, c, g, or t
  misc_feature (3495)..(3495): n is a, c, g, or t
  misc_feature (3497)..(3497): n is a, c, g, or t
  misc_feature (3499)..(3499): n is a, c, g, or t
  misc_feature (3501)..(3502): n is a, c, g, or t
  misc_feature (3504)..(3507): n is a, c, g, or t
  misc_feature (3509)..(3510): n is a, c, g, or t
  misc_feature (3512)..(3527): n is a, c, g, or t
  misc_feature (3529)..(3530): n is a, c, g, or t
  misc_feature (3532)..(3532): n is a, c, g, or t
  misc_feature (3535)..(3536): n is a, c, g, or t
  misc_feature (3538)..(3540): n is a, c, g, or t
  misc_feature (3543)..(3548): n is a, c, g, or t
  misc_feature (3551)..(3554): n is a, c, g, or t
  misc_feature (3556)..(3557): n is a, c, g, or t
  misc_feature (3560)..(3567): n is a, c, g, or t
  misc_feature (3569)..(3569): n is a, c, g, or t
  misc_feature (3571)..(3579): n is a, c, g, or t
  misc_feature (3583)..(3591): n is a, c, g, or t
  misc_feature (3596)..(3606): n is a, c, g, or t
  misc_feature (3608)..(3611): n is a, c, g, or t
  misc_feature (3615)..(3622): n is a, c, g, or t
  misc_feature (3628)..(3631): n is a, c, g, or t
  misc_feature (3634)..(3638): n is a, c, g, or t
  misc_feature (3640)..(3643): n is a, c, g, or t
  misc_feature (3645)..(3648): n is a, c, g, or t
  misc_feature (3652)..(3657): n is a, c, g, or t
  misc_feature (3660)..(3662): n is a, c, g, or t
  misc_feature (3664)..(3667): n is a, c, g, or t
  misc_feature (3670)..(3670): n is a, c, g, or t
  misc_feature (3674)..(3676): n is a, c, g, or t
  misc_feature (3678)..(3678): n is a, c, g, or t
  misc_feature (3680)..(3683): n is a, c, g, or t
  misc_feature (3685)..(3686): n is a, c, g, or t
  misc_feature (3688)..(3688): n is a, c, g, or t
  misc_feature (3691)..(3691): n is a, c, g, or t
  misc_feature (3693)..(3693): n is a, c, g, or t
  misc_feature (3695)..(3696): n is a, c, g, or t
  misc_feature (3698)..(3698): n is a, c, g, or t
  misc_feature (3702)..(3703): n is a, c, g, or t
  misc_feature (3705)..(3706): n is a, c, g, or t
  misc_feature (3709)..(3710): n is a, c, g, or t
  misc_feature (3714)..(3716): n is a, c, g, or t
  misc_feature (3718)..(3721): n is a, c, g, or t
  misc_feature (3728)..(3728): n is a, c, g, or t
  misc_feature (3730)..(3730): n is a, c, g, or t
  misc_feature (3733)..(3734): n is a, c, g, or t
  misc_feature (3736)..(3739): n is a, c, g, or t
  misc_feature (3741)..(3741): n is a, c, g, or t
  misc_feature (3744)..(3744): n is a, c, g, or t
  misc_feature (3746)..(3749): n is a, c, g, or t
  misc_feature (3751)..(3751): n is a, c, g, or t
  misc_feature (3753)..(3753): n is a, c, g, or t
  misc_feature (3755)..(3756): n is a, c, g, or t
  misc_feature (3760)..(3762): n is a, c, g, or t
  misc_feature (3765)..(3766): n is a, c, g, or t
  misc_feature (3768)..(3771): n is a, c, g, or t
  misc_feature (3774)..(3776): n is a, c, g, or t
  misc_feature (3780)..(3781): n is a, c, g, or t
  misc_feature (3783)..(3783): n is a, c, g, or t
  misc_feature (3786)..(3787): n is a, c, g, or t
  misc_feature (3789)..(3791): n is a, c, g, or t
  misc_feature (3793)..(3794): n is a, c, g, or t
  misc_feature (3796)..(3800): n is a, c, g, or t
  misc_feature (3803)..(3806): n is a, c, g, or t
  misc_feature (3808)..(3811): n is a, c, g, or t
  misc_feature (3813)..(3814): n is a, c, g, or t
  misc_feature (3816)..(3817): n is a, c, g, or t
  misc_feature (3820)..(3821): n is a, c, g, or t
  misc_feature (3823)..(3828): n is a, c, g, or t
  misc_feature (3834)..(3836): n is a, c, g, or t
  misc_feature (3840)..(3841): n is a, c, g, or t
  misc_feature (3843)..(3850): n is a, c, g, or t
  misc_feature (3852)..(3853): n is a, c, g, or t
  misc_feature (3855)..(3855): n is a, c, g, or t
  misc_feature (3857)..(3857): n is a, c, g, or t
  misc_feature (3859)..(3862): n is a, c, g, or t
  misc_feature (3865)..(3865): n is a, c, g, or t
  misc_feature (3867)..(3867): n is a, c, g, or t
  misc_feature (3870)..(3870): n is a, c, g, or t
  misc_feature (3873)..(3875): n is a, c, g, or t
  misc_feature (3877)..(3879): n is a, c, g, or t
  misc_feature (3882)..(3883): n is a, c, g, or t
  misc_feature (3887)..(3889): n is a, c, g, or t
  misc_feature (3891)..(3891): n is a, c, g, or t
  misc_feature (3893)..(3893): n is a, c, g, or t
  misc_feature (3895)..(3896): n is a, c, g, or t
  misc_feature (3898)..(3898): n is a, c, g, or t
  misc_feature (3901)..(3901): n is a, c, g, or t
  misc_feature (3903)..(3909): n is a, c, g, or t
  misc_feature (3911)..(3913): n is a, c, g, or t
  misc_feature (3915)..(3918): n is a, c, g, or t
  misc_feature (3920)..(3920): n is a, c, g, or t
  misc_feature (3922)..(3923): n is a, c, g, or t
  misc_feature (3925)..(3927): n is a, c, g, or t
  misc_feature (3929)..(3931): n is a, c, g, or t
  misc_feature (3934)..(3936): n is a, c, g, or t
  misc_feature (3938)..(3944): n is a, c, g, or t
  misc_feature (3947)..(3950): n is a, c, g, or t
  misc_feature (3952)..(3952): n is a, c, g, or t
  misc_feature (3955)..(3958): n is a, c, g, or t
  misc_feature (3961)..(3962): n is a, c, g, or t
  misc_feature (3964)..(3964): n is a, c, g, or t
  misc_feature (3966)..(3968): n is a, c, g, or t
  misc_feature (3970)..(3977): n is a, c, g, or t
  misc_feature (3979)..(3981): n is a, c, g, or t
  misc_feature (3983)..(3991): n is a, c, g, or t
  misc_feature (3993)..(3997): n is a, c, g, or t
  misc_feature (3999)..(4000): n is a, c, g, or t
aaatggtctcattaaaaaatatcttgtaaagctttctaatcagattttagttcaagaaaatgattttattaaagctggtatgccaatgtcagatggatctattactccaaacgatatattaaacatcaaagggccttcagctgttcaacaatacttagtnaatgaagttcaagaagtttaccgattacaaggtgtaaagataaatgataaacacttcgaagttgttgtaagacaaatgatgagaaaagtaagaatccaagattctggagatactatatttttagaagaccaattagctcacaaatcagatttnattcaagaaaatgattctatatttggtatgaaagtaattgaagattctggtgaatctgaaaacntaaaagcaggtcaaataatatcngcncgagaattaagggatgaaaattcaatccttaaaagagaagacaaaaagttagttgttgctagagatgcaagtccagcgactgctactccaattcttcaaggaattacaagagcttcattacaaaccaaatcatttatttctgctgcctctttccaagagactactaaagttttaaatgagtcggctgttaatggtagaattgataatttagaaggcttaaaagaaaatgttatcgttggtcatagaattcctgcaggaaccggattacgtaaatatgaagatattttagttggttctaaagaggaaattgaagaacttaataaggttaaagaagaagaagaattaaatattaattaattataatttttcatgagtaacaacgatagtaaaccnaagtctaatataaacattgaaattgatgaaaaaatagctgaaggaacatattcaaatctagctattattaatcattccgtttcagagtttgttttagactttatatgtattatgcctggtacccctaaaaataaggttaaatcaagaattattatcacccctcagcatgctaaacgtttagtaaangctttgaatgataatgttgttagatttgaaaagaaacacggagaaattaaagaaaatcaacagccaccaaatgtccagcttaattttggacaaacaggtgaagcgtaagttttaaaactctgatgaattgtgaaattgtatagttgggtatttttcaatagtcatatttaatgaaaatacagagtcagctaagaacactagattaccgttcttatctttagctaaatatctctgttttatncttttaaactccataaactcatctccttttttgtttttacactcaatccagcatgctttaaatacatttaggttttcatagctacatttagctccatattcgtgttctagcctntactgaataacttcgtactgtagagctccaacagtgccaatgacttttctaccgtttagatctagtgtaaatagttgtgcaacaccctcatccatcaattggttaatcccttttgatagttgtttacttttcattggatcagcattgtttatatacctaaaatgttcaggtgaaaaacttggtattccttcgtaaactaaattttcacctgaagttaatgtgtctcctattttaaaatttcctgtatcatgaagtcctactatatctccggggtaagaaatgtcaacaatttctttcttatctgcaaaaaatgcatttggactagagaattttaatttttttgacaatctcacatgtaagtatggagtattccttttaaattctccagaaacaatctttataaatgctaatcgatctctatgttttggatccatattagcatgaattttaaatacaaaacctgtaaatttatcttcatcaggttttacaattctaactgaactttcctttggctgcggagtaggagctatatcaataaaacagcgtaataaatcctctaccccgaaattatttaatgctgaaccaaaaaatactggttgaatcttgctcattaaatattcatttttatcaaattttggatataccatntcaagnaattctacattttctataaattgattatttaaatctgaacttatattatnttttacttggtctttttctatgaactttatttcatttcctttgagtagagaaaccgtattttcaaaaatgttatatatcccagaaaaatcatatcccatnccgataggaaaacttaaaggacacacttttaattttaattttaattcaatttcgtcnanaagatcaaaagcatcttttccttctctatctaatttattaataaacactataataggaatttgtctcattttacaaacctcaacaagtttttcngtttgttcctcnactcctttngcaacatcaataactacgattacactatcaacagcagttagtgttctgtatgtatcttcagcaaaatctttatgacctggtgtatctaaaatatttatttttattcctttatattcaaatgctaaaacagaggttgcaacagaaattcctctctgtctttctatttccataaaatcacttgtagcccctttttttattttattactttttacagctccagcttcttgaatagcaccaccatataataataatttttcagtaagagttgttttaccagcatctggatgagaaattatcccaaaagttcttcttcttttaatttcttcattaaaattcattgagatattttttgctaatataagctttatgctntgatcattttatcaaaaaaaaagcttttttatttntttnnannnntnntnaannantnntnntnntttnnnnnnttnnnnntnnannnnaannnannntnnntnnnnannannnnnannnnnntngnttnnnnncnaanntnnnngnnnnnnnaaaangnnnnntnnnnnnnnnnntttnnnnnnttnnttttnannannnnngnnnantnannntnnnaannannnnnntnannnannnnnnntnnncnngnttnnngnnnaannnnnnntnnnnnnnnnnaannnnnngnnnannnnannntnnntnnngnnaaannannntnnaannannaanngggnttnnnnnnnnantnnttnnaaaaannnnntttnnttnnnaannnnannttnnnnanngnntnantnnnnnnnnanttnnnnnnnntnnnnntngnnnntnnnannnntnnncnantnntnantncnntnnanntnnnnnntngnaanngnnnnnnttngnnnannntnaaaangnnnnnnannnncnnncnnnnnannnnnnnnnntngnttnaaannanttttnnaaaannntnnnaannnnnnannnnannannnnnaannnnaannttnnnnnaaannnnnntttnantnnnnccnnnnnntnnnnnannnnnantngnnnnnnnnaaaaaannangnnnnnnttngnnaannnnannancnaaannnnnnnngnnnnnantnnnnnttnantnnnnnnnntnncngnntnantnnnncnnnaannngnnnnnnnnnngnnnnttnnnnnntnaaaaannnnantnangnncnnnntnnannnnnnnnnnnnnnnnannanttnnannntgnnnnnnccnnnntnnaannnnnnnntncnnnnnnnnnaaannnnnnnnnttttnnnnnnnnnnntnnnnaaannnnnnnnaaaaannnnttnnnnntnnnngnnnntttnnnnnnaannncnnnnaantttnnnancnnnnanngnaantnanngnaaannannttnnaaannntnnnnaaaaaantnaannannnngnttncnnnntnantnnaaannnttnnannnnccnnngggnngnttnntnnntnntnnnnnaannnnannnnannannttnntnnnnnntttttnnnaaanntnnnnnnnnanntnantnnnnaangnttnaannntnnnccnnaaannntnantnntnaancnnnnnnnannntnnnntngnnannncnnnttnnnannnnnnnaannnngnaannnnttnnangnnnannnnnnnntnnnannnnnnnnnannnnnann

SEQ ID NO: 986 - DNA, 4000 bp, Escherichia coli
  misc_feature (1949)..(1950): n is a, c, g, or t
  misc_feature (1980)..(1980): n is a, c, g, or t
  misc_feature (1991)..(1991): n is a, c, g, or t
  misc_feature (1993)..(1993): n is a, c, g, or t
  misc_feature (3984)..(3984): n is a, c, g, or t
cgaccctcttctgtggcggcctgccaaaggcggcggtcttgatcaggccagtcagtaaggggcagggatgtgcgttcgatcttactcatgacgccttcccctttggcttacccatcaaagctaaaggatccatgaacagatcctcatgacgctttgggttttgcttttgtgcgcgaaaggcttcggctacgccatcccgccgtgtcttggtaatcacctcgccgtaaagctcgatcgccttttgggtctcagcgcccgcgtaatgtgcataggtggtcgtgagcgccttatgacccagaagcttgcgcacgacctcataatgaccgggcaggcggtccaagaggagcttggccgccgcatgacggaactggtgcggggttagacggatcgcggcatgggaccaaagcgtgttcgtgatgagcttgcgcaaggctgagcagtcctttgcagcccccttgcggccagggaagagataggggcttgcgccaggggtgaacaacatgcgccagtcatcgatgtagcgcttcacccgctcggtcgtggcctctggcaagaggaagtcgagtgcaaccttgttcttcacctcttccatgggcacgacaatgcgcagacacttcccatgccagatgaagtgctgatcaagacgcagagcgttaagattgcggatccgcatcggcgcgaactgcaggatctcgatggcaacagccgcctgtatcaagagatgcgcatccttgcgcacactgccctgctcaaccgtctttgacataacgagggcgcggtcccagagcacttggggtaaggtgaggaagcgcagaacggcctttggatcatcaaactgatgcatagaggctgcattcttctcggagagcccgtcatgggagaggcgcagcttgggcatatgctctgcaaagaaggccacatcttcatcagatggatcacagtgcttgacggcgtaacagcgcacactccaggcaagctctccgatatgcttcgaggtctcaccgccattgcgatcgagaagccagctgatgccggtctcaaacatggcaggcgtgaccagatcgcggagggatagagcgctgcccacatccacgcccttgtaagagagcgcagagatatagcgatgaagctgccaccgcaccgcatcaatgctgatcggtgcaaatggcttcttcaaacccttgctgaagacatccttgcttgagagatgatctagataggcatcgatatccaccctgacggcatcagagacgagcgaccagtcgatcgcataaagccgctcgtcatagcgcggcacgtcaagcgtgacctgtggccagcccgcatcgcgatgcgtctccaccatttggttccacacacgacaggatgactgatgccgcacgcgcgggtgtttgatcaggctctcggtctcgagggctaagagatagccgtcagcaacgatgtctgagacatcatcgggcgcaacagcttggtttgagcagtagcgcataaagcggctgagctcagacttacgataagtatcgccctcaagtaggtcataaagcatctgccactcagccgtaagctttgctgaagctggcgcaagcttggtgttgatcttcaaatgccgcatcgcgcccaatatcaaggaccgcacattctgcacacggcggcgcgtcacattgatcaacgttggatgcacacgctcaagcttctcacggatataaggcgcagaggctgggatgctggtctcgggtaagtggaaccactccgccaagctgcggcaggcggaggcgatatcgcggcgcttatacacggatagctcatgatccgcttcgatgcgcacgcgcagctcagccaagctcatctgattggcgtcaaggaacgggttatgcatggtcatggcagttactccaagaagacgtgaaggaagatgcaggacagtttgggtcacgtgaagccatctgagnnaaaatactacatatagtgcaaatataccanaattgatagtnangataacaacatatagatttgcacgattgtgcgtgactgagggtcaaagcagaccagaaggggacagtcagggtcatccgaacatcccccctgagcggttgcgggcgatgaaggcctcaaggtctgcaaaggcaaaccgcaaggcattgcccacacgaatgcagggcagatcaccgcgcgcgatgaggcgcttgatcgagcgctcggatacagaaagatactccgccgcctcaccgatcgtgagcaggcggatgggttttgaactgctcatgggcaggtcctctgttgcgatgttcacaagatgcgcccgctacatccgcccgtgcgcagtgccgcgccatcaggcacgcaagcgcctcaagcgtggcacaaagatcagccgaagctgactgtgcagaagggggggtatgaggacgcgactcagtcatacgcccagaataaatctgcgctttgagccgctctaacttaggcggcgtaagcagattttataaatttatatcagacccttaaggtctgcgcgtcattgcggcgtcataggcttgggccgcgactttaaattttgctttttccctgacgatcagctttttgcctttaaaatcttgagtttgataatcacccagcggtttacccatgcgataggtggcgaggatagctttgtcgtaagaactttttgcaagattgtcgtaagtggcagacagccgcgccggttggccggtggcggcctcatatacatctgcgaggcaatagaaggctttatccaatgcttggttaaactgtgggtcatcgaactcgtttagcgagcagcgcatgcccttaatggcatctagtagtgtctgtcggtgcgcagggttcgccaagtcaatttggacaaaatcctcaacttgagaatacatgcggctcttaaaggcagcgtttaggattgcctttgtgtctgcagagagcctatcaaactgctgctcggtgcgagcatggttcggctttttatgacgctcgacggcctccttcagcatactgagctccttgcgcatttggggtagtctgttggcttgggcctgcttcttgccgctcttgcgcgatgcggcgcgctgaacaagtatagcttcggcccaacgatgtagcccgtcgcggagcatacgttcagcctcagctggtaaaggcgtccccaagcggcacatgtgatagtaagctgcattgaggttgcgctgaaggaattttgggattttcggcgtcattgcaaaagtgctcaggcaagtaatcttacgagaccactttatattaaaatggcgtctggttggtgttctttgggaataccagattgatcttcctaatcctccatacgatcgaacgctttgaagctcgttccccagctatggcttatgttcgaagttgatggacgaaaccattgcagttactggaccgcctggagagtacaattctaatagggtgcggcttttcacttaggtatatcaattcaacatatcgggttggtctaggacaagttggttccatatggtttgaaagtgaagccacccaatgtactcgctaccgacatgctcccggctgtatcgagcacgctcatcaggaattcggattggcgtaattccgcttgcggcgatatcaagctgctgtttgcagcaacgctcaagtgcgataaaccagaaggccgcactctcgatagagtggcgcgatgcagtcaaaaggccgtggttttgatggagcgccgccttaacccctttgaatgctttagcgacatccgagccagcatgggtctcaactgcaactgctccagcctgttccccaactacaacgtgatcctcaaagaatgcgcacgcgtcttgagttatcggatcgattgggcgcccggtagcacaccaagcggtcccataggtcgtatgagcatggcacatcgcgataatatcagggtgctgctcatggacgttagcatgcagtacaaacccagctcggttaactgcgtattcaccttcgattacngtgccattgtgatcca

SEQ ID NO: 987 - DNA, 4000 bp, Escherichia coli
  misc_feature (720)..(720): n is a, c, g, or t
  misc_feature (1452)..(1452): n is a, c, g, or t
  misc_feature (1619)..(1619): n is a, c, g, or t
  misc_feature (1668)..(1668): n is a, c, g, or t
  misc_feature (1990)..(1990): n is a, c, g, or t
  misc_feature (2695)..(2695): n is a, c, g, or t
  misc_feature (3253)..(3253): n is a, c, g, or t
  misc_feature (3259)..(3259): n is a, c, g, or t
  misc_feature (3325)..(3325): n is a, c, g, or t
  misc_feature (3343)..(3343): n is a, c, g, or t
  misc_feature (3696)..(3696): n is a, c, g, or t
ttcaccttggtgggcaactcggccgcctgatccaggttgacctcggggccctccagggcgtgctgcaccaggtgggccagcccctcgatgaacgccggggtggtgtccagcgccggcacgcgccggaagttggtgatgccggcttcggtggcgatctcgcggtactcgatgtcgatctcctcgagagtctcgatgtgctcgctcacgaagctgatcggtaccaccaccagatctttcaccccctgggcgccgaggtcgtggagggcctcgtcggtgtaaggcttgagccactccaccggaccgacacggctctggtaggccagggtgaagggattggcgtggcccagatcccgctccagccgctgcatgatcagccctgcgcaggcctgaatctcctgctggtacgggtcgcccgcctcctccacatagctcttgggcacgccatgggcgctgaagaacacatgggccgtggccggttcggggcaggcctggatctccttggtaatcaggctggccatggcgccgatgtagcccggatcgtcgaagtagctgcggatgcagcggatcggcaggcgtgcgaagttggggtcggactggcgcaggcgttgcagttcgcggaagctggagccgctggtgctgatcgagaagtgggggtagagcggcagcaccaccacttcatcgatcccgtcggccttgatgtcggccacggcggattcggtnaaggggtgccagtagcgcatggccacgtagctcgtggcctcgatgccccgctggcgcaggttgctctgcagttcccgcgcctgctgctcggagggggccccgtccgctgatcagctccagcaggaaagcggaaaaacccaccatcgccaagcgaccattccagacctcggagctgttgttccagccccaggcccacttgtcctggggatagagcttcgccttggtgggcaactcggccgcctgatccaggttgacctcggggccctccagggcgtgctgcaccaggtgggcagcacaccgaccttgccgcaccccatggacatggcctaccgatccagctatcccttcatggtatgaccggatctgggctcaacagtgagatctcaatggaacgggatcagccgcggaaatgcagacatggtgttgcagcagagatgacgacaatcactgcccactgccagagagaatcatctttcatctgtaggagttgaagggcaagcattcatctgaggcgatcaccagcctgccaaaatgcgacagtcaaaaaccaaggatgatctcatgaccgaggggggcttatcccaacagactcgatcaggttctgatcggcagtgggacttaatgcaagccagcttcgatggcgactggctggggatgacgacgtggtacgacagaaatgccaacggcatggatctgaaccacggcacgtgcagctctaccgaatcgctgtangccattcggttttctgatgctgatacaggagagtggcatggaacaggtcttcgatttgccccgggtggagaacgccgattccccctggatcgacaccactacaacctcggccatcactgctggcatttcccggagaccgcaggtcagtcaagccttgaggttggcgngagcacaacgcgagcgggccatgaagtgaattttttcaatggccgctcncgatcgatgcttgttgccctctatcagcgccagggtgacggccggatgatcctggattcaatcgcagccaccccgtttcgctgtcaacgggcaagccccgatccctcccgtgaacagatgcagtctgtagacgccttattgtcggttgtcgcaggatggcgtgggatcgagcaggagctgagaccgggcgtgcagaatggagcgcttgaaacaaccaaagtggcacctgaattcgatgcagacagcttttgctcgcaggatgtgaatggcgtgtttgcagataatttgatttgcggccttcccgataaaatgccaaagggtnctttcgatctccaatttggatgtttgttaaatccaaagagttttacccatctcatcatcgcttacgatgcaaataatagactgagtcgctggatagagcgtcgatatcaaccaaccatgcacggataactgaagctgaagccaatttgcttcagcttttcgttgctaacgcgcgcattaagaacccgatcagttgtatctattgtcaaccacttggccaatggcaagccagctcgctcacagaggcgatccgtaagctcttggccactcagttgtgtatcgttaacaagattataggtttcatccaggccttgatcgaatgcgaagcaaacaccccggacaatgtcatcgcggtgaatccagcacggaacatttaggccgttgcgttgcaccaggcccccagccgctgacaacagcatggatggaatgtcacgcccggggccgtagatgcctcccaggcggagcacacagaccttgatcctgtcagagcggatggcccccatcatctcttcagcctggagaagaacctgattgacagggtggggatcggcgatcggagccgtttcgttggtgagggcaccgtggcggttgccgtacacgccgcagctgctcagatggacgatctgcagaggtgtgttgcgggggcgtcgatccagcgtctcgacgagtcgttgcaaaccaccgaggaaggttttccggtattggnccagatcaacctcggaacccttcgagggcgcgaaggaaaccagaatgccatccagatcagcggtgaagtcaaggttggtgctggggtccgtcgagtcaaagatcagcggggtttccacaagctcggccaactcgccgaggcgctcacgccgggtggtggtagcccacagctcatgaccctcctgcttccaagccctggccacctcctcgcccacgtagccgtagccgaggatggcacgccgttcacccgagggcagggcgggtctctcctgcttggccagcagctggtagagagaggccaaatctggagaagatgtcacagctagcaactcaacaagtaaatatttgtaaagcataggagcccaggtcgctgccggtgtgctgatgaataccgtcttgccaggacaggctgaaaaggccctcccatgagagggttgatcaccgatgcggtgctttcatgcccacctatcgcgttgctgccgcaggcctggaggccatgcaggtcaacgtgcccggctgcagtggagatgctctcagcctggcactggggccgctgggnctcagngacttcagggtcgaacggcgcagtcaggacgggcgccaatggttttttcaggcaaccttcaagccnggcggcatcgagcccccngccgccgggcttgtcacgagggcggtaagcgtcgatcgcattctcgactgacgccatggggtccccgcaatggcccacggcctctgcgcagctgtggatcgcctgcctggcctgcaacagccctgcaggaagctggtcctggaggggacaccagctcggagcccgcctcagcccccaatcaatcgcgagctggtacggaagattaacttccttatggtttttacttgccccaagcctgagcccatcgcagcattcaatactttcttttgattgcttcctgtctgctcaatgaccctgcctgttctggccaccaaacctctcaccagcaacgccagggtcagcaattttctggnagctagcgaacagacctctcgccagattggtcggcaggccagtcagcttgatggagctgccgccgatgccctgatcgagcaggcctatcgccaggtgtacttccacgccttcaagcgcgaccgcgatgcgatgcttgagtcgcagctgcgctccggccagatcagcacccgcgagttcgtgcgccagctgctgcgctcggagaaattccgcaacgacttctaccgctgcaacagcaattaccgcgtggtggaacaggtggtgggccgggtgctcggccggccggtgcacggggagcaggagcgc

SEQ ID NO: 988 - DNA, 4000 bp, Escherichia coli
  misc_feature (1)..(74): n is a, c, g, or t
  misc_feature (76)..(82): n is a, c, g, or t
  misc_feature (84)..(96): n is a, c, g, or t
  misc_feature (98)..(118): n is a, c, g, or t
  misc_feature (120)..(127): n is a, c, g, or t
  misc_feature (129)..(135): n is a, c, g, or t
  misc_feature (137)..(144): n is a, c, g, or t
  misc_feature (146)..(171): n is a, c, g, or t
  misc_feature (173)..(191): n is a, c, g, or t
  misc_feature (193)..(222): n is a, c, g, or t
  misc_feature (224)..(234): n is a, c, g, or t
  misc_feature (236)..(261): n is a, c, g, or t
  misc_feature (263)..(263): n is a, c, g, or t
  misc_feature (265)..(265): n is a, c, g, or t
  misc_feature (267)..(271): n is a, c, g, or t
  misc_feature (273)..(288): n is a, c, g, or t
  misc_feature (290)..(292): n is a, c, g, or t
  misc_feature (295)..(317): n is a, c, g, or t
  misc_feature (319)..(320): n is a, c, g, or t
  misc_feature (322)..(347): n is a, c, g, or t
  misc_feature (349)..(392): n is a, c, g, or t
  misc_feature (394)..(410): n is a, c, g, or t
  misc_feature (412)..(414): n is a, c, g, or t
  misc_feature (416)..(456): n is a, c, g, or t
  misc_feature (458)..(462): n is a, c, g, or t
  misc_feature (464)..(471): n is a, c, g, or t
  misc_feature (473)..(528): n is a, c, g, or t
  misc_feature (530)..(530): n is a, c, g, or t
  misc_feature (532)..(569): n is a, c, g, or t
  misc_feature (571)..(574): n is a, c, g, or t
  misc_feature (576)..(586): n is a, c, g, or t
  misc_feature (588)..(593): n is a, c, g, or t
  misc_feature (595)..(608): n is a, c, g, or t
  misc_feature (610)..(612): n is a, c, g, or t
  misc_feature (615)..(624): n is a, c, g, or t
  misc_feature (626)..(632): n is a, c, g, or t
  misc_feature (634)..(634): n is a, c, g, or t
  misc_feature (636)..(638): n is a, c, g, or t
  misc_feature (640)..(641): n is a, c, g, or t
  misc_feature (643)..(663): n is a, c, g, or t
  misc_feature (665)..(665): n is a, c, g, or t
  misc_feature (667)..(674): n is a, c, g, or t
  misc_feature (677)..(682): n is a, c, g, or t
  misc_feature (684)..(688): n is a, c, g, or t
  misc_feature (690)..(700): n is a, c, g, or t
  misc_feature (702)..(716): n is a, c, g, or t
  misc_feature (718)..(726): n is a, c, g, or t
  misc_feature (728)..(731): n is a, c, g, or t
  misc_feature (733)..(738): n is a, c, g, or t
  misc_feature (740)..(777): n is a, c, g, or t
  misc_feature (779)..(791): n is a, c, g, or t
  misc_feature (793)..(798): n is a, c, g, or t
  misc_feature (800)..(807): n is a, c, g, or t
  misc_feature (809)..(821): n is a, c, g, or t
  misc_feature (823)..(840): n is a, c, g, or t
  misc_feature (842)..(842): n is a, c, g, or t
  misc_feature (844)..(871): n is a, c, g, or t
  misc_feature (873)..(881): n is a, c, g, or t
  misc_feature (883)..(895): n is a, c, g, or t
  misc_feature (897)..(907): n is a, c, g, or t
  misc_feature (909)..(909): n is a, c, g, or t
  misc_feature (911)..(911): n is a, c, g, or t
  misc_feature (913)..(931): n is a, c, g, or t
  misc_feature (933)..(938): n is a, c, g, or t
  misc_feature (940)..(944): n is a, c, g, or t
  misc_feature (947)..(957): n is a, c, g, or t
  misc_feature (964)..(965): n is a, c, g, or t
  misc_feature (967)..(967): n is a, c, g, or t
  misc_feature (969)..(969): n is a, c, g, or t
  misc_feature (971)..(971): n is a, c, g, or t
  misc_feature (975)..(975): n is a, c, g, or t
  misc_feature (978)..(985): n is a, c, g, or t
  misc_feature (987)..(987): n is a, c, g, or t
  misc_feature (989)..(989): n is a, c, g, or t
  misc_feature (991)..(992): n is a, c, g, or t
  misc_feature (994)..(995): n is a, c, g, or t
  misc_feature (997)..(998): n is a, c, g, or t
  misc_feature (1001)..(1001): n is a, c, g, or t
  misc_feature (1003)..(1005): n is a, c, g, or t
  misc_feature (1007)..(1009): n is a, c, g, or t
  misc_feature (1013)..(1016): n is a, c, g, or t
  misc_feature (1018)..(1019): n is a, c, g, or t
  misc_feature (1021)..(1021): n is a, c, g, or t
  misc_feature (1025)..(1027): n is a, c, g, or t
  misc_feature (1032)..(1037): n is a, c, g, or t
  misc_feature (1039)..(1040): n is a, c, g, or t
  misc_feature (1043)..(1043): n is a, c, g, or t
  misc_feature (1045)..(1049): n is a, c, g, or t
  misc_feature (1051)..(1053): n is a, c, g, or t
  misc_feature (1057)..(1064): n is a, c, g, or t
  misc_feature (1068)..(1074): n is a, c, g, or t
  misc_feature (1077)..(1079): n is a, c, g, or t
  misc_feature (1081)..(1083): n is a, c, g, or t
  misc_feature (1085)..(1086): n is a, c, g, or t
  misc_feature (1090)..(1090): n is a, c, g, or t
  misc_feature (1092)..(1096): n is a, c, g, or t
  misc_feature (1098)..(1105): n is a, c, g, or t
  misc_feature (1107)..(1115): n is a, c, g, or t
  misc_feature (1117)..(1119): n is a, c, g, or t
  misc_feature (1121)..(1128): n is a, c, g, or t
  misc_feature (1130)..(1135): n is a, c, g, or t
  misc_feature (1142)..(1142): n is a, c, g, or t
  misc_feature (1144)..(1144): n is a, c, g, or t
  misc_feature (1146)..(1146): n is a, c, g, or t
  misc_feature (1149)..(1150): n is a, c, g, or t
  misc_feature (1152)..(1154): n is a, c, g, or t
  misc_feature (1156)..(1156): n is a, c, g, or t
  misc_feature (1159)..(1159): n is a, c, g, or t
  misc_feature (1163)..(1163): n is a, c, g, or t
  misc_feature (1165)..(1165): n is a, c, g, or t
  misc_feature (1167)..(1170): n is a, c, g, or t
  misc_feature (1173)..(1177): n is a, c, g, or t
  misc_feature (1179)..(1187): n is a, c, g, or t
  misc_feature (1190)..(1192): n is a, c, g, or t
  misc_feature (1194)..(1198): n is a, c, g, or t
  misc_feature (1201)..(1202): n is a, c, g, or t
  misc_feature (1204)..(1205): n is a, c, g, or t
  misc_feature (1209)..(1209): n is a, c, g, or t
  misc_feature (1211)..(1211): n is a, c, g, or t
  misc_feature (1214)..(1214): n is a, c, g, or t
  misc_feature (1217)..(1219): n is a, c, g, or t
  misc_feature (1221)..(1225): n is a, c, g, or t
  misc_feature (1227)..(1229): n is a, c, g, or t
  misc_feature (1232)..(1232): n is a, c, g, or t
  misc_feature (1236)..(1236): n is a, c, g, or t
  misc_feature (1238)..(1238): n is a, c, g, or t
  misc_feature (1241)..(1241): n is a, c, g, or t
  misc_feature (1243)..(1245): n is a, c, g, or t
  misc_feature (1247)..(1248): n is a, c, g, or t
  misc_feature (1250)..(1251): n is a, c, g, or t
  misc_feature (1253)..(1255): n is a, c, g, or t
  misc_feature (1257)..(1257): n is a, c, g, or t
  misc_feature (1260)..(1260): n is a, c, g, or t
  misc_feature (1262)..(1263): n is a, c, g, or t
  misc_feature (1265)..(1265): n is a, c, g, or t
  misc_feature (1267)..(1272): n is a, c, g, or t
  misc_feature (1275)..(1277): n is a, c, g, or t
  misc_feature (1279)..(1279): n is a, c, g, or t
  misc_feature (1286)..(1287): n is a, c, g, or t
  misc_feature (1292)..(1297): n is a, c, g, or t
  misc_feature (1300)..(1300): n is a, c, g, or t
  misc_feature (1304)..(1307): n is a, c, g, or t
  misc_feature (1309)..(1309): n is a, c, g, or t
  misc_feature (1311)..(1312): n is a, c, g, or t
  misc_feature (1314)..(1314): n is a, c, g, or t
  misc_feature (1321)..(1323): n is a, c, g, or t
  misc_feature (1326)..(1327): n is a, c, g, or t
  misc_feature (1331)..(1332): n is a, c, g, or t
  misc_feature (1336)..(1337): n is a, c, g, or t
  misc_feature (1339)..(1339): n is a, c, g, or t
  misc_feature (1347)..(1347): n is a, c, g, or t
  misc_feature (1352)..(1352): n is a, c, g, or t
  misc_feature (1357)..(1358): n is a, c, g, or t
  misc_feature (1361)..(1362): n is a, c, g, or t
  misc_feature (1364)..(1365): n is a, c, g, or t
  misc_feature (1376)..(1377): n is a, c, g, or t
  misc_feature (1381)..(1382): n is a, c, g, or t
  misc_feature (1387)..(1387): n is a, c, g, or t
  misc_feature (1389)..(1389): n is a, c, g, or t
  misc_feature (1392)..(1393): n is a, c, g, or t
  misc_feature (1395)..(1395): n is a, c, g, or t
  misc_feature (1399)..(1399): n is a, c, g, or t
  misc_feature (1402)..(1406): n is a, c, g, or t
  misc_feature (1414)..(1414): n is a, c, g, or t
  misc_feature (1418)..(1422): n is a, c, g, or t
  misc_feature (1425)..(1425): n is a, c, g, or t
  misc_feature (1427)..(1427): n is a, c, g, or t
  misc_feature (1431)..(1431): n is a, c, g, or t
  misc_feature (1433)..(1433): n is a, c, g, or t
  misc_feature (1435)..(1435): n is a, c, g, or t
  misc_feature (1438)..(1438): n is a, c, g, or t
  misc_feature (1444)..(1444): n is a, c, g, or t
  misc_feature (1446)..(1447): n is a, c, g, or t
  misc_feature (1449)..(1449): n is a, c, g, or t
  misc_feature (1452)..(1452): n is a, c, g, or t
  misc_feature (1456)..(1456): n is a, c, g, or t
  misc_feature (1459)..(1460): n is a, c, g, or t
  misc_feature (1462)..(1463): n is a, c, g, or t
  misc_feature (1465)..(1467): n is a, c, g, or t
  misc_feature (1469)..(1469): n is a, c, g, or t
  misc_feature (1472)..(1473): n is a, c, g, or t
  misc_feature (1477)..(1479): n is a, c, g, or t
  misc_feature (1481)..(1482): n is a, c, g, or t
  misc_feature (1484)..(1484): n is a, c, g, or t
  misc_feature (1486)..(1490): n is a, c, g, or t
  misc_feature (1492)..(1492): n is a, c, g, or t
  misc_feature (1498)..(1500): n is a, c, g, or t
  misc_feature (1503)..(1503): n is a, c, g, or t
  misc_feature (1509)..(1512): n is a, c, g, or t
  misc_feature (1516)..(1516): n is a, c, g, or t
  misc_feature (1518)..(1518): n is a, c, g, or t
  misc_feature (1521)..(1521): n is a, c, g, or t
  misc_feature (1524)..(1526): n is a, c, g, or t
  misc_feature (1529)..(1535): n is a, c, g, or t
  misc_feature (1542)..(1549): n is a, c, g, or t
  misc_feature (1552)..(1553): n is a, c, g, or t
  misc_feature (1555)..(1556): n is a, c, g, or t
  misc_feature (1561)..(1561): n is a, c, g, or t
  misc_feature (1564)..(1566): n is a, c, g, or t
  misc_feature (1568)..(1568): n is a, c, g, or t
  misc_feature (1571)..(1571): n is a, c, g, or t
  misc_feature (1573)..(1573): n is a, c, g, or t
  misc_feature (1575)..(1575): n is a, c, g, or t
  misc_feature (1577)..(1577): n is a, c, g, or t
  misc_feature (1581)..(1584): n is a, c, g, or t
  misc_feature (1586)..(1586): n is a, c, g, or t
  misc_feature (1589)..(1594): n is a, c, g, or t
  misc_feature (1596)..(1597): n is a, c, g, or t
  misc_feature (1599)..(1604): n is a, c, g, or t
  misc_feature (1606)..(1608): n is a, c, g, or t
  misc_feature (1610)..(1610): n is a, c, g, or t
  misc_feature (1615)..(1615): n is a, c, g, or t
  misc_feature (1618)..(1620): n is a, c, g, or t
  misc_feature (1622)..(1624): n is a, c, g, or t
  misc_feature (1628)..(1629): n is a, c, g, or t
  misc_feature (1634)..(1637): n is a, c, g, or t
  misc_feature (1642)..(1648): n is a, c, g, or t
  misc_feature (1650)..(1651): n is a, c, g, or t
  misc_feature (1656)..(1659): n is a, c, g, or t
  misc_feature (1664)..(1672): n is a, c, g, or t
  misc_feature (1677)..(1681): n is a, c, g, or t
  misc_feature (1687)..(1694): n is a, c, g, or t
  misc_feature (1696)..(1696): n is a, c, g, or t
  misc_feature (1699)..(1702): n is a, c, g, or t
  misc_feature (1708)..(1715): n is a, c, g, or t
  misc_feature (1718)..(1719): n is a, c, g, or t
  misc_feature (1724)..(1727): n is a, c, g, or t
  misc_feature (1730)..(1733): n is a, c, g, or t
  misc_feature (1736)..(1738): n is a, c, g, or t
  misc_feature (1742)..(1747): n is a, c, g, or t
  misc_feature (1750)..(1755): n is a, c, g, or t
  misc_feature (1760)..(1760): n is a, c, g, or t
  misc_feature (1767)..(1769): n is a, c, g, or t
  misc_feature (1771)..(1773): n is a, c, g, or t
  misc_feature (1776)..(1776): n is a, c, g, or t
  misc_feature (1779)..(1785): n is a, c, g, or t
  misc_feature (1790)..(1793): n is a, c, g, or t
  misc_feature (1797)..(1798): n is a, c, g, or t
  misc_feature (1807)..(1807): n is a, c, g, or t
  misc_feature (1819)..(1820): n is a, c, g, or t
  misc_feature (1822)..(1823): n is a, c, g, or t
  misc_feature (1827)..(1827): n is a, c, g, or t
  misc_feature (1832)..(1832): n is a, c, g, or t
  misc_feature (1835)..(1835): n is a, c, g, or t
  misc_feature (1838)..(1838): n is a, c, g, or t
  misc_feature (1841)..(1841): n is a, c, g, or t
  misc_feature (1862)..(1862): n is a, c, g, or t
  misc_feature (1966)..(1966): n is a, c, g, or t
  misc_feature (1971)..(1973): n is a, c, g, or t
  misc_feature (1989)..(1990): n is a, c, g, or t
  misc_feature (2005)..(2005): n is a, c, g, or t
  misc_feature (2009)..(2009): n is a, c, g, or t
  misc_feature (2212)..(2212): n is a, c, g, or t
  misc_feature (2245)..(2245): n is a, c, g, or t
  misc_feature (2865)..(2865): n is a, c, g, or t
  misc_feature (3880)..(3880): n is a, c, g, or t
nnnnnnnnnnnnnnnnnnnnnnnnnnnnnnnnnnnnnnnnnnnnnnnnnnnnnnnnnnnnnnnnnnnnnnnnnntnnnnnnntnnnnnnnnnnnnngnnnnnnnnnnnnnnnnnnnnngnnnnnnnnannnnnnngnnnnnnnnannnnnnnnnnnnnnnnnnnnnnnnnntnnnnnnnnnnnnnnnnnnnannnnnnnnnnnnnnnnnnnnnnnnnnnnnnannnnnnnnnnncnnnnnnnnnnnnnnnnnnnnnnnnnncnancnnnnnannnnnnnnnnnnnnnncnnnctnnnnnnnnnnnnnnnnnnnnnnntnntnnnnnnnnnnnnnnnnnnnnnnnnnntnnnnnnnnnnnnnnnnnnnnnnnnnnnnnnnnnnnnnnnnnnnntnnnnnnnnnnnnnnnnncnnntnnnnnnnnnnnnnnnnnnnnnnnnnnnnnnnnnnnnnnnnnannnnnannnnnnnntnnnnnnnnnnnnnnnnnnnnnnnnnnnnnnnnnnnnnnnnnnnnnnnnnnnnnnnnantnnnnnnnnnnnnnnnnnnnnnnnnnnnnnnnnnnnnnncnnnncnnnnnnnnnnngnnnnnntnnnnnnnnnnnnnngnnngtnnnnnnnnnntnnnnnnntngnnntnncnnnnnnnnnnnnnnnnnnnnnantnnnnnnnntgnnnnnngnnnnntnnnnnnnnnnngnnnnnnnnnnnnnnnannnnnnnnngnnnncnnnnnntnnnnnnnnnnnnnnnnnnnnnnnnnnnnnnnnnnnnnnannnnnnnnnnnnngnnnnnntnnnnnnnngnnnnnnnnnnnnntnnnnnnnnnnnnnnnnnntngnnnnnnnnnnnnnnnnnnnnnnnnnnnncnnnnnnnnncnnnnnnnnnnnnntnnnnnnnnnnncnancnnnnnnnnnnnnnnnnnnngnnnnnngnnnnngannnnnnnnnnnggctcanncntncngatntannnnnnnncngntnncnnannccntnnnannnttgnnnnanncnatgnnncagannnnnnanntcngnnnnntnnnacannnnnnnngagnnnnnnnttnnngnnncnntatntnnnnngnnnnnnnntnnnnnnnnncnnnannnnnnnngnnnnnnatattcntnanacnntnnntntcncggngnannnngannnnntnnnnnnnnngannntnnnnntgnnanngctncnaanctnnnannnnncnnnccnagtngnttncnnnanngnntnnncnctngnngncnnnnnnccnnngnctattcnntaaannnnnntantctnnnntncnncnatccttnnnatnnatanncgtnnanatagatgntttanctctnnttnnannaggtcactatnntatnncatangnctnnantacngannnnntaacgatncacnnnnntcngngaantncngcncatcancnncncanattnagnnannannnantannaatnnncnncngnnnnngnctcccnnnccnaagggnnnngggngnaanagnnntcnnnnnnnccccccnnnnnnnnccnntnncccanccnnncnggngnangntgtnnnnanctnnnnnngnncnnnnnncnnncntatanggnnngnnngcgnnccaannnnggttnnnnnnngnnccaannnnggttnnnnnnnnnaccannnnnggtttnnnnnnnntnccnnnnttggtnnnnnnnnggnnccaannnnggnnnnaannnaaannnnnnttnnnnnnccccnccccccnnntnnnccnccnnnnnnnccccnnnnaaanncccccttcngcagtgcatctnnannagangcacngcnganggnaaaagcaaccagtactggtcngcatcgtgaccagtactggtaagtggtggtgaccagtactgcttgctgaagtgaccagtactgatccgatcggcgaccagtactggtcacttttgcccctcccnagagnnnctctatctcagcccgnnaggaaggagagccanatgngcgaaagcaaaagtgcccgctgcgaccgaagtcacagcgggcactcgccgatagaatatcgaaggggggagagctactattctgcgctttcagcagcaggagcttcagccgtagccttcgtagagcggcgtgaacgacgcgtcttaggagcagccttcttgtcagccttttccttgagcatgttctcgttgaagtctacgagntcgatgaagcagacagcagcgttgtcaccgagncggttacccgtcttgaggatacgagtgtagccaccgggacggtcagcgatcttttcagcaacggggccgaagagttccttgacagcaaacttattctgcagctcagcgaagacgatacgacgtgcgtgcgtggagtcttccttagcgcgggtcagcaggggctcgacgtatacgcgaagagccttagccttagcgaccgtggtgaagatgcgcttgtgcaggatgagcgatgcagccatgttggaaagcatagcctcgcggtgcgccttcttacgaccgagatgattgaatttcttattatgtctcatctttctacttagtcattatctaaattgtacttgctaacatccatcccgaaggtgagtccgagtcgctccatcagctcgttgagctcgtccatagacttcttaccgaagttgcggaacttgctgagcgtatcagcgtcgaggacgacgaggtcggccagacggaatacgttgccggagcggaggcagttctgcgcacggacggagagatcgagatccttgagatcagtacggagcagctgagatacgcgatcgatctcctgcatgtccagtacctcctcgtcgccttcctcgatgactgcattctcttctacntcgacagggtcagagatgaagaggctgaagtgctcgatgaggatagctgctgcgtccttgagagcctgctggggatgaatgctcccgtcagtggtgatctcgagggtcagcttctcgtagtcagtcttctgctctacacgatagttctccgtgaagtacttgacattacggataggcgtatagatcgagtcgatagcgatcgtctgcagctcattctcctgagccgtgtcgaccagcttctcatcagcggggatgtaaccacgccccttgttgatggagagctcgatagtaagggtatacgcctcatcgatgtggcagatgaccagctcgggattgaggacttcgaaggaagtaagcttgccgttgagctcgccagcgaggaactgctgctgaccagagatcgtcaggctgacggtctcctcagtagcgtcctggacgagggcacggaagcggacttgcttcaggttgagaatgatgttagttacatcctccaagacacccggaatagtagcaaattcatgattgacaccttcgatcttgatggtcgagatggcgtagccttcgagtgaagaaaggagtatacgacgcagggcattaccgacagtggtaccatatcccggctcaagagggcggaactcgaacttagcgtacgagtccgtcgcatccatcatgaggacgttttcgggcttctgaaatgctaatattgccatgtgagtgagataatagggattattacttagagtatagttcgacgatcagctgctccttgatctcttcggggatgtcttcacgctgaggagcgctgaggaacttaccggagagagaagcctgattccactcgagccagctgtagctgctgtggctacgaccagccagagagtcggtgatgacctctaagctcttcgccttctcacggacgccgacgacctggccgggcttgagggtgtaagaagggatgttgactacctgaccatcgacggtgatgtgacggtgcgagacgagctgacgagcagcngcacgcgtcttagcgatgccgaggcgatagacgacgttgtcgaggcggctttccaggagctggaggagcacttcacccgtgacacccttcgtgcgctgagccttttcgaagaggttgcgg

SEQ ID NO: 989 - DNA, 4000 bp, Escherichia coli
  misc_feature (319)..(319): n is a, c, g, or t
  misc_feature (459)..(459): n is a, c, g, or t
  misc_feature (475)..(475): n is a, c, g, or t
  misc_feature (487)..(487): n is a, c, g, or t
  misc_feature (490)..(490): n is a, c, g, or t
  misc_feature (528)..(528): n is a, c, g, or t
  misc_feature (559)..(559): n is a, c, g, or t
  misc_feature (595)..(595): n is a, c, g, or t
  misc_feature (619)..(619): n is a, c, g, or t
  misc_feature (637)..(637): n is a, c, g, or t
  misc_feature (724)..(724): n is a, c, g, or t
  misc_feature (727)..(727): n is a, c, g, or t
  misc_feature (739)..(739): n is a, c, g, or t
  misc_feature (742)..(742): n is a, c, g, or t
  misc_feature (817)..(817): n is a, c, g, or t
  misc_feature (868)..(868): n is a, c, g, or t
  misc_feature (3880)..(3880): n is a, c, g, or t
cgtatcgggcaaagtcgtgatgaaggagctgtcgatcatgtaccagttctcgcggtcgttctgctgtttctgattgacgatcgagtagagggtcgcgccgctttcgccgacggtaaacgatccgaattcagtgaatatgtgcggttcgtcgattccgttgcgggtacagatgttcttgatctgcgcgatgatctcttcggtcaggtactcgtagtcgtacgagaagtcgagcgagtttttgatcggaaagccgcctccgatgttgaggctgtccagatcggggcaaatggccttcaattcgcagtagatgttcaggcanttcgacagttcgttccagtagtaggccgtgtccttgataccggtattgatgaagaagtgcagcattttgagcttgaacttcttgtttttctggatcttggttttgtagaagttgatgatgtcgttgtagcggatccccangcgcgaggtgtagaantcgaatttgggntcntcctcgctggcgatccggatgccgattttgcatttttnggtaatggcatcgtcgtagaggtcgatctcntccttgttgtcgatcacggggatcgtgttttcgaanccgtcgttgatcaactgggcgatnttttcgacgtattgcggncgtttgaagccgttgcagatgatatagcggtccttgtcgatcacgccgctgtcgtacagggcgttgatgatgtgaatgtcgtaagcngangaggtttcgagntgnatgtcgtttttcatcgcctcttccagcacgaacgagaagtgactcgacttggtacagtagcagtagttgtatgtncccttgtaatcgaccttcgccatcgctacgttgaacatgcgcttggcccgnttgatctgctgggagatcttcggcaggtaggttatcttgagcggagtgccgtactgcttgattaattccatcaggggaatgtcgtggaagttcaattcgttgtcctcgacggtaaattcatcctgcgggaaatcgaacgtctgttcgatcaggtcgatgtacttgtctttcatggctcgtttgtgttttttgcggtataatccgagcgagctacattgtaaattccggagtaaagtagctcgtgcggattgttttttattttgggatgcaaagtaggtaattattttcgagatcggcaatggtttatccgtatattttgaaaaaacaggtgaattttttcgtttttgtccgatgaaaattgtatttttgggtcgaattttaatcgggacagaacggtgttgactggaatcataacgaattacctgacccagcacaggaggctggtcgtgccgcaactgggaacttttgtcgtgaaggttcccgaaggcggtgtggtcttttcggagttgcttaagcgcgacgacggcatcttgcgcgggttgctggtgcagcagggtggaatgaacgatctggaggctgccggtgcgatcgaccgcttcgtgtttgaagtgcgtcatgccctcgagcatgagggggcctatgcaatcgagggcttcggtcgtctgaccctttcaccgggcggtgcaatcgtctttcaggcggttctggctacgcctgtagctgctgcgggacctgttgtcggggaatcggctccggaggaaggaaataaaatttcctcggccgcagctcttcatcccgcttccgtcgctgcgtctgcggagtccgttgcaccccgtgtgcgatcccgttccgaagcgaaggcttctcctgtaatcgacggcggtatttccgaacctcggatttccgtttctgccaagcgcaaacccgcaccttatgtaaagggattgcaatacggcaaaccgcttaaaaccaccgagggatatacctatgtgggttccaagccccgccggaggatcgataaatttatggtcatcgccatcgtggtcgctgtgttggccgtaggcgtcatcgtttacggttatctacgccgggcgaagatcgagcgtctggagcgcgaatacctcgaacaactcgcacctgccgtgccggagcccgtggctgccggaacggacgggggtgtggagtccgttccggatacgactcaggaatagtttgcctgtattggctgtaaaacaggattgatagagtaggaatgacagatctgacatccataaaaaaccgtttcgggatcatcggtaactccgaggcgctcaaccgtgcgctggaggttgccctgcgtgtggcgccgaccgatctttcggtactcgttacgggtgaaagcggcgtcggcaaggagtttttcccgcaggtgatccatgcctattcggcacgtaaacacaataaatatatcgccgtgaactgcggcgccattcccgaaggaacgatcgattccgaattgttcggacacgagaagggggccttcaccggagcagtcgaagcccgcaagggttatttcgaggaggcggacggcgggacgatctttctggacgaggtggccgagctgcctcattcgacccaggtgcggttgttgcgtgtgttgcagaccggcgagttcatccgcgtcggttcggccaaggtgcagaagaccaacgtgcgcgtggtggcggcgacgaatacgaatttgcaggatgcgatccaggcggggcgtttccgcgaggatctctattaccggctcaatacggtgccgatccaggtgcctcctctgcgggaacggaaggaggatattttcttgcttttccgcaagttcgcggccgatgtagcggcccagtaccgtatgccggctatttctctggaccccgaggcccggcagatgctggagaattactattggcggggcaatatccgtcagttgaaaaatgtcgccgaacagatttcggccatcgaggaggcgcggctcattacgcctgccatcctgacgaagtacctgcccgcacaatctcaaagcggagcatctacgtcgatgagtacggccttgcatagcggtccgggcgacggcgtgtctttcgaacgggagttgctttacaaagtgcttttcgacctgcgggccgacgtcaatgacctgaagcggatgcttaccgagctgatgcagcgtgccgagcgtcctgccgagccgaccaaagacctggcggggttgttgccggcttccgcccacagtatcgcttctccggactatacggagagcgaggaggtggtcgatgaacagccttcgcgggaactgaccaaagccgatgtgctgcgggagcagatccttcgggccctgcggcgcaacaacggccgccgccgggaagccgctgccgagctgtttatgtcggagagaactctttaccgtaaaatcaaggagctcggcatcgacgagaactcctgaaaaatatcgtttataatcgaatgaaagctgtactcaaatatgcgatcgtcgtcgcagcgggcctcttgctggccggttgcgggtacaaggtgaactattcgttgtcgggcgcttcgattccgcccgatgccaagaccttcagtgtggcctacttcccgaacaacgccccgatggtggctccgatcctgagctcgacgctgacggatgccttgcgggacaagtttacgcgccagacgcgtttgacgcaggtggacgaaggcggcgatttcgctttcgaaggcgagatcaccggttatacttcgacgacggcttcggtttcgggttcgtccgaaacggccctgttgaaccgattgaccattaccgtcaatgtgcgcttcaccaatgcggtggacgagagcatgtcgtggaaaaagacgttttcggcgttcgaggatttcgattcttcgaaactgctgaatgaaatcgagggcgaactgatcccccaaatcgtcgataaactggtgacggacattttccaggcatcggcggcaaactggtagcggatggcngatttcaaggaatatacgatgtccggaggcacggtaggcccggtcgatgaagcgcagctcgatgcgctcgtcgggcgttacgagtggtttactcccgcccgtatcctgcgcgtgcttcaa

SEQ ID NO: 990 - DNA, 4000 bp, Escherichia coli
  misc_feature (1)..(1): n is a, c, g, or t
  misc_feature (3)..(3): n is a, c, g, or t
  misc_feature (5)..(5): n is a, c, g, or t
  misc_feature (9)..(10): n is a, c, g, or t
  misc_feature (13)..(14): n is a, c, g, or t
  misc_feature (17)..(25): n is a, c, g, or t
  misc_feature (27)..(27): n is a, c, g, or t
  misc_feature (29)..(30): n is a, c, g, or t
  misc_feature (32)..(32): n is a, c, g, or t
  misc_feature (34)..(40): n is a, c, g, or t
  misc_feature (42)..(42): n is a, c, g, or t
  misc_feature (44)..(44): n is a, c, g, or t
  misc_feature (48)..(49): n is a, c, g, or t
  misc_feature (51)..(51): n is a, c, g, or t
  misc_feature (55)..(56): n is a, c, g, or t
  misc_feature (58)..(58): n is a, c, g, or t
  misc_feature (60)..(60): n is a, c, g, or t
  misc_feature (62)..(62): n is a, c, g, or t
  misc_feature (64)..(65): n is a, c, g, or t
  misc_feature (69)..(69): n is a, c, g, or t
  misc_feature (71)..(72): n is a, c, g, or t
  misc_feature (74)..(74): n is a, c, g, or t
  misc_feature (77)..(77): n is a, c, g, or t
  misc_feature (79)..(79): n is a, c, g, or t
  misc_feature (81)..(81): n is a, c, g, or t
  misc_feature (83)..(83): n is a, c, g, or t
  misc_feature (86)..(86): n is a, c, g, or t
  misc_feature (90)..(91): n is a, c, g, or t
  misc_feature (93)..(93): n is a, c, g, or t
  misc_feature (96)..(97): n is a, c, g, or t
  misc_feature (99)..(101): n is a, c, g, or t
  misc_feature (105)..(107): n is a, c, g, or t
  misc_feature (110)..(110): n is a, c, g, or t
  misc_feature (114)..(114): n is a, c, g, or t
  misc_feature (116)..(116): n is a, c, g, or t
  misc_feature (122)..(127): n is a, c, g, or t
  misc_feature (130)..(130): n is a, c, g, or t
  misc_feature (134)..(134): n is a, c, g, or t
  misc_feature (136)..(143): n is a, c, g, or t
  misc_feature (147)..(150): n is a, c, g, or t
  misc_feature (152)..(153): n is a, c, g, or t
  misc_feature (156)..(157): n is a, c, g, or t
  misc_feature (160)..(164): n is a, c, g, or t
  misc_feature (166)..(170): n is a, c, g, or t
  misc_feature (173)..(175): n is a, c, g, or t
  misc_feature (179)..(180): n is a, c, g, or t
  misc_feature (182)..(184): n is a, c, g, or t
  misc_feature (188)..(190): n is a, c, g, or t
  misc_feature (193)..(193): n is a, c, g, or t
  misc_feature (197)..(200): n is a, c, g, or t
  misc_feature (202)..(205): n is a, c, g, or t
  misc_feature (207)..(210): n is a, c, g, or t
  misc_feature (212)..(212): n is a, c, g, or t
  misc_feature (219)..(219): n is a, c, g, or t
  misc_feature (221)..(221): n is a, c, g, or t
  misc_feature (223)..(228): n is a, c, g, or t
  misc_feature (230)..(230): n is a, c, g, or t
  misc_feature (233)..(233): n is a, c, g, or t
  misc_feature (235)..(235): n is a, c, g, or t
  misc_feature (237)..(240): n is a, c, g, or t
  misc_feature (242)..(242): n is a, c, g, or t
  misc_feature (245)..(248): n is a, c, g, or t
  misc_feature (251)..(252): n is a, c, g, or t
  misc_feature (255)..(255): n is a, c, g, or t
  misc_feature (257)..(263): n is a, c, g, or t
  misc_feature (265)..(267): n is a, c, g, or t
  misc_feature (272)..(272): n is a, c, g, or t
  misc_feature (275)..(276): n is a, c, g, or t
  misc_feature (280)..(281): n is a, c, g, or t
  misc_feature (285)..(285): n is a, c, g, or t
  misc_feature (288)..(288): n is a, c, g, or t
  misc_feature (291)..(291): n is a, c, g, or t
  misc_feature (293)..(294): n is a, c, g, or t
  misc_feature (298)..(298): n is a, c, g, or t
  misc_feature (303)..(304): n is a, c, g, or t
  misc_feature (307)..(307): n is a, c, g, or t
  misc_feature (309)..(309): n is a, c, g, or t
  misc_feature (313)..(314): n is a, c, g, or t
  misc_feature (316)..(316): n is a, c, g, or t
  misc_feature (318)..(318): n is a, c, g, or t
  misc_feature (320)..(320): n is a, c, g, or t
  misc_feature (323)..(326): n is a, c, g, or t
  misc_feature (329)..(333): n is a, c, g, or t
  misc_feature (335)..(336): n is a, c, g, or t
  misc_feature (339)..(339): n is a, c, g, or t
  misc_feature (341)..(342): n is a, c, g, or t
  misc_feature (345)..(347): n is a, c, g, or t
  misc_feature (349)..(351): n is a, c, g, or t
  misc_feature (353)..(365): n is a, c, g, or t
  misc_feature (368)..(369): n is a, c, g, or t
  misc_feature (371)..(371): n is a, c, g, or t
  misc_feature (375)..(376): n is a, c, g, or t
  misc_feature (378)..(380): n is a, c, g, or t
  misc_feature (382)..(382): n is a, c, g, or t
  misc_feature (385)..(385): n is a, c, g, or t
  misc_feature (387)..(388): n is a, c, g, or t
  misc_feature (390)..(391): n is a, c, g, or t
  misc_feature (393)..(393): n is a, c, g, or t
  misc_feature (395)..(397): n is a, c, g, or t
  misc_feature (400)..(400): n is a, c, g, or t
  misc_feature (402)..(412): n is a, c, g, or t
  misc_feature (414)..(414): n is a, c, g, or t
  misc_feature (418)..(418): n is a, c, g, or t
  misc_feature (421)..(421): n is a, c, g, or t
  misc_feature (423)..(423): n is a, c, g, or t
  misc_feature (425)..(429): n is a, c, g, or t
  misc_feature (432)..(433): n is a, c, g, or t
  misc_feature (436)..(436): n is a, c, g, or t
  misc_feature (441)..(451): n is a, c, g, or t
  misc_feature (453)..(454): n is a, c, g, or t
  misc_feature (456)..(457): n is a, c, g, or t
  misc_feature (459)..(459): n is a, c, g, or t
  misc_feature (462)..(465): n is a, c, g, or t
  misc_feature (467)..(467): n is a, c, g, or t
  misc_feature (469)..(471): n is a, c, g, or t
  misc_feature (474)..(474): n is a, c, g, or t
  misc_feature (478)..(480): n is a, c, g, or t
  misc_feature (482)..(482): n is a, c, g, or t
  misc_feature (485)..(485): n is a, c, g, or t
  misc_feature (489)..(489): n is a, c, g, or t
  misc_feature (491)..(493): n is a, c, g, or t
  misc_feature (495)..(498): n is a, c, g, or t
  misc_feature (501)..(502): n is a, c, g, or t
  misc_feature (504)..(504): n is a, c, g, or t
  misc_feature (506)..(506): n is a, c, g, or t
  misc_feature (508)..(508): n is a, c, g, or t
  misc_feature (511)..(524): n is a, c, g, or t
  misc_feature (526)..(529): n is a, c, g, or t
  misc_feature (534)..(534): n is a, c, g, or t
  misc_feature (536)..(537): n is a, c, g, or t
  misc_feature (540)..(540): n is a, c, g, or t
  misc_feature (542)..(542): n is a, c, g, or t
  misc_feature (544)..(545): n is a, c, g, or t
  misc_feature (547)..(548): n is a, c, g, or t
  misc_feature (550)..(555): n is a, c, g, or t
  misc_feature (558)..(565): n is a, c, g, or t
  misc_feature (567)..(583): n is a, c, g, or t
  misc_feature (586)..(592): n is a, c, g, or t
  misc_feature (595)..(595): n is a, c, g, or t
  misc_feature (597)..(598): n is a, c, g, or t
  misc_feature (600)..(603): n is a, c, g, or t
  misc_feature (605)..(607): n is a, c, g, or t
  misc_feature (609)..(610): n is a, c, g, or t
  misc_feature (612)..(615): n is a, c, g, or t
  misc_feature (617)..(618): n is a, c, g, or t
  misc_feature (620)..(622): n is a, c, g, or t
  misc_feature (624)..(625): n is a, c, g, or t
  misc_feature (630)..(632): n is a, c, g, or t
  misc_feature (634)..(634): n is a, c, g, or t
  misc_feature (637)..(639): n is a, c, g, or t
  misc_feature (641)..(643): n is a, c, g, or t
  misc_feature (645)..(650): n is a, c, g, or t
  misc_feature (652)..(660): n is a, c, g, or t
  misc_feature (662)..(663): n is a, c, g, or t
  misc_feature (665)..(667): n is a, c, g, or t
  misc_feature (669)..(671): n is a, c, g, or t
  misc_feature (673)..(673): n is a, c, g, or t
  misc_feature (675)..(676): n is a, c, g, or t
  misc_feature (678)..(681): n is a, c, g, or t
  misc_feature (683)..(684): n is a, c, g, or t
  misc_feature (686)..(689): n is a, c, g, or t
  misc_feature (692)..(703): n is a, c, g, or t
  misc_feature (706)..(709): n is a, c, g, or t
  misc_feature (711)..(711): n is a, c, g, or t
  misc_feature (713)..(716): n is a, c, g, or t
  misc_feature (718)..(718): n is a, c, g, or t
  misc_feature (722)..(724): n is a, c, g, or t
  misc_feature (726)..(726): n is a, c, g, or t
  misc_feature (728)..(732): n is a, c, g, or t
  misc_feature (734)..(743): n is a, c, g, or t
  misc_feature (745)..(748): n is a, c, g, or t
  misc_feature (750)..(754): n is a, c, g, or t
  misc_feature (756)..(757): n is a, c, g, or t
  misc_feature (759)..(759): n is a, c, g, or t
  misc_feature (761)..(761): n is a, c, g, or t
  misc_feature (763)..(771): n is a, c, g, or t
  misc_feature (773)..(773): n is a, c, g, or t
  misc_feature (775)..(776): n is a, c, g, or t
  misc_feature (778)..(778): n is a, c, g, or t
  misc_feature (780)..(780): n is a, c, g, or t
  misc_feature (782)..(783): n is a, c, g, or t
  misc_feature (786)..(791): n is a, c, g, or t
  misc_feature (793)..(796): n is a, c, g, or t
  misc_feature (798)..(799): n is a, c, g, or t
  misc_feature (801)..(804): n is a, c, g, or t
  misc_feature (806)..(808): n is a, c, g, or t
  misc_feature (813)..(822): n is a, c, g, or t
  misc_feature (825)..(829): n is a, c, g, or t
  misc_feature (831)..(836): n is a, c, g, or t
  misc_feature (838)..(839): n is a, c, g, or t
  misc_feature (843)..(843): n is a, c, g, or t
  misc_feature (845)..(845): n is a, c, g, or t
  misc_feature (847)..(852): n is a, c, g, or t
  misc_feature (854)..(855): n is a, c, g, or t
  misc_feature (857)..(858): n is a, c, g, or t
  misc_feature (861)..(866): n is a, c, g, or t
  misc_feature (869)..(874): n is a, c, g, or t
  misc_feature (876)..(878): n is a, c, g, or t
  misc_feature (880)..(885): n is a, c, g, or t
  misc_feature (887)..(889): n is a, c, g, or t
  misc_feature (891)..(896): n is a, c, g, or t
  misc_feature (898)..(899): n is a, c, g, or t
  misc_feature (901)..(901): n is a, c, g, or t
  misc_feature (904)..(910): n is a, c, g, or t
  misc_feature (914)..(918): n is a, c, g, or t
  misc_feature (922)..(926): n is a, c, g, or t
  misc_feature (928)..(931): n is a, c, g, or t
  misc_feature (933)..(939): n is a, c, g, or t
  misc_feature (941)..(941): n is a, c, g, or t
  misc_feature (943)..(948): n is a, c, g, or t
  misc_feature (950)..(950): n is a, c, g, or t
  misc_feature (953)..(956): n is a, c, g, or t
  misc_feature (958)..(962): n is a, c, g, or t
  misc_feature (964)..(965): n is a, c, g, or t
  misc_feature (967)..(970): n is a, c, g, or t
  misc_feature (972)..(972): n is a, c, g, or t
  misc_feature (974)..(975): n is a, c, g, or t
  misc_feature (977)..(977): n is a, c, g, or t
  misc_feature (979)..(980): n is a, c, g, or t
  misc_feature (983)..(987): n is a, c, g, or t
  misc_feature (989)..(1002): n is a, c, g, or t
  misc_feature (1004)..(1010): n is a, c, g, or t
  misc_feature (1012)..(1012): n is a, c, g, or t
  misc_feature (1014)..(1017): n is a, c, g, or t
  misc_feature (1022)..(1031): n is a, c, g, or t
  misc_feature (1033)..(1033): n is a, c, g, or t
  misc_feature (1035)..(1037): n is a, c, g, or t
  misc_feature (1040)..(1040): n is a, c, g, or t
  misc_feature (1042)..(1042): n is a, c, g, or t
  misc_feature (1045)..(1048): n is a, c, g, or t
  misc_feature (1050)..(1051): n is a, c, g, or t
  misc_feature (1053)..(1053): n is a, c, g, or t
  misc_feature (1055)..(1056): n is a, c, g, or t
  misc_feature (1058)..(1058): n is a, c, g, or t
  misc_feature (1060)..(1068): n is a, c, g, or t
  misc_feature (1070)..(1070): n is a, c, g, or t
  misc_feature (1073)..(1077): n is a, c, g, or t
  misc_feature (1081)..(1081): n is a, c, g, or t
  misc_feature (1085)..(1090): n is a, c, g, or t
  misc_feature (1093)..(1101): n is a, c, g, or t
  misc_feature (1103)..(1103): n is a, c, g, or t
  misc_feature (1106)..(1111): n is a, c, g, or t
  misc_feature (1114)..(1114): n is a, c, g, or t
  misc_feature (1116)..(1116): n is a, c, g, or t
  misc_feature (1118)..(1119): n is a, c, g, or t
  misc_feature (1121)..(1122): n is a, c, g, or t
  misc_feature (1124)..(1125): n is a, c, g, or t
  misc_feature (1127)..(1128): n is a, c, g, or t
  misc_feature (1131)..(1132): n is a, c, g, or t
  misc_feature (1137)..(1137): n is a, c, g, or t
  misc_feature (1142)..(1142): n is a, c, g, or t
  misc_feature (1144)..(1145): n is a, c, g, or t
  misc_feature (1147)..(1151): n is a, c, g, or t
  misc_feature (1153)..(1153): n is a, c, g, or t
  misc_feature (1158)..(1159): n is a, c, g, or t
  misc_feature (1161)..(1162): n is a, c, g, or t
  misc_feature (1164)..(1167): n is a, c, g, or t
  misc_feature (1169)..(1171): n is a, c, g, or t
  misc_feature (1173)..(1174): n is a, c, g, or t
  misc_feature (1176)..(1177): n is a, c, g, or t
  misc_feature (1179)..(1181): n is a, c, g, or t
  misc_feature (1183)..(1183): n is a, c, g, or t
  misc_feature (1185)..(1185): n is a, c, g, or t
  misc_feature (1187)..(1188): n is a, c, g, or t
  misc_feature (1191)..(1191): n is a, c, g, or t
  misc_feature (1194)..(1195): n is a, c, g, or t
  misc_feature (1197)..(1199): n is a, c, g, or t
  misc_feature (1201)..(1203): n is a, c, g, or t
  misc_feature (1205)..(1205): n is a, c, g, or t
  misc_feature (1209)..(1211): n is a, c, g, or t
  misc_feature (1214)..(1214): n is a, c, g, or t
  misc_feature (1216)..(1216): n is a, c, g, or t
  misc_feature (1220)..(1220): n is a, c, g, or t
  misc_feature (1222)..(1228): n is a, c, g, or t
  misc_feature (1230)..(1235): n is a, c, g, or t
  misc_feature (1237)..(1237): n is a, c, g, or t
  misc_feature (1240)..(1242): n is a, c, g, or t
  misc_feature (1244)..(1245): n is a, c, g, or t
  misc_feature (1247)..(1252): n is a, c, g, or t
  misc_feature (1255)..(1258): n is a, c, g, or t
  misc_feature (1261)..(1263): n is a, c, g, or t
  misc_feature (1266)..(1271): n is a, c, g, or t
  misc_feature (1273)..(1277): n is a, c, g, or t
  misc_feature (1279)..(1279): n is a, c, g, or t
  misc_feature (1281)..(1284): n is a, c, g, or t
  misc_feature (1288)..(1288): n is a, c, g, or t
  misc_feature (1290)..(1295): n is a, c, g, or t
  misc_feature (1298)..(1298): n is a, c, g, or t
  misc_feature (1300)..(1301): n is a, c, g, or t
  misc_feature (1303)..(1304): n is a, c, g, or t
  misc_feature (1306)..(1308): n is a, c, g, or t
  misc_feature (1310)..(1311): n is a, c, g, or t
  misc_feature (1313)..(1314): n is a, c, g, or t
  misc_feature (1317)..(1322): n is a, c, g, or t
  misc_feature (1325)..(1328): n is a, c, g, or t
  misc_feature (1331)..(1334): n is a, c, g, or t
  misc_feature (1337)..(1337): n is a, c, g, or t
  misc_feature (1339)..(1339): n is a, c, g, or t
  misc_feature (1341)..(1344): n is a, c, g, or t
  misc_feature (1348)..(1348): n is a, c, g, or t
  misc_feature (1352)..(1354): n is a, c, g, or t
  misc_feature (1357)..(1361): n is a, c, g, or t
  misc_feature (1363)..(1363): n is a, c, g, or t
  misc_feature (1365)..(1366): n is a, c, g, or t
  misc_feature (1368)..(1369): n is a, c, g, or t
  misc_feature (1371)..(1371): n is a, c, g, or t
  misc_feature (1373)..(1373): n is a, c, g, or t
  misc_feature (1375)..(1376): n is a, c, g, or t
  misc_feature (1379)..(1385): n is a, c, g, or t
  misc_feature (1387)..(1387): n is a, c, g, or t
  misc_feature (1391)..(1392): n is a, c, g, or t
  misc_feature (1394)..(1394): n is a, c, g, or t
  misc_feature (1398)..(1398): n is a, c, g, or t
  misc_feature (1402)..(1403): n is a, c, g, or t
  misc_feature (1405)..(1407): n is a, c, g, or t
  misc_feature (1409)..(1412): n is a, c, g, or t
  misc_feature (1414)..(1415): n is a, c, g, or t
  misc_feature (1417)..(1420): n is a, c, g, or t
  misc_feature (1422)..(1426): n is a, c, g, or t
  misc_feature (1431)..(1436): n is a, c, g, or t
  misc_feature (1438)..(1438): n is a, c, g, or t
  misc_feature (1444)..(1445): n is a, c, g, or t
  misc_feature (1447)..(1448): n is a, c, g, or t
  misc_feature (1453)..(1453): n is a, c, g, or t
  misc_feature (1455)..(1460): n is a, c, g, or t
  misc_feature (1462)..(1465): n is a, c, g, or t
  misc_feature (1467)..(1467): n is a, c, g, or t
  misc_feature (1469)..(1470): n is a, c, g, or t
  misc_feature (1472)..(1472): n is a, c, g, or t
  misc_feature (1476)..(1477): n is a, c, g, or t
  misc_feature (1479)..(1479): n is a, c, g, or t
  misc_feature (1483)..(1484): n is a, c, g, or t
  misc_feature (1487)..(1487): n is a, c, g, or t
  misc_feature (1490)..(1491): n is a, c, g, or t
  misc_feature (1493)..(1493): n is a, c, g, or t
  misc_feature (1496)..(1496): n is a, c, g, or t
  misc_feature (1498)..(1499): n is a, c, g, or t
  misc_feature (1503)..(1503): n is a, c, g, or t
  misc_feature (1505)..(1514): n is a, c, g, or t
  misc_feature (1516)..(1517): n is a, c, g, or t
  misc_feature (1521)..(1526): n is a, c, g, or t
  misc_feature (1529)..(1529): n is a, c, g, or t
  misc_feature (1531)..(1531): n is a, c, g, or t
  misc_feature (1534)..(1536): n is a, c, g, or t
  misc_feature (1538)..(1543): n is a, c, g, or t
  misc_feature (1545)..(1547): n is a, c, g, or t
  misc_feature (1549)..(1551): n is a, c, g, or t
  misc_feature (1554)..(1554): n is a, c, g, or t
  misc_feature (1556)..(1557): n is a, c, g, or t
  misc_feature (1559)..(1560): n is a, c, g, or t
  misc_feature (1563)..(1564): n is a, c, g, or t
  misc_feature (1566)..(1566): n is a, c, g, or t
  misc_feature (1568)..(1571): n is a, c, g, or t
  misc_feature (1574)..(1576): n is a, c, g, or t
  misc_feature (1578)..(1580): n is a, c, g, or t
  misc_feature (1582)..(1583): n is a, c, g, or t
  misc_feature (1586)..(1586): n is a, c, g, or t
  misc_feature (1588)..(1590): n is a, c, g, or t
  misc_feature (1592)..(1593): n is a, c, g, or t
  misc_feature (1595)..(1596): n is a, c, g, or t
  misc_feature (1598)..(1598): n is a, c, g, or t
  misc_feature (1600)..(1605): n is a, c, g, or t
  misc_feature (1609)..(1610): n is a, c, g, or t
  misc_feature (1612)..(1615): n is a, c, g, or t
  misc_feature (1617)..(1618): n is a, c, g, or t
  misc_feature (1620)..(1620): n is a, c, g, or t
  misc_feature (1623)..(1627): n is a, c, g, or t
  misc_feature (1630)..(1630): n is a, c, g, or t
  misc_feature (1632)..(1634): n is a, c, g, or t
  misc_feature (1636)..(1638): n is a, c, g, or t
  misc_feature (1642)..(1642): n is a, c, g, or t
  misc_feature (1645)..(1645): n is a, c, g, or t
  misc_feature (1647)..(1650): n is a, c, g, or t
  misc_feature (1652)..(1653): n is a, c, g, or t
  misc_feature (1656)..(1656): n is a, c, g, or t
  misc_feature (1659)..(1673): n is a, c, g, or t
  misc_feature (1675)..(1684): n is a, c, g, or t
  misc_feature (1686)..(1691): n is a, c, g, or t
  misc_feature (1693)..(1693): n is a, c, g, or t
  misc_feature (1698)..(1698): n is a, c, g, or t
  misc_feature (1700)..(1702): n is a, c, g, or t
  misc_feature (1704)..(1705): n is a, c, g, or t
  misc_feature (1707)..(1709): n is a, c, g, or t
  misc_feature (1711)..(1711): n is a, c, g, or t
  misc_feature (1713)..(1714): n is a, c, g, or t
  misc_feature (1717)..(1723): n is a, c, g, or t
  misc_feature (1725)..(1728): n is a, c, g, or t
  misc_feature (1730)..(1731): n is a, c, g, or t
  misc_feature (1733)..(1733): n is a, c, g, or t
  misc_feature (1735)..(1737): n is a, c, g, or t
  misc_feature (1739)..(1742): n is a, c, g, or t
  misc_feature (1748)..(1748): n is a, c, g, or t
  misc_feature (1750)..(1758): n is a, c, g, or t
  misc_feature (1761)..(1761): n is a, c, g, or t
  misc_feature (1763)..(1763): n is a, c, g, or t
  misc_feature (1765)..(1766): n is a, c, g, or t
  misc_feature (1769)..(1771): n is a, c, g, or t
  misc_feature (1775)..(1776): n is a, c, g, or t
  misc_feature (1782)..(1792): n is a, c, g, or t
  misc_feature (1794)..(1806): n is a, c, g, or t
  misc_feature (1810)..(1816): n is a, c, g, or t
  misc_feature (1819)..(1819): n is a, c, g, or t
  misc_feature (1821)..(1824): n is a, c, g, or t
  misc_feature (1826)..(1828): n is a, c, g, or t
  misc_feature (1830)..(1837): n is a, c, g, or t
  misc_feature (1839)..(1842): n is a, c, g, or t
  misc_feature (1845)..(1851): n is a, c, g, or t
  misc_feature (1853)..(1853): n is a, c, g, or t
  misc_feature (1855)..(1855): n is a, c, g, or t
  misc_feature (1857)..(1864): n is a, c, g, or t
  misc_feature (1866)..(1866): n is a, c, g, or t
  misc_feature (1869)..(1869): n is a, c, g, or t
  misc_feature (1871)..(1873): n is a, c, g, or t
  misc_feature (1875)..(1875): n is a, c, g, or t
  misc_feature (1877)..(1878): n is a, c, g, or t
  misc_feature (1987)..(1987): n is a, c, g, or t
  misc_feature (1996)..(1996): n is a, c, g, or t
  misc_feature (3541)..(3542): n is a, c, g, or t
  misc_feature (3545)..(3545): n is a, c, g, or t
  misc_feature (3549)..(3550): n is a, c, g, or t
  misc_feature (3552)..(3552): n is a, c, g, or t
  misc_feature (3554)..(3564): n is a, c, g, or t
  misc_feature (3566)..(3570): n is a, c, g, or t
  misc_feature (3573)..(3576): n is a, c, g, or t
  misc_feature (3579)..(3583): n is a, c, g, or t
  misc_feature (3585)..(3587): n is a, c, g, or t
  misc_feature (3589)..(3591): n is a, c, g, or t
  misc_feature (3595)..(3596): n is a, c, g, or t
  misc_feature (3598)..(3598): n is a, c, g, or t
  misc_feature (3600)..(3600): n is a, c, g, or t
  misc_feature (3602)..(3602): n is a, c, g, or t
  misc_feature (3604)..(3607): n is a, c, g, or t
  misc_feature (3609)..(3611): n is a, c, g, or t
  misc_feature (3614)..(3614): n is a, c, g, or t
  misc_feature (3616)..(3617): n is a, c, g, or t
  misc_feature (3620)..(3620): n is a, c, g, or t
  misc_feature (3622)..(3622): n is a, c, g, or t
  misc_feature (3624)..(3625): n is a, c, g, or t
  misc_feature (3627)..(3627): n is a, c, g, or t
  misc_feature (3631)..(3632): n is a, c, g, or t
  misc_feature (3636)..(3636): n is a, c, g, or t
  misc_feature (3639)..(3639): n is a, c, g, or t
  misc_feature (3641)..(3642): n is a, c, g, or t
  misc_feature (3645)..(3649): n is a, c, g, or t
  misc_feature (3651)..(3657): n is a, c, g, or t
  misc_feature (3659)..(3663): n is a, c, g, or t
  misc_feature (3666)..(3668): n is a, c, g, or t
  misc_feature (3670)..(3675): n is a, c, g, or t
  misc_feature (3677)..(3683): n is a, c, g, or t
  misc_feature (3686)..(3690): n is a, c, g, or t
  misc_feature (3692)..(3696): n is a, c, g, or t
  misc_feature (3699)..(3702): n is a, c, g, or t
  misc_feature (3705)..(3707): n is a, c, g, or t
  misc_feature (3709)..(3710): n is a, c, g, or t
  misc_feature (3712)..(3728): n is a, c, g, or t
  misc_feature (3730)..(3732): n is a, c, g, or t
  misc_feature (3734)..(3735): n is a, c, g, or t
  misc_feature (3737)..(3737): n is a, c, g, or t
  misc_feature (3739)..(3740): n is a, c, g, or t
  misc_feature (3742)..(3743): n is a, c, g, or t
  misc_feature (3746)..(3747): n is a, c, g, or t
  misc_feature (3749)..(3752): n is a, c, g, or t
  misc_feature (3754)..(3754): n is a, c, g, or t
  misc_feature (3756)..(3756): n is a, c, g, or t
  misc_feature (3760)..(3761): n is a, c, g, or t
  misc_feature (3763)..(3764): n is a, c, g, or t
  misc_feature (3766)..(3771): n is a, c, g, or t
  misc_feature (3774)..(3774): n is a, c, g, or t
  misc_feature (3776)..(3780): n is a, c, g, or t
  misc_feature (3782)..(3784): n is a, c, g, or t
  misc_feature (3786)..(3787): n is a, c, g, or t
  misc_feature (3789)..(3790): n is a, c, g, or t
  misc_feature (3792)..(3805): n is a, c, g, or t
  misc_feature (3807)..(3813): n is a, c, g, or t
  misc_feature (3815)..(3817): n is a, c, g, or t
  misc_feature (3819)..(3821): n is a, c, g, or t
  misc_feature (3825)..(3825): n is a, c, g, or t
  misc_feature (3827)..(3827): n is a, c, g, or t
  misc_feature (3829)..(3829): n is a, c, g, or t
  misc_feature (3831)..(3836): n is a, c, g, or t
  misc_feature (3838)..(3843): n is a, c, g, or t
  misc_feature (3845)..(3845): n is a, c, g, or t
  misc_feature (3847)..(3851): n is a, c, g, or t
  misc_feature (3853)..(3853): n is a, c, g, or t
  misc_feature (3856)..(3858): n is a, c, g, or t
  misc_feature (3861)..(3863): n is a, c, g, or t
  misc_feature (3871)..(3874): n is a, c, g, or t
  misc_feature (3876)..(3878): n is a, c, g, or t
  misc_feature (3882)..(3882): n is a, c, g, or t
  misc_feature (3884)..(3886): n is a, c, g, or t
  misc_feature (3888)..(3891): n is a, c, g, or t
  misc_feature (3893)..(3893): n is a, c, g, or t
  misc_feature (3895)..(3898): n is a, c, g, or t
  misc_feature (3900)..(3901): n is a, c, g, or t
  misc_feature (3903)..(3908): n is a, c, g, or t
  misc_feature (3910)..(3911): n is a, c, g, or t
  misc_feature (3914)..(3921): n is a, c, g, or t
  misc_feature (3923)..(3926): n is a, c, g, or t
  misc_feature (3928)..(3930): n is a, c, g, or t
  misc_feature (3932)..(3932): n is a, c, g, or t
  misc_feature (3935)..(3935): n is a, c, g, or t
  misc_feature (3937)..(3937): n is a, c, g, or t
  misc_feature (3940)..(3941): n is a, c, g, or t
  misc_feature (3943)..(3944): n is a, c, g, or t
  misc_feature (3947)..(3947): n is a, c, g, or t
  misc_feature (3950)..(3950): n is a, c, g, or t
  misc_feature (3953)..(3954): n is a, c, g, or t
  misc_feature (3956)..(3962): n is a, c, g, or t
  misc_feature (3966)..(3966): n is a, c, g, or t
  misc_feature (3968)..(3969): n is a, c, g, or t
  misc_feature (3972)..(3975): n is a, c, g, or t
  misc_feature (3977)..(3977): n is a, c, g, or t
  misc_feature (3979)..(3979): n is a, c, g, or t
  misc_feature (3981)..(3983): n is a, c, g, or t
  misc_feature (3986)..(3988): n is a, c, g, or t
  misc_feature (3990)..(3991): n is a, c, g, or t
  misc_feature (3993)..(3994): n is a, c, g, or t
  misc_feature (3996)..(4000): n is a, c, g, or t
ngntngagnngtnnggnnnnnnnnncncnnancnnnnnnngncncctnncngatnntncncncnnccancnncnttncnancngcnccgnntntcnncnnncggnnncgntccnantcacgnnnnnnagntatnannnnnnnntagnnnntnngannagnnnnntnnnnntgnnntatnngnnngacnnncangctnnnngnnnntnnnncnagcttgngnannnnnngnatngngnnnncntcnnnngannggngnnnnnnncnnngaagnagnnatcnnaganagngangnngcanagggnnaanangaanncnangnagnnnncannnnngnnganannctnnnannngnnnnnnnnnnnnnagnngnggtnncnnncnttngnntnngntnnnttncnnnnnnnnnnncncgtnttncncnnnnntcnnacnccttnnnnnnnnnnncnncnncntgnnnntntnnnctntgtnnntnacntttncnnntnnnnacnnangntnttnnnnnnnnnnnnnngnnnntgagnannggnangnngnngnnnnnnatnnnnnnnngnnnnnnnnnnnnnnnnnaannnnnnntancnngnnnnannnannannnncnnannntnnagacnnngnatnnngnnncnnnnnncnnnnnnnnnanncnnntnnngncnnannnnanngnnnnctnnnnnnnnnnnnggnnnncncnnnntncgannngnannnnnannnnnnnnnntnnnntnnnnngnnanantnnnnnnnnntngnngntnannaannnnnntnnnngnnannnnannnacgtnnnnnnnnnnaannnnncnnnnnncnncacnancnnnnnngnnannacnnnnnncgnnnnnntnnnannnnnnannngnnnnnncnngngtnnnnnnnggannnnntgannnnnannnngnnnnnnngntnnnnnntnagnnnntnnnnncnntnnnnananntngnnagnnnnnannnnnnnnnnnnnnannnnnnntngnnnnaaacnnnnnnnnnngnannnaancngannnngnngnannanannnnnnnnngnggnnnnngacngtgnnnnnnggnnnnnnnnntngannnnnngcnangnnanngnncnncanncagcngcgtngnncnnnnncnacccnngnngnnnngnnncnncnncnnntncntnnaancanncnnncnnncntcannncananccantnnnnnnncnnnnnnanccnnngnncnnnnnngtnnnngtnnncgnnnnnngnnnnntntnnnngganannnnnnagnannanngnnnanntnnaannnnnntgnnnnaannnnaanantnnnncgcnaacnnnacnnnnntncnncnnanancnnacnnnnnnncnaccnncnctancatnntnnnannnncnnannnncnnnnncaggnnnnnngnagaggnngnnggagntnnnnnnannnngngnnanaggnnancggnnagngannangtnannaggnannnnnnnnnncnncaannnnnncancnggnnntnnnnnntnnngnnngtngnngnntcnntngnnnngtnnnannntnncgngnnngnnannancnnnnnnagtnngnnnntnnanaannnnntcngnnngnnnaaanatntnnnngnnttnaannnnnnnnnnnnnnngnnnnnnnnnntnnnnnngntgctngnnntnncnnngntnnccnnnnnnntnnnngnntncnnngnnnnggtagngnnnnnnnnncancngnngannnactnnttcatnnnnnnnnnnncnnnnnnnnnnnnnagannnnnnnggntnnnnannnannnnnnnngnnnngannnnnnntnantnnnnnnnnantancnnngncnnaccgcccactagcatctaaatcgcgtcgatgatatagtttagatgagcgcgtagtgtcatggctgcaggataggacatgtcgcgggggacaccgatgcggtcgcgaagntagaccagncattttgcaacatccttcccatcctggcttgtttcagcggtggaagcaccggcagatccatcgagcagcagggaaacggtggtacgcagcaacttatccaccttatccttatagttcaggttcggcactgcagtagggtccgccaggggagctccaaactgcttggctcctcgctcacccatgcctcggcaacaaaactttacaattgcgtcgtagtttgaaacgagcttgtaagccgcctcgtggcgagcagcttcatccccaggattcattgaatcaggtagaggttccgcatcactgggagacagattcagcggaagcctccaggtagagagcccgtcaatatttagctgtgcttgcttggctgcttcacttgagtctccatatcccggcccgtactggggaggtatgtccatcacgtgagtgtagtaatccgattttgtagccatgtaacaaggcctctcttcgaaagctgcaaaccacctttcgacgtttgcccatcgctcagtggaccggagctggaggcctttccagtacaggcacgacgcgttcatcctttcaacatgtgaaacatattgcaagtcgacgatagaaggagtgtcaccgccaaggaaccagggccccggtaattctcccaacgcttcgttcaccttgtcaaacgtttcctcgaattgttttctggctccaccgccaaacggtcccggtcccgaagggcgaaacacaagtccacaccagtcagaaaacagctgcctttcgaggcgaagaagcgtgttggcgcggtcgaagtgttcctctggaatcatcggaatctcaggaaacgtctgctcaagtatctgcattatgacgagagattcggtgatcatctttccgtccagctccaggacagggagcaacccagaaggcaccttcttgaggaaccaagcaggcttgtccccataactgcgcatgtttatccgctcgattcgataaggaatcttcttctcctcgagcatcatccatactttctgacaataaggacaccaagctgcgtgatctctgtagaacgtcactttgacatcatcctcagacgcaccaaagagtcgcaatttggcagtcacgtggggagcaccttcacctttagcacgcagtttctcctcttcggcaatcttctttccggtctcggtactcactgcgatccctttcagctcgtccctggagaaagtgcagagagctcagcacggacgcgtgatgctacaaaaacgcgggatgcattatctaaggatgaattaccagctgagaaccttctccgggaggacggcagtcgtcgcggctgctcgtaagggaaaactcatatttcgagatgaccgggagctcttcgtcactcgtgtggcgtttgcgctgtaaccctttgtccaggtcaagggctgtgcgcatatgctgggcatggacatggacagtcacgctcgcctcgatttcacgctcgcctcgatttcaagtggcatgtattgtgagtgcagcatcaggagggaaagcagataagttttgcgcacgtgtcgaattttggtnntanaaanntnannnnnnnnnnncnnnnngannnncgnnnnnannntnnntgcnncntncntnnnntnnntcnannagnantnntngttnnctgngtngnnggnnnnnannnnnnngnnnnngannngnnnnnngnnnnnnnctnnnnncnnnnngtnnnncannngnngnnnnnnnnnnnnnnnnnannncnncncnncnnccnncnnnncntntatnntnnannnnnncancnnnnnannngnngnngnnnnnnnnnnnnnngnnnnnnngnnnannnaatnancncnnnnnncnnnnnngngnnnnncnacnnncgnnncgccgtcnnnngnnntgangnnntnnnngnannnngnncnnnnnncnngannnnnnnngnnnncnnngntgntngcnncnnccnccnccnngnnnnnnncctncnncgnnnngncntnnnagnnngnngnnannnnn

SEQ ID NO: 991 - DNA, 4000 bp, Escherichia coli
  misc_feature (491)..(491): n is a, c, g, or t
  misc_feature (2048)..(2048): n is a, c, g, or t
  misc_feature (2161)..(2161): n is a, c, g, or t
  misc_feature (2175)..(2175): n is a, c, g, or t
  misc_feature (2183)..(2183): n is a, c, g, or t
  misc_feature (2191)..(2192): n is a, c, g, or t
  misc_feature (2195)..(2197): n is a, c, g, or t
  misc_feature (2201)..(2204): n is a, c, g, or t
  misc_feature (2207)..(2208): n is a, c, g, or t
  misc_feature (2210)..(2214): n is a, c, g, or t
  misc_feature (2224)..(2224): n is a, c, g, or t
  misc_feature (2228)..(2229): n is a, c, g, or t
  misc_feature (2232)..(2235): n is a, c, g, or t
  misc_feature (2238)..(2239): n is a, c, g, or t
  misc_feature (2246)..(2247): n is a, c, g, or t
  misc_feature (2254)..(2255): n is a, c, g, or t
  misc_feature (2257)..(2258): n is a, c, g, or t
  misc_feature (2260)..(2261): n is a, c, g, or t
  misc_feature (2266)..(2266): n is a, c, g, or t
  misc_feature (2271)..(2272): n is a, c, g, or t
  misc_feature (2277)..(2277): n is a, c, g, or t
  misc_feature (2279)..(2281): n is a, c, g, or t
  misc_feature (2288)..(2288): n is a, c, g, or t
  misc_feature (2290)..(2292): n is a, c, g, or t
  misc_feature (2299)..(2299): n is a, c, g, or t
  misc_feature (2312)..(2312): n is a, c, g, or t
  misc_feature (2315)..(2316): n is a, c, g, or t
  misc_feature (2322)..(2322): n is a, c, g, or t
  misc_feature (2325)..(2325): n is a, c, g, or t
  misc_feature (2332)..(2338): n is a, c, g, or t
  misc_feature (2343)..(2344): n is a, c, g, or t
  misc_feature (2349)..(2349): n is a, c, g, or t
  misc_feature (2352)..(2352): n is a, c, g, or t
  misc_feature (2359)..(2359): n is a, c, g, or t
  misc_feature (2365)..(2365): n is a, c, g, or t
  misc_feature (2377)..(2379): n is a, c, g, or t
  misc_feature (2390)..(2392): n is a, c, g, or t
  misc_feature (2394)..(2394): n is a, c, g, or t
  misc_feature (2399)..(2399): n is a, c, g, or t
  misc_feature (2401)..(2401): n is a, c, g, or t
  misc_feature (2404)..(2404): n is a, c, g, or t
  misc_feature (2407)..(2407): n is a, c, g, or t
  misc_feature (2416)..(2417): n is a, c, g, or t
  misc_feature (2422)..(2422): n is a, c, g, or t
  misc_feature (2427)..(2427): n is a, c, g, or t
  misc_feature (2431)..(2431): n is a, c, g, or t
  misc_feature (2434)..(2434): n is a, c, g, or t
  misc_feature (2436)..(2437): n is a, c, g, or t
  misc_feature (2442)..(2442): n is a, c, g, or t
  misc_feature (2458)..(2460): n is a, c, g, or t
  misc_feature (2466)..(2466): n is a, c, g, or t
  misc_feature (2468)..(2470): n is a, c, g, or t
  misc_feature (2472)..(2472): n is a, c, g, or t
  misc_feature (2475)..(2475): n is a, c, g, or t
  misc_feature (2477)..(2480): n is a, c, g, or t
  misc_feature (2485)..(2489): n is a, c, g, or t
  misc_feature (2496)..(2497): n is a, c, g, or t
  misc_feature (2518)..(2521): n is a, c, g, or t
  misc_feature (2527)..(2529): n is a, c, g, or t
  misc_feature (2531)..(2534): n is a, c, g, or t
  misc_feature (2537)..(2541): n is a, c, g, or t
  misc_feature (2543)..(2544): n is a, c, g, or t
  misc_feature (2553)..(2553): n is a, c, g, or t
  misc_feature (2556)..(2568): n is a, c, g, or t
  misc_feature (2572)..(2572): n is a, c, g, or t
  misc_feature (2575)..(2575): n is a, c, g, or t
  misc_feature (2581)..(2581): n is a, c, g, or t
  misc_feature (2586)..(2587): n is a, c, g, or t
  misc_feature (2594)..(2596): n is a, c, g, or t
  misc_feature (2602)..(2609): n is a, c, g, or t
  misc_feature (2612)..(2612): n is a, c, g, or t
  misc_feature (2616)..(2618): n is a, c, g, or t
  misc_feature (2621)..(2624): n is a, c, g, or t
  misc_feature (2626)..(2627): n is a, c, g, or t
  misc_feature (2630)..(2630): n is a, c, g, or t
  misc_feature (2637)..(2640): n is a, c, g, or t
  misc_feature (2644)..(2644): n is a, c, g, or t
  misc_feature (2648)..(2648): n is a, c, g, or t
  misc_feature (2651)..(2652): n is a, c, g, or t
  misc_feature (2655)..(2655): n is a, c, g, or t
  misc_feature (2658)..(2658): n is a, c, g, or t
  misc_feature (2663)..(2664): n is a, c, g, or t
  misc_feature (2667)..(2670): n is a, c, g, or t
  misc_feature (2676)..(2676): n is a, c, g, or t
  misc_feature (2681)..(2681): n is a, c, g, or t
  misc_feature (2685)..(2689): n is a, c, g, or t
  misc_feature (2691)..(2691): n is a, c, g, or t
  misc_feature (2693)..(2694): n is a, c, g, or t
  misc_feature (2697)..(2698): n is a, c, g, or t
  misc_feature (2700)..(2700): n is a, c, g, or t
  misc_feature (2702)..(2702): n is a, c, g, or t
  misc_feature (2704)..(2704): n is a, c, g, or t
  misc_feature (2709)..(2709): n is a, c, g, or t
  misc_feature (2712)..(2718): n is a, c, g, or t
  misc_feature (2722)..(2722): n is a, c, g, or t
  misc_feature (2725)..(2725): n is a, c, g, or t
  misc_feature (2730)..(2730): n is a, c, g, or t
  misc_feature (2733)..(2734): n is a, c, g, or t
  misc_feature (2740)..(2742): n is a, c, g, or t
  misc_feature (2745)..(2748): n is a, c, g, or t
  misc_feature (2754)..(2755): n is a, c, g, or t
  misc_feature (2760)..(2762): n is a, c, g, or t
  misc_feature (2766)..(2767): n is a, c, g, or t
  misc_feature (2774)..(2774): n is a, c, g, or t
  misc_feature (2777)..(2778): n is a, c, g, or t
  misc_feature (2781)..(2784): n is a, c, g, or t
  misc_feature (2789)..(2791): n is a, c, g, or t
  misc_feature (2796)..(2799): n is a, c, g, or t
  misc_feature (2802)..(2802): n is a, c, g, or t
  misc_feature (2805)..(2807): n is a, c, g, or t
  misc_feature (2809)..(2809): n is a, c, g, or t
  misc_feature (2821)..(2821): n is a, c, g, or t
  misc_feature (2823)..(2823): n is a, c, g, or t
  misc_feature (2826)..(2826): n is a, c, g, or t
  misc_feature (2831)..(2833): n is a, c, g, or t
  misc_feature (2838)..(2842): n is a, c, g, or t
  misc_feature (2846)..(2847): n is a, c, g, or t
  misc_feature (2852)..(2854): n is a, c, g, or t
  misc_feature (2861)..(2861): n is a, c, g, or t
  misc_feature (2864)..(2864): n is a, c, g, or t
  misc_feature (2868)..(2871): n is a, c, g, or t
  misc_feature (2874)..(2874): n is a, c, g, or t
  misc_feature (2877)..(2877): n is a, c, g, or t
  misc_feature (2879)..(2879): n is a, c, g, or t
  misc_feature (2881)..(2884): n is a, c, g, or t
  misc_feature (2887)..(2887): n is a, c, g, or t
  misc_feature (2891)..(2891): n is a, c, g, or t
  misc_feature (2895)..(2896): n is a, c, g, or t
  misc_feature (2903)..(2904): n is a, c, g, or t
  misc_feature (2906)..(2908): n is a, c, g, or t
  misc_feature (2912)..(2912): n is a, c, g, or t
  misc_feature (2917)..(2918): n is a, c, g, or t
  misc_feature (2923)..(2930): n is a, c, g, or t
  misc_feature (2937)..(2937): n is a, c, g, or t
  misc_feature (2942)..(2943): n is a, c, g, or t
  misc_feature (2948)..(2959): n is a, c, g, or t
  misc_feature (2965)..(2965): n is a, c, g, or t
  misc_feature (2968)..(2968): n is a, c, g, or t
  misc_feature (2972)..(2975): n is a, c, g, or t
  misc_feature (2979)..(2980): n is a, c, g, or t
  misc_feature (2982)..(2982): n is a, c, g, or t
  misc_feature (2985)..(2985): n is a, c, g, or t
  misc_feature (2988)..(2998): n is a, c, g, or t
  misc_feature (3000)..(3002): n is a, c, g, or t
  misc_feature (3005)..(3005): n is a, c, g, or t
  misc_feature (3009)..(3009): n is a, c, g, or t
  misc_feature (3011)..(3011): n is a, c, g, or t
  misc_feature (3013)..(3014): n is a, c, g, or t
  misc_feature (3018)..(3018): n is a, c, g, or t
  misc_feature (3021)..(3021): n is a, c, g, or t
  misc_feature (3024)..(3024): n is a, c, g, or t
  misc_feature (3026)..(3026): n is a, c, g, or t
  misc_feature (3028)..(3029): n is a, c, g, or t
  misc_feature (3031)..(3031): n is a, c, g, or t
  misc_feature (3035)..(3035): n is a, c, g, or t
  misc_feature (3039)..(3039): n is a, c, g, or t
  misc_feature (3042)..(3042): n is a, c, g, or t
  misc_feature (3045)..(3045): n is a, c, g, or t
  misc_feature (3047)..(3047): n is a, c, g, or t
  misc_feature (3052)..(3052): n is a, c, g, or t
  misc_feature (3054)..(3055): n is a, c, g, or t
  misc_feature (3058)..(3060): n is a, c, g, or t
  misc_feature (3063)..(3063): n is a, c, g, or t
  misc_feature (3080)..(3080): n is a, c, g, or t
  misc_feature (3085)..(3085): n is a, c, g, or t
  misc_feature (3087)..(3088): n is a, c, g, or t
  misc_feature (3092)..(3094): n is a, c, g, or t
  misc_feature (3099)..(3100): n is a, c, g, or t
  misc_feature (3103)..(3104): n is a, c, g, or t
  misc_feature (3116)..(3116): n is a, c, g, or t
  misc_feature (3119)..(3124): n is a, c, g, or t
  misc_feature (3128)..(3128): n is a, c, g, or t
  misc_feature (3131)..(3132): n is a, c, g, or t
  misc_feature (3139)..(3142): n is a, c, g, or t
  misc_feature (3145)..(3146): n is a, c, g, or t
  misc_feature (3149)..(3149): n is a, c, g, or t
  misc_feature (3152)..(3153): n is a, c, g, or t
  misc_feature (3157)..(3157): n is a, c, g, or t
  misc_feature (3159)..(3160): n is a, c, g, or t
  misc_feature (3162)..(3163): n is a, c, g, or t
  misc_feature (3167)..(3167): n is a, c, g, or t
  misc_feature (3170)..(3172): n is a, c, g, or t
  misc_feature (3176)..(3176): n is a, c, g, or t
  misc_feature (3182)..(3185): n is a, c, g, or t
  misc_feature (3189)..(3189): n is a, c, g, or t
  misc_feature (3191)..(3193): n is a, c, g, or t
  misc_feature (3197)..(3197): n is a, c, g, or t
  misc_feature (3202)..(3202): n is a, c, g, or t
  misc_feature (3204)..(3204): n is a, c, g, or t
  misc_feature (3208)..(3208): n is a, c, g, or t
  misc_feature (3211)..(3212): n is a, c, g, or t
  misc_feature (3216)..(3220): n is a, c, g, or t
  misc_feature (3224)..(3224): n is a, c, g, or t
  misc_feature (3227)..(3227): n is a, c, g, or t
  misc_feature (3230)..(3230): n is a, c, g, or t
  misc_feature (3235)..(3235): n is a, c, g, or t
  misc_feature (3239)..(3239): n is a, c, g, or t
  misc_feature (3241)..(3243): n is a, c, g, or t
  misc_feature (3245)..(3245): n is a, c, g, or t
  misc_feature (3249)..(3250): n is a, c, g, or t
  misc_feature (3256)..(3256): n is a, c, g, or t
  misc_feature (3260)..(3260): n is a, c, g, or t
  misc_feature (3270)..(3271): n is a, c, g, or t
  misc_feature (3274)..(3276): n is a, c, g, or t
  misc_feature (3280)..(3280): n is a, c, g, or t
  misc_feature (3283)..(3284): n is a, c, g, or t
  misc_feature (3288)..(3288): n is a, c, g, or t
  misc_feature (3301)..(3301): n is a, c, g, or t
  misc_feature (3307)..(3308): n is a, c, g, or t
  misc_feature (3311)..(3311): n is a, c, g, or t
  misc_feature (3314)..(3315): n is a, c, g, or t
  misc_feature (3321)..(3321): n is a, c, g, or t
  misc_feature (3324)..(3324): n is a, c, g, or t
  misc_feature (3328)..(3328): n is a, c, g, or t
  misc_feature (3331)..(3331): n is a, c, g, or t
  misc_feature (3335)..(3335): n is a, c, g, or t
  misc_feature (3338)..(3341): n is a, c, g, or t
  misc_feature (3344)..(3345): n is a, c, g, or t
  misc_feature (3347)..(3348): n is a, c, g, or t
  misc_feature (3354)..(3354): n is a, c, g, or t
  misc_feature (3359)..(3359): n is a, c, g, or t
  misc_feature (3362)..(3363): n is a, c, g, or t
  misc_feature (3368)..(3371): n is a, c, g, or t
  misc_feature (3376)..(3377): n is a, c, g, or t
  misc_feature (3381)..(3381): n is a, c, g, or t
  misc_feature (3386)..(3388): n is a, c, g, or t
  misc_feature (3392)..(3392): n is a, c, g, or t
  misc_feature (3395)..(3396): n is a, c, g, or t
  misc_feature (3402)..(3402): n is a, c, g, or t
  misc_feature (3407)..(3408): n is a, c, g, or t
  misc_feature (3412)..(3413): n is a, c, g, or t
  misc_feature (3418)..(3418): n is a, c, g, or t
  misc_feature (3422)..(3422): n is a, c, g, or t
  misc_feature (3427)..(3430): n is a, c, g, or t
  misc_feature (3434)..(3434): n is a, c, g, or t
  misc_feature (3436)..(3441): n is a, c, g, or t
  misc_feature (3444)..(3444): n is a, c, g, or t
  misc_feature (3448)..(3450): n is a, c, g, or t
  misc_feature (3454)..(3456): n is a, c, g, or t
  misc_feature (3458)..(3458): n is a, c, g, or t
  misc_feature (3462)..(3462): n is a, c, g, or t
  misc_feature (3465)..(3466): n is a, c, g, or t
  misc_feature (3470)..(3470): n is a, c, g, or t
  misc_feature (3472)..(3472): n is a, c, g, or t
  misc_feature (3474)..(3474): n is a, c, g, or t
  misc_feature (3476)..(3476): n is a, c, g, or t
  misc_feature (3480)..(3480): n is a, c, g, or t
  misc_feature (3484)..(3485): n is a, c, g, or t
  misc_feature (3488)..(3489): n is a, c, g, or t
  misc_feature (3494)..(3494): n is a, c, g, or t
  misc_feature (3498)..(3498): n is a, c, g, or t
  misc_feature (3502)..(3503): n is a, c, g, or t
  misc_feature (3506)..(3507): n is a, c, g, or t
  misc_feature (3510)..(3511): n is a, c, g, or t
  misc_feature (3518)..(3519): n is a, c, g, or t
  misc_feature (3523)..(3523): n is a, c, g, or t
  misc_feature (3528)..(3528): n is a, c, g, or t
  misc_feature (3533)..(3533): n is a, c, g, or t
  misc_feature (3536)..(3536): n is a, c, g, or t
  misc_feature (3538)..(3538): n is a, c, g, or t
  misc_feature (3540)..(3540): n is a, c, g, or t
  misc_feature (3543)..(3544): n is a, c, g, or t
  misc_feature (3547)..(3547): n is a, c, g, or t
  misc_feature (3549)..(3549): n is a, c, g, or t
  misc_feature (3553)..(3554): n is a, c, g, or t
  misc_feature (3557)..(3557): n is a, c, g, or t
  misc_feature (3559)..(3559): n is a, c, g, or t
  misc_feature (3565)..(3565): n is a, c, g, or t
  misc_feature (3567)..(3568): n is a, c, g, or t
  misc_feature (3572)..(3572): n is a, c, g, or t
  misc_feature (3574)..(3576): n is a, c, g, or t
  misc_feature (3583)..(3583): n is a, c, g, or t
  misc_feature (3585)..(3585): n is a, c, g, or t
  misc_feature (3588)..(3589): n is a, c, g, or t
  misc_feature (3593)..(3593): n is a, c, g, or t
  misc_feature (3598)..(3598): n is a, c, g, or t
  misc_feature (3605)..(3608): n is a, c, g, or t
  misc_feature (3610)..(3613): n is a, c, g, or t
  misc_feature (3618)..(3618): n is a, c, g, or t
  misc_feature (3621)..(3621): n is a, c, g, or t
  misc_feature (3627)..(3627): n is a, c, g, or t
  misc_feature (3630)..(3630): n is a, c, g, or t
  misc_feature (3635)..(3637): n is a, c, g, or t
  misc_feature (3642)..(3645): n is a, c, g, or t
  misc_feature (3649)..(3652): n is a, c, g, or t
  misc_feature (3656)..(3656): n is a, c, g, or t
  misc_feature (3659)..(3659): n is a, c, g, or t
  misc_feature (3669)..(3669): n is a, c, g, or t
  misc_feature (3671)..(3671): n is a, c, g, or t
  misc_feature (3674)..(3679): n is a, c, g, or t
  misc_feature (3683)..(3683): n is a, c, g, or t
  misc_feature (3692)..(3692): n is a, c, g, or t
  misc_feature (3696)..(3696): n is a, c, g, or t
  misc_feature (3700)..(3700): n is a, c, g, or t
  misc_feature (3703)..(3708): n is a, c, g, or t
  misc_feature (3711)..(3713): n is a, c, g, or t
  misc_feature (3716)..(3717): n is a, c, g, or t
  misc_feature (3719)..(3721): n is a, c, g, or t
  misc_feature (3727)..(3729): n is a, c, g, or t
  misc_feature (3732)..(3734): n is a, c, g, or t
  misc_feature (3738)..(3738): n is a, c, g, or t
  misc_feature (3741)..(3741): n is a, c, g, or t
  misc_feature (3749)..(3754): n is a, c, g, or t
  misc_feature (3757)..(3757): n is a, c, g, or t
  misc_feature (3762)..(3763): n is a, c, g, or t
  misc_feature (3766)..(3768): n is a, c, g, or t
  misc_feature (3775)..(3778): n is a, c, g, or t
  misc_feature (3785)..(3787): n is a, c, g, or t
  misc_feature (3790)..(3790): n is a, c, g, or t
  misc_feature (3793)..(3794): n is a, c, g, or t
  misc_feature (3801)..(3803): n is a, c, g, or t
  misc_feature (3807)..(3807): n is a, c, g, or t
  misc_feature (3812)..(3816): n is a, c, g, or t
  misc_feature (3819)..(3819): n is a, c, g, or t
  misc_feature (3822)..(3825): n is a, c, g, or t
  misc_feature (3827)..(3827): n is a, c, g, or t
  misc_feature (3833)..(3834): n is a, c, g, or t
  misc_feature (3838)..(3839): n is a, c, g, or t
  misc_feature (3843)..(3846): n is a, c, g, or t
  misc_feature (3849)..(3849): n is a, c, g, or t
  misc_feature (3859)..(3861): n is a, c, g, or t
  misc_feature (3867)..(3867): n is a, c, g, or t
  misc_feature (3872)..(3873): n is a, c, g, or t
  misc_feature (3875)..(3875): n is a, c, g, or t
  misc_feature (3879)..(3881): n is a, c, g, or t
  misc_feature (3884)..(3888): n is a, c, g, or t
  misc_feature (3891)..(3893): n is a, c, g, or t
  misc_feature (3896)..(3896): n is a, c, g, or t
  misc_feature (3903)..(3905): n is a, c, g, or t
  misc_feature (3907)..(3907): n is a, c, g, or t
  misc_feature (3912)..(3913): n is a, c, g, or t
  misc_feature (3916)..(3917): n is a, c, g, or t
  misc_feature (3926)..(3928): n is a, c, g, or t
  misc_feature (3932)..(3932): n is a, c, g, or t
  misc_feature (3934)..(3935): n is a, c, g, or t
  misc_feature (3938)..(3939): n is a, c, g, or t
  misc_feature (3942)..(3942): n is a, c, g, or t
  misc_feature (3948)..(3948): n is a, c, g, or t
  misc_feature (3953)..(3953): n is a, c, g, or t
  misc_feature (3956)..(3956): n is a, c, g, or t
  misc_feature (3959)..(3959): n is a, c, g, or t
  misc_feature (3963)..(3969): n is a, c, g, or t
  misc_feature (3977)..(3977): n is a, c, g, or t
  misc_feature (3980)..(3980): n is a, c, g, or t
  misc_feature (3987)..(3990): n is a, c, g, or t
  misc_feature (3993)..(3994): n is a, c, g, or t
  misc_feature (3999)..(4000): n is a, c, g, or t
tgaggttattcattcttacagcttatcgacaaaacgaaaccgaccattgaagaaactttcagtgcatttctccaacagtcagccctattcagtttgtttatctcatcaggaacgagaaacggtctacattattcaatgctatacccgctcccttggcaacactgtgcaatgggtcttcagccacatggaacggaatgttaatcttatcggtcaaacgcttgtcaattccacgtaacaaagcaccgccaccactcaaatagatgccattctttactatatcggcatacaattcaggcggtgtattctccaaagcagaaagaactgcattctctatttttgccacagtcttgtccaaacaatgcgctatttcctgatagcagactggtacctccattggcaacgccgtgatacggtttggcccgtgaacgatataatcctccggagcctcgtctcctaaatcggtcaaagccgaaccgacgtgcaccttaatncgttccgccatacgctcgctgacgcgaacattgtgttggcggctcatatattcctgaatatcagcagtaaggtcgtcgccagcaacacgaatagagttattgcaaacgataccacctaacgaaataacagctatttctgtactaccgccaccaatatcaactatcatatttccttcaggtgcctctacgtcaagccccataccaagagcagctgccattggctcgaagataagataaacatcgcgcccatcggcatgttcggcagagtcgcggactgcacgcagttctacttcggtagacccagaaggtacaccaatcaccatacgcaaagacggagagaacaagcgattaccactatgcaccatcttaataagtcccctcatcatttgttcgcatgccgtaaagtcggcaatcacaccatctcgaagtgggcgaatggtacgaatattggggtgttccttctcatacatcatcttggcgtcgttgccaacggctatcatcttgtccgtgcggcggtcgagtgctactactgaaggttcatcaacaactatcttatcatcactgataatgatagtatttgctgttcccaggtccattgctatttcctggataaatgaaaaaaatcccattctaaaatatttgatatgtggtgaaaacggggacaatccccatcgtcattttattattttctttcttatatgcttgccatctacaaacgcttacggtctgcaaacactgtttttacttacttcgcaaaccaattatgtattgccgtatcgtaccgactggtaaccgcaaacgcacgctctgcaaacattttccggtcttcgagtcctgtctttgcaccctgcttgttcagcagttgcaacaacacagggtattctgccttgcttggaataatgacaacatcattgaaattctttgcacctgcacgtatcaaagaaatgccgccaatatcgattttttcgataacatcagcttcgcttgcaccgcttgctacggtttgttcaaatggatacaaatcaacaacaaccaaatcaattgccggaatttcgtattcagccatttctttccgatcgttctcaagtgcacgacgtgccaaaatcccaccgaatatcttggggtgcaatgtttttacacgaccacccaagatagaaggataagtagttatatcttcaactttctgacattcatagcctaaagactctataaactgctgcgtaccaccagtactaaggaatttcacgccctcatcgttcagtttctttaaaatatcttccaaaccatctttgtggaatacggagattaaagcagtcttaatttcttttgtatcaaccatagttgcctactgtttcaatttgttttgcaaagatacaaaatagtgcaataagcaaacaagatttttagataaaaaaactttaattcagctacattattaatcaacatcaacattaaaggtgtccatttctgagtttacaatattgcgaattatttataaactgaatgtaaagatactaattcgcaaagacaaaatagcatttcggagaacctatttgnaattcttggagcagtagaaaaatactgcgaacaagcatttcgattcagctttctgaataaaagagtgtcttttattcgttgcatagcttcgcctgcataccttattatatatngaaaaataagacancaaaagtntaaaaaannttnnnaaannnnccnntnnnnnaaccaattanttannaannnnttnnaaaaccnnttatttnntnncnnaaaanaaccnnttttntnnntaaaaancnnnggttttncctcgccaaacanccnntttcgnaangccaaannnnnnncatcnnttttnaanaaaattntatttncaaattcaaggnnnttttttattcnnngntttcngnaanaanaagaaaatnnttccnccaanaaanttntnnaaaantaaaactttggaagannnaaattngnnncnttnannnnttttnnnnnaatttcnnaactgcaaacttcttgttccnnnnaaattnnnannnnaannnnnannttccaaagnaannnnnnnnnnnnnaaanaantttccnccaannttttaannncctttnnnnnnnnaantttnnnaannnnannttnaattggnnnnccanaaanggnnganaanttccnnggnnnnaaaccnccaanccannnnntntnnggnngngngnggttnttnnnnnnnaaanaanaattncanngggaannnccnnnngggaannttttnnnaaannttggccnaannttnnnnaattnnnaaaannnnccnaannngnggttttaagagngnggnaaggnnnggggnnnnnctcnngggcnnnaaatttncanaaannnncanaananannnnaantttngggnntttcccnnannnttanaaggnnttaannnnnnnnaaagggnttggnnaatannnnnnnnnnnnaatttnttnaatnnnnttcnnanaanccnnnnnnnnnnnannnggnaatntntnncgtnttnttncncnntntttnggtnttnacncnccaanannttnnnccnaagggaaaaaggttttnaaggntnnggcnnnggaannccnnccaaaagaggcnccnnnnnnttanaannaaggaannnnggnnttnggnnccananngnncacnccnnnttcncccaannnnaaantnnncccnttggnanaaanttnntttnnnnnaaanaanaanaaagngggngnnntncctnnaaaggnaaanaaaaccaaanngcnnnaacnccnnttcncctttatatatanaaggtnnaanggnnaaattnccnttcnccnccgnggnnnnggnnanntttggnaaggnttnngggannnnccaannaaanaattnnngggnaanncctttnaaaannccannttaanaaanaaggnnnnaaancnnnnnnttncccnnnaaannntntttnccnntttntntntnttanaaannaannttccncccncccnnccnnccnnttatatnngganaaaanaaagnganananaannttncncccnnccncnccttananntttncnnnttaaaantntgnnaaanaattntttttcnnnncnnnnccttnttnccaaanttngggtnnnccttnnnnaaannnnccanaanaaaagggaananacnnnnnnccanaaccaaaanaaanaagnggnnnnnnccnnnggnntnnnccaaannnccnnnaaanaancccggaannnnnnttnaaagnnccnnnaaacccnnnnaaagggnnnaanggnnggttttnnnctcnccttnnnnnaantannnnanaaaaannatannggcnnnnaanccaaaaccannnccaaanttttnnanaaannnggnnnnnccnnnggnaaaaagnnnanaaggnnttnnaaaaccaannnaaanannggnnatnttgggnaaggnaanggnaagnnnnnnnggccaaanccnttttttnnnnccnnccttnn

SEQ ID NO: 992 - DNA, 4000 bp, Escherichia coli
  misc_feature (395)..(395): n is a, c, g, or t
  misc_feature (1881)..(1881): n is a, c, g, or t
  misc_feature (1986)..(1986): n is a, c, g, or t
  misc_feature (3318)..(3318): n is a, c, g, or t
  misc_feature (3531)..(3531): n is a, c, g, or t
agacacatttgacatcgcgcgagcaaagagttcggatttcgttgaacgtattattgacatgggcagccgaatacctctcgccccattttacgacaacaacctgaatcatgacccatcctttgcgtgccgagcggggttttccatgaaactcactatccccctagctccgaactgttcttatgcagcgtttgccatttagacaagggggtggtcaaatatgcagaaggaatcggcagaatttctacatttcaaatcacctgccaaaattactttttaacgggtatatatgcaccaatgaagccttttctaaggaaatcttagcgaagaccaattatcaaaatttgggcagtcatggcgtcttgcaggcgtcgtttccatatttttctacacatgantttctcacacacatatgaactttggcatcacgtagaaatttattttcgtcgataatttccacatctatcgatggaatactcaccagttctgtttcgtcgtcacagattgtcacggctccgtctgttttacatatagattttccggttgcgcgatgttccattctataatttgtgacaagatgctgtttcaaacgtggcggaatttgttttagcaattgattttcgcatgaacttaactcggcacgatacgcctcgcctgaacaaccaattattgcgatcgtcagaaaaccagcgaccagtctgcaaagacagacttgcaccttattcacgttaggttccccacagatagccgattttcgcacagcacgcctaaacccctatttcatcgccataaaagaattgaaatcagacttttattaatgccgagttaattttcgtagcgcggatctgagaggtcatccaggccggtaataaattatcacttggaataagttaatttgtcttttacgaaccataaaagatcccaaatacgggtccccaccaatccggaaacacgcaaacaattaacgtggattacccataaatattacaatccctgattgtattcggataaattattgataagttagtcgataagtatctgtatcttttggttattttttagaacaatagtatcgccccgctttatctacaacgcgttctggcgtcttatactgcaataagcgggtggagtttggctgactgagattccagcatcttccgccaatgttgaaaaggtgtgaaccaaaatggcgatagtagacagtcaaaatgatgtttcttcagagcaaataagtattttgatcgctgatgatcacgagcttattctggatattgctcggttgtatttggaccaacaaagcgacatgtcggtgtctactgccatgacattaaacgacgcgattgacacctatcagaaagcaggtccattcgacgtcgtgctacttgattacaatatgcccgggatgaatggactggagggtttacgccaaatgatggcactggcacccggaatcccggttgcaataattacaggaaaccctacgcgccctttaatgaatgatgtcttggaggcgggtgctgcaggaatagtttcgaagtcaagtcctgtgaaatcgctggccaattccatcagatttatacattcgggcgaaacttacatgccgttgcatctgacgcgggaagatcccaaaaaacaaagaggcgacaccggaccgttgagttcacgcgaaatgactgtgttgagttaccttggagaaggaaagaaaaacaaacaaatcgcggtatctctcgggctgtctgaaggtactgtaaaaatgcatgtcatgtcgatttgcaagaaactcgatgcaacgaatcgcacccacgccgtgatcaatgcacgcaacactgggctactttaaagatagatttcaaagtctgtggggacggaccttaaagtgatctngtttgacggcatactctaccctttggcatagagttatggactcaattatcttttggctgtgacaaatagtacctttaaccgtgcatctaacgcgctatattaatngtagtgaccgttaagggatttggtatgttagatagacttaaagcagctgtggaaaacgcactaaaggcgcttgatgaaattacgcgccaacctgaaatgacggaagagctcaagccaattccggtgcgcgttgataaaaaacagcctttcgaccggaaacgttgagaacccgttaaatatctttttccaaaattccaagtccgcgtaaatatacgccaatacctgtttccaataattcttctggtgaatatgggctcgctgttcccggggaatttcttgcgaaaagctctactacgccgtgggacattgctagaatatgcgcactgaacatagatgctgggggacgtttgtctttgggaatatgtttgcccaaatcttccgcagcctgttccaagatgccgcgcgcatttgatgaggctgcagccagctcaggtgttcgatttaccgaaataccgctctcaaacatcgaaatgtaataccccgggtagcgccgcgcaaatgcaagataagcccgccctgtggcttcaaatgcggccagagcagaaggttggcctttgtcatatgcgaattgcatgaggtcggcaaaaatcttgtacccctccaatgccacttctgcgatcaaatcgtcacgaccttcaaaatggcgataaaccgccgcgggtgtcactccggcctgttttgctgcttcggacagactaaatcccgttggcccgcgggcttcgatcagctttatcgctgactcaacgagcgcctgacgcaagttgccatgatgatacccttgcttaaccattccagatgtccggacctcccaagaggtttcgatcaaccgcatccacaatatcatgatctttgaaatcatattcaaattgggaaagaatatggcgaattacagccaaacgtgcccgacgcttgtcgtccgaacgtaccacgcaccacgggcctttatcatggtgtgtccgtttgaaattttcttggatggcagcactgtagtcaccccaaagcgacaaacctttgatatcgatagaagacaacttccattgttttatcggatcacgttcgcgcttgagaaaccggcgtaattgttccgcacgccccacgttaagccagattttgatgagacagatcccttcatcggcgagcattttttcgaattcggtcacctgtacaaagaatttttgcacttgctcttcgtcacagaaccggaacacacgctcaaccactgcgcggttgtaccagctgcggtcaaaaatcgttatggtgcccgcagagggaaaatgttggacatatcgttgaaaataccattcaccacgctctttttccgtcggctttganaaggccacaacccgcgtgacccgcggattaagattttgggtggtggctttgatactaccgccttttcctgccgcatcccgaccttcaaataaaatagccaccctttgacctgtgccttgcacccaagattggaatttcgcaatctcaatttgaagcgcatccatttcttcaacataatttttttgcggcaatatacggcgatatggataactntcgtcgaggatgtcttttttatccccttcaaggataagtgcctttaaatctgcgggcgcttcttccatcaaaaaacggctgattgcgccgtcaaagggcaacgatgacatgttatctatcattggtgcactatgcctcctttatcactttaccgcaatccggcccgctcagccgcgcggtcaatcgcatcaatcacgtctttctttgcgacatgatggggcatatgtccgatgccttcaagaagtgtcagatttgatgccggagcctgtttcgccaaagctctggcatgaagatcggggctgaccagagtgtcagcagttccgtgcagtatttcaatcggcagggaaagcgtactgtatctgggagcttgattgatgatctggggtttcaaaatccgtctctggcgtgcgttggccagaattgtcttacgccgcaggaccagttcgacgccaaactcttcacgataccc

SEQ ID NO: 993 - DNA, 4000 bp, Escherichia coli
  misc_feature (1)..(5): n is a, c, g, or t
  misc_feature (8)..(28): n is a, c, g, or t
  misc_feature (30)..(40): n is a, c, g, or t
  misc_feature (42)..(49): n is a, c, g, or t
  misc_feature (51)..(58): n is a, c, g, or t
  misc_feature (60)..(85): n is a, c, g, or t
  misc_feature (87)..(90): n is a, c, g, or t
  misc_feature (93)..(102): n is a, c, g, or t
  misc_feature (104)..(104): n is a, c, g, or t
  misc_feature (107)..(119): n is a, c, g, or t
  misc_feature (124)..(124): n is a, c, g, or t
  misc_feature (126)..(126): n is a, c, g, or t
  misc_feature (128)..(128): n is a, c, g, or t
  misc_feature (138)..(140): n is a, c, g, or t
  misc_feature (142)..(148): n is a, c, g, or t
  misc_feature (150)..(153): n is a, c, g, or t
  misc_feature (155)..(160): n is a, c, g, or t
  misc_feature (164)..(166): n is a, c, g, or t
  misc_feature (169)..(176): n is a, c, g, or t
  misc_feature (179)..(179): n is a, c, g, or t
  misc_feature (181)..(181): n is a, c, g, or t
  misc_feature (186)..(186): n is a, c, g, or t
  misc_feature (189)..(190): n is a, c, g, or t
  misc_feature (192)..(192): n is a, c, g, or t
  misc_feature (194)..(194): n is a, c, g, or t
  misc_feature (197)..(197): n is a, c, g, or t
  misc_feature (201)..(201): n is a, c, g, or t
  misc_feature (204)..(204): n is a, c, g, or t
  misc_feature (206)..(206): n is a, c, g, or t
  misc_feature (208)..(208): n is a, c, g, or t
  misc_feature (211)..(211): n is a, c, g, or t
  misc_feature (214)..(217): n is a, c, g, or t
  misc_feature (221)..(221): n is a, c, g, or t
  misc_feature (225)..(225): n is a, c, g, or t
  misc_feature (228)..(228): n is a, c, g, or t
  misc_feature (233)..(233): n is a, c, g, or t
  misc_feature (235)..(238): n is a, c, g, or t
  misc_feature (240)..(240): n is a, c, g, or t
  misc_feature (242)..(243): n is a, c, g, or t
  misc_feature (245)..(246): n is a, c, g, or t
  misc_feature (248)..(249): n is a, c, g, or t
  misc_feature (252)..(255): n is a, c, g, or t
  misc_feature (259)..(263): n is a, c, g, or t
  misc_feature (269)..(269): n is a, c, g, or t
  misc_feature (273)..(273): n is a, c, g, or t
  misc_feature (279)..(280): n is a, c, g, or t
  misc_feature (286)..(287): n is a, c, g, or t
  misc_feature (289)..(289): n is a, c, g, or t
  misc_feature (294)..(294): n is a, c, g, or t
  misc_feature (297)..(297): n is a, c, g, or t
  misc_feature (300)..(300): n is a, c, g, or t
  misc_feature (302)..(303): n is a, c, g, or t
  misc_feature (308)..(310): n is a, c, g, or t
  misc_feature (312)..(312): n is a, c, g, or t
  misc_feature (321)..(321): n is a, c, g, or t
  misc_feature (325)..(325): n is a, c, g, or t
  misc_feature (330)..(330): n is a, c, g, or t
  misc_feature (333)..(334): n is a, c, g, or t
  misc_feature (336)..(336): n is a, c, g, or t
  misc_feature (340)..(342): n is a, c, g, or t
  misc_feature (345)..(346): n is a, c, g, or t
  misc_feature (349)..(349): n is a, c, g, or t
  misc_feature (352)..(352): n is a, c, g, or t
  misc_feature (354)..(354): n is a, c, g, or t
  misc_feature (356)..(357): n is a, c, g, or t
  misc_feature (362)..(364): n is a, c, g, or t
  misc_feature (367)..(372): n is a, c, g, or t
  misc_feature (376)..(376): n is a, c, g, or t
  misc_feature (378)..(378): n is a, c, g, or t
  misc_feature (381)..(381): n is a, c, g, or t
  misc_feature (385)..(385): n is a, c, g, or t
  misc_feature (389)..(390): n is a, c, g, or t
  misc_feature (396)..(397): n is a, c, g, or t
  misc_feature (400)..(400): n is a, c, g, or t
  misc_feature (402)..(402): n is a, c, g, or t
  misc_feature (404)..(406): n is a, c, g, or t
  misc_feature (409)..(409): n is a, c, g, or t
  misc_feature (411)..(412): n is a, c, g, or t
  misc_feature (414)..(414): n is a, c, g, or t
  misc_feature (416)..(417): n is a, c, g, or t
  misc_feature (422)..(422): n is a, c, g, or t
  misc_feature (427)..(427): n is a, c, g, or t
  misc_feature (430)..(430): n is a, c, g, or t
  misc_feature (433)..(434): n is a, c, g, or t
  misc_feature (438)..(438): n is a, c, g, or t
  misc_feature (443)..(443): n is a, c, g, or t
  misc_feature (448)..(448): n is a, c, g, or t
  misc_feature (452)..(452): n is a, c, g, or t
  misc_feature (454)..(454): n is a, c, g, or t
  misc_feature (457)..(459): n is a, c, g, or t
  misc_feature (462)..(462): n is a, c, g, or t
  misc_feature (465)..(466): n is a, c, g, or t
  misc_feature (468)..(469): n is a, c, g, or t
  misc_feature (471)..(472): n is a, c, g, or t
  misc_feature (475)..(476): n is a, c, g, or t
  misc_feature (479)..(480): n is a, c, g, or t
  misc_feature (482)..(483): n is a, c, g, or t
  misc_feature (485)..(485): n is a, c, g, or t
  misc_feature (491)..(493): n is a, c, g, or t
  misc_feature (499)..(499): n is a, c, g, or t
  misc_feature (501)..(504): n is a, c, g, or t
  misc_feature (508)..(509): n is a, c, g, or t
  misc_feature (511)..(512): n is a, c, g, or t
  misc_feature (514)..(514): n is a, c, g, or t
  misc_feature (516)..(516): n is a, c, g, or t
  misc_feature (519)..(521): n is a, c, g, or t
  misc_feature (523)..(523): n is a, c, g, or t
  misc_feature (526)..(526): n is a, c, g, or t
  misc_feature (528)..(528): n is a, c, g, or t
  misc_feature (531)..(531): n is a, c, g, or t
  misc_feature (536)..(537): n is a, c, g, or t
  misc_feature (539)..(540): n is a, c, g, or t
  misc_feature (542)..(542): n is a, c, g, or t
  misc_feature (545)..(545): n is a, c, g, or t
  misc_feature (547)..(547): n is a, c, g, or t
  misc_feature (550)..(551): n is a, c, g, or t
  misc_feature (553)..(554): n is a, c, g, or t
  misc_feature (556)..(556): n is a, c, g, or t
  misc_feature (559)..(559): n is a, c, g, or t
  misc_feature (565)..(567): n is a, c, g, or t
  misc_feature (569)..(569): n is a, c, g, or t
  misc_feature (572)..(574): n is a, c, g, or t
  misc_feature (578)..(578): n is a, c, g, or t
  misc_feature (586)..(586): n is a, c, g, or t
  misc_feature (589)..(589): n is a, c, g, or t
  misc_feature (595)..(595): n is a, c, g, or t
  misc_feature (598)..(599): n is a, c, g, or t
  misc_feature (602)..(602): n is a, c, g, or t
  misc_feature (606)..(606): n is a, c, g, or t
  misc_feature (608)..(608): n is a, c, g, or t
  misc_feature (610)..(611): n is a, c, g, or t
  misc_feature (615)..(615): n is a, c, g, or t
  misc_feature (617)..(617): n is a, c, g, or t
  misc_feature (619)..(619): n is a, c, g, or t
  misc_feature (621)..(621): n is a, c, g, or t
  misc_feature (625)..(625): n is a, c, g, or t
  misc_feature (635)..(635): n is a, c, g, or t
  misc_feature (638)..(638): n is a, c, g, or t
  misc_feature (641)..(641): n is a, c, g, or t
  misc_feature (644)..(644): n is a, c, g, or t
  misc_feature (647)..(648): n is a, c, g, or t
  misc_feature (650)..(650): n is a, c, g, or t
  misc_feature (653)..(656): n is a, c, g, or t
  misc_feature (658)..(658): n is a, c, g, or t
  misc_feature (668)..(668): n is a, c, g, or t
  misc_feature (671)..(672): n is a, c, g, or t
  misc_feature (676)..(676): n is a, c, g, or t
  misc_feature (678)..(678): n is a, c, g, or t
  misc_feature (688)..(689): n is a, c, g, or t
  misc_feature (692)..(692): n is a, c, g, or t
  misc_feature (696)..(697): n is a, c, g, or t
  misc_feature (700)..(701): n is a, c, g, or t
  misc_feature (704)..(705): n is a, c, g, or t
  misc_feature (707)..(707): n is a, c, g, or t
  misc_feature (712)..(713): n is a, c, g, or t
  misc_feature (716)..(716): n is a, c, g, or t
  misc_feature (718)..(720): n is a, c, g, or t
  misc_feature (723)..(725): n is a, c, g, or t
  misc_feature (728)..(729): n is a, c, g, or t
  misc_feature (732)..(732): n is a, c, g, or t
  misc_feature (735)..(736): n is a, c, g, or t
  misc_feature (738)..(738): n is a, c, g, or t
  misc_feature (741)..(741): n is a, c, g, or t
  misc_feature (745)..(747): n is a, c, g, or t
  misc_feature (751)..(751): n is a, c, g, or t
  misc_feature (756)..(757): n is a, c, g, or t
  misc_feature (759)..(759): n is a, c, g, or t
  misc_feature (761)..(764): n is a, c, g, or t
  misc_feature (766)..(766): n is a, c, g, or t
  misc_feature (769)..(769): n is a, c, g, or t
  misc_feature (772)..(774): n is a, c, g, or t
  misc_feature (777)..(778): n is a, c, g, or t
  misc_feature (780)..(780): n is a, c, g, or t
  misc_feature (785)..(785): n is a, c, g, or t
  misc_feature (787)..(788): n is a, c, g, or t
  misc_feature (790)..(790): n is a, c, g, or t
  misc_feature (794)..(794): n is a, c, g, or t
  misc_feature (801)..(801): n is a, c, g, or t
  misc_feature (803)..(804): n is a, c, g, or t
  misc_feature (807)..(807): n is a, c, g, or t
  misc_feature (809)..(810): n is a, c, g, or t
  misc_feature (816)..(817): n is a, c, g, or t
  misc_feature (819)..(820): n is a, c, g, or t
  misc_feature (822)..(823): n is a, c, g, or t
  misc_feature (826)..(826): n is a, c, g, or t
  misc_feature (835)..(835): n is a, c, g, or t
  misc_feature (837)..(837): n is a, c, g, or t
  misc_feature (840)..(842): n is a, c, g, or t
  misc_feature (845)..(845): n is a, c, g, or t
  misc_feature (847)..(848): n is a, c, g, or t
  misc_feature (851)..(851): n is a, c, g, or t
  misc_feature (863)..(864): n is a, c, g, or t
  misc_feature (866)..(866): n is a, c, g, or t
  misc_feature (868)..(870): n is a, c, g, or t
  misc_feature (873)..(874): n is a, c, g, or t
  misc_feature (877)..(879): n is a, c, g, or t
  misc_feature (882)..(882): n is a, c, g, or t
  misc_feature (884)..(885): n is a, c, g, or t
  misc_feature (887)..(887): n is a, c, g, or t
  misc_feature (892)..(892): n is a, c, g, or t
  misc_feature (894)..(895): n is a, c, g, or t
  misc_feature (898)..(898): n is a, c, g, or t
  misc_feature (903)..(903): n is a, c, g, or t
  misc_feature (905)..(908): n is a, c, g, or t
  misc_feature (911)..(912): n is a, c, g, or t
  misc_feature (921)..(921): n is a, c, g, or t
  misc_feature (923)..(923): n is a, c, g, or t
  misc_feature (926)..(927): n is a, c, g, or t
  misc_feature (930)..(931): n is a, c, g, or t
  misc_feature (934)..(934): n is a, c, g, or t
  misc_feature (936)..(936): n is a, c, g, or t
  misc_feature (944)..(944): n is a, c, g, or t
  misc_feature (947)..(948): n is a, c, g, or t
  misc_feature (951)..(952): n is a, c, g, or t
  misc_feature (954)..(957): n is a, c, g, or t
  misc_feature (961)..(961): n is a, c, g, or t
  misc_feature (964)..(966): n is a, c, g, or t
  misc_feature (970)..(970): n is a, c, g, or t
  misc_feature (974)..(976): n is a, c, g, or t
  misc_feature (978)..(978): n is a, c, g, or t
  misc_feature (981)..(982): n is a, c, g, or t
  misc_feature (986)..(986): n is a, c, g, or t
  misc_feature (989)..(989): n is a, c, g, or t
  misc_feature (1159)..(1159): n is a, c, g, or t
  misc_feature (1444)..(1444): n is a, c, g, or t
  misc_feature (1989)..(1989): n is a, c, g, or t
  misc_feature (1991)..(1991): n is a, c, g, or t
  misc_feature (1994)..(1994): n is a, c, g, or t
  misc_feature (3643)..(3648): n is a, c, g, or t
  misc_feature (3650)..(3650): n is a, c, g, or t
  misc_feature (3652)..(3653): n is a, c, g, or t
  misc_feature (3655)..(3655): n is a, c, g, or t
  misc_feature (3657)..(3658): n is a, c, g, or t
  misc_feature (3660)..(3660): n is a, c, g, or t
  misc_feature (3663)..(3666): n is a, c, g, or t
  misc_feature (3669)..(3669): n is a, c, g, or t
  misc_feature (3671)..(3671): n is a, c, g, or t
  misc_feature (3676)..(3677): n is a, c, g, or t
  misc_feature (3679)..(3684): n is a, c, g, or t
  misc_feature (3686)..(3687): n is a, c, g, or t
  misc_feature (3689)..(3691): n is a, c, g, or t
  misc_feature (3695)..(3700): n is a, c, g, or t
  misc_feature (3702)..(3707): n is a, c, g, or t
  misc_feature (3709)..(3711): n is a, c, g, or t
  misc_feature (3715)..(3724): n is a, c, g, or t
  misc_feature (3726)..(3726): n is a, c, g, or t
  misc_feature (3728)..(3728): n is a, c, g, or t
  misc_feature (3731)..(3731): n is a, c, g, or t
  misc_feature (3734)..(3737): n is a, c, g, or t
  misc_feature (3739)..(3740): n is a, c, g, or t
  misc_feature (3742)..(3742): n is a, c, g, or t
  misc_feature (3745)..(3750): n is a, c, g, or t
  misc_feature (3752)..(3756): n is a, c, g, or t
  misc_feature (3760)..(3761): n is a, c, g, or t
  misc_feature (3764)..(3764): n is a, c, g, or t
  misc_feature (3767)..(3767): n is a, c, g, or t
  misc_feature (3769)..(3771): n is a, c, g, or t
  misc_feature (3773)..(3774): n is a, c, g, or t
  misc_feature (3777)..(3779): n is a, c, g, or t
  misc_feature (3784)..(3785): n is a, c, g, or t
  misc_feature (3787)..(3791): n is a, c, g, or t
  misc_feature (3793)..(3793): n is a, c, g, or t
  misc_feature (3795)..(3795): n is a, c, g, or t
  misc_feature (3797)..(3799): n is a, c, g, or t
  misc_feature (3802)..(3802): n is a, c, g, or t
  misc_feature (3804)..(3810): n is a, c, g, or t
  misc_feature (3812)..(3813): n is a, c, g, or t
  misc_feature (3816)..(3817): n is a, c, g, or t
  misc_feature (3820)..(3820): n is a, c, g, or t
  misc_feature (3826)..(3827): n is a, c, g, or t
  misc_feature (3830)..(3843): n is a, c, g, or t
  misc_feature (3845)..(3847): n is a, c, g, or t
  misc_feature (3849)..(3851): n is a, c, g, or t
  misc_feature (3853)..(3853): n is a, c, g, or t
  misc_feature (3858)..(3859): n is a, c, g, or t
  misc_feature (3861)..(3861): n is a, c, g, or t
  misc_feature (3863)..(3863): n is a, c, g, or t
  misc_feature (3866)..(3868): n is a, c, g, or t
  misc_feature (3871)..(3872): n is a, c, g, or t
  misc_feature (3874)..(3874): n is a, c, g, or t
  misc_feature (3876)..(3878): n is a, c, g, or t
  misc_feature (3880)..(3889): n is a, c, g, or t
  misc_feature (3891)..(3894): n is a, c, g, or t
  misc_feature (3896)..(3905): n is a, c, g, or t
  misc_feature (3907)..(3912): n is a, c, g, or t
  misc_feature (3914)..(3914): n is a, c, g, or t
  misc_feature (3916)..(3916): n is a, c, g, or t
  misc_feature (3919)..(3919): n is a, c, g, or t
  misc_feature (3922)..(3924): n is a, c, g, or t
  misc_feature (3926)..(3935): n is a, c, g, or t
  misc_feature (3937)..(3938): n is a, c, g, or t
  misc_feature (3940)..(3957): n is a, c, g, or t
  misc_feature (3959)..(3959): n is a, c, g, or t
  misc_feature (3961)..(3962): n is a, c, g, or t
  misc_feature (3964)..(3969): n is a, c, g, or t
  misc_feature (3971)..(3971): n is a, c, g, or t
  misc_feature (3973)..(3973): n is a, c, g, or t
  misc_feature (3975)..(3975): n is a, c, g, or t
  misc_feature (3977)..(3977): n is a, c, g, or t
  misc_feature (3979)..(3979): n is a, c, g, or t
nnnnnaannnnnnnnnnnnnnnnnnnnnannnnnnnnnnngnnnnnnnngnnnnnnnnannnnnnnnnnnnnnnnnnnnnnnnnncnnnntannnnnnnnnnanaannnnnnnnnnnnngacgnangncctgcaaaannnannnnnnngnnnntnnnnnncgcnnnatnnnnnnnnaananaatgnganntncngtngcanatncngntgnagnnnnaaanatancgnggctntnnnnangnnanncnnagnnnnagtnnnnntaattnccgncgcagnngtgggnntnggtgnggntananntctcnnntntgcgcgcgnaggngcgtnggnntncgtnnnttnngtntcngnannagggnnnaannnnnntaananaantaanaagnncggcgnngangncnnntgngnncncnntgatntctcncgngannatgncgcanaaaanatcntngannnaangannanngnnttnngcnngnncnatatcnnntttaanannnngggnntnntngngcnnngnagngnggngacanncnntntananganntnnanagnaatatnnngntgnnngtgngcggtgtnttnctgtgntcnnganatgncntnncccntntnanaaanacaaaaggcncantantcnatnncncgnnnncngtggcgctgnaanntgtngnggacagagcnnctnatanngcnnccnnangcgcnnttnannncannncannggnaanngnganggannntatnaaggnngnannnngngtnaannnaanntnccccngnncnacgnacacacngnngcncnnagaaanncnnanncanaaaggagantntgnnnagntnnganaactctacattnncngnnngcnnctnnnaangnntngggancnngangaganannnnaanntgttctatntnttnngcnnaanantttctgcncanncanntnnnnaagnatnnncggnggcnnnanganntaanttntaaaggagtaaacgatgagagtgaaagataagataactattttaactggcgcaggttccggaattggcagggcaacggccattctttttgccggagagggtgccattgtttatgcatccgatattgatgaagcagggcttaaggaaacgctttctcttgtcaaagaaggnaaagaaaatgttcacatcacaaaagtggatgttacaaaatacgatgatgtaaggcaacatgtcgatgaagtcgccaaaaaacacggccggattgactgcctgatagtgaatgccggagtggtaagggtagggcaggttgaggatttcccggaagaggattacgatgtgctgctgaatgtaaatctcaaaggcttattttttacctgcaaggccgcaatcccctattttaaaaagcagaaaagcggtaatattataacgctcgcctcggtggccgcgcatatcggncagaacaaccatgccaactactgttcgacaaagcacggtgtcctgggttttaccaaagcgctggcgctcgatatggcgccttataacgttcgtgtaaacagcgttagccccggtgcaaccgatacgccaatgcttcgaactgatgttgggaaagaggccgtgcagaggggcgtttccttcgaacagatcaggaaggaatttgaggaacagggcgtgcttaccagatgggccgacccgatggagatagcaaccggcatattgttcctggcaacaagcgacgcatcctacatgacaggagccgacctgagaatagacggtggctggactacgagataaaatgttactacatatatgataagtcgtggaagttctgcattgatgcaagatggaggttataaacattaaaaaaaatattattctgttaaataaagtaatcacattcggcgagatcatgctcaggttgtcatcgcccggttatcaaagaataacccaggcaaactcttttgatattaattttggcggcggcgaagccaatgtggcagtancnctngcaaactttggcattgatgccgcgtttgttactcgattaccatcgaatgacattggtaaagcagctctgcaaaatctttgtaagcacaatgtatgtgttgatcatattgtgtggggtggtgaaaggttaggtatatattttctggaaaaaggcgccgttcaacgtcccagcaaagtcatctacgaccgggcacactcggctatttcagagatacaaccgggaatgatcgattggaatactatttttaaagatgcaacctggtttcattggacaggcattacaccggccatctcacaaacagcagcaacagtttgtttagaagctattaaagctgccaacacaaaagggattactgtttctactgatttgaactaccgcaaatacctgtggcaatatggcaagcaagcgggtgatgtcatgcccgaactggttgccggatgcgatattattttaggcaatgaagaagacgctgaaaaagtatttggcataaagcctgctggactgaatgtaaccaacgaacatgttgaagcgcgacaataccggtcggtttgcgaacaactgatgaagaaatttcctaaagcaaaaaaagtgattatcacgttacgtggctctgtcagtgcatcacacaacaactggtcaggtgtgttatggaacggaaaaaaattgtatgaagccagaacatacgaaatcacacacattgttgatcgtgttggcagcggagattcattcatgggcggattgatttatggattactcaccttttccgatgatgatcagaaagcacttgaatttgccgtagcggcatcggcattaaagcatacaatcgaaggtgacttcaatttagttactacagatgaagtattgaaactaatgagcggcgacggatcaggcagagtagaaagataatttaaaatttagaaaaatattttgatattaagaatggtaatggctaaaacaaaaacagaaatattatcgttatttgaaaaatgtggaatgatacctgtcttttatcatccggattatggtgtctgtaagaacgtagttgacgcgtgctacgcaggaggtctaaggatatttgaatatgctaaccgtggcgaaaaagcggctgaagtttttcaaaaacttaaaacgtatgttaaaaccacttatcccgatttaaaattaggtatcggcagtattatcaatggcaaacaagctgaacaatttatcgcacttgatgccgatttcattgtagcgcccatactcgatgaatcaacggcaatagtttgtcggaaagcaaatatcttctgggtgccgggatgcggaacattaactgagattgccaaagctgaaaacctgggcgcagagatcattaaaatatttcctggctcggtactgggaccagagtttatcaaagcagttaaaggacctatgccctggctgaagcttatgcctaccggtggtgttgaacccactaaagagaacttacgtgcatggcttaaagcaggtgctgtttgcgtaggtatgggatcgcaattgatatcaaaaaaaattattgatacaaaaaattacctggcattaactgaacagataaaacaaacatatttgatcattgatgcaatcaaacaagagatgcattcttagaaattaaaatggacacatttcccaannnnnnantnncncnnantcnnnnttngnttttnntnnnnnntnnannnttcnnnnnnannnnnntnnntaannnnnnnnnnananacnaannnnanntnatnnnnnngnnnnntatnnatnaanannnannaannnatttnntnnnnngnangnnnggnannnnnnntnnttnnttntttctnnctnnnnnnnnnnnnnntnnntnnntngtttnntntntgnnnggnngngnnngnnnnnnnnnntnnnntnnnnnnnnnntnnnnnnangnaancannnannnnnnnnnntnngnnnnnnnnnnnnnnnnnncntnnannnnnntntncntncnttctttttgtttccctatatt

SEQ ID NO: 994 - DNA, 4000 bp, Escherichia coli
  misc_feature (3518)..(3518): n is a, c, g, or t
  misc_feature (3533)..(3533): n is a, c, g, or t
ttttcttctatcaatgatgataaagtcattgcctaggccatccattttataagcttgtatttcgatcatctattttattgttgtatcttacaaatattctcaattattgacttttaaaatagtaaaatatacttttaagaaaattttccacaaaaataagcaggttttgtggtgtccttctaatgaaggagatcaacactagtcagcgatattcgcccactagtgcgattgctgctggagaaaaaaaatgtttgaaaatttaacaagtaaaattgagtctgccttttctttttttaataaaagcactcaattagatgaaaaacaggttgatgaaggattgcgaaagatccgccaggctcttcttgagtccgacgttgctctttctgttgctaaagaatttattgcaaatgttaaaccaaaagcaatcggccaagaagttttaaaatctataactccagggcagttacttgttaaaattgtatacgatgaacttgttaaaattttaggtagcgaaaaatcagaaattaatcttaatacagttccgccagcaaaaatattagttgttggtttgcaaggctcaggaaaaacaacaacttcagcaaagattgcaaaatttattgaaaagaattttaataaaaaagtaatgttatcgagcttagacgtttaccgtccagcagctcaaaaacaattagagttattaggtagtcaaaataatattcaaacaattccaattatagaaggacaacttccaatagaaattactcaaaggactttagcggctgcttccttatctggctctgatgtaattatttttgatactgcgggacgaacacaaattgatagcgtgatgatgagtgaattaaataatcttaaaaagataattaatccaatcgaaacttttttagttgctgactctttaacaggacaagacgccgtaaatatcgctagtgaatttaaaaaaacagtcgatttaacaggaataatattaacaagaatagatggagatggaaaaggtggtgcagcccttagcatgaagtccgttgccaattgtccaattaaatttttaggggttggtgaaaaaattgatgattttgaaatattccatccagaaagaattgcaaatagaattttaggaatgggagatgttgtttcccttgttgaaaaagtatctgaaaatttaaaaaaagaagaagttgaagagctagaagagaattttaaaaaaggacaatttacttttaatgattatttaaaacagattagacaaatgaaaaaaattggtggcatgggaaaagttttaggaatgattcctggaatttcaaaaattaaaaaacaaatagatgaggctgatattgatgagagtcttcttggaaaacaagaagcggttattttatcgatgactcctaaagaaagagataatccaaaaattattgatggatcgagaaaaaaaagaatagcgaatggttcaggaaccgacatcgctttagtaaacaagcttctaaaacaacataaaatgatgacaggaatgatgaaaagaatgtctcaaggtggcggaagaaattttggaggtttagatggaatacctcccgaattatttaacaatctaaaatagaaaggcaaataaatgttaaaaataagactatcaagagggggaacaaaaaaaagacccttctatcaaatcgtagttgcagattctagaaatccaagagatggaaaatttattgaaaaacttggatacttcaatccgttattaccaaaaagcaaaccagaaagattaagcttagagtcagaaagaataactcattggattaaaatgggagctcagcctactctaagagttgcaaaatttttaggtgctgcaaatcttgccccagttcctgaaaaaagaaataatccaattaaagctttacctaaaaagaaagctcaagaaagattaaaagctgcccaagcaccaaaagaagcaccagcagcagctccggcagcagaagcagccccagcagcagaagcagcggctccagcagctgaaccagctcctgtagaagctccaaaggttgaagaaaaagcaccagaagcggaggcaccaaaaacaaattaactattatgtggtctgcaaaaatattcactttatatccagaattttttccagggattttagatatcgggctttataaaagagctagagaaaataaaatctggtcactcgatgtcattaacatcagggactctgctttagataagcatggaagtgtggatgatactccttttggaggaggaagcggaatggttatgcgtgccgatgtaatagatagttgtttggataaaaatattaaaaactctaaaaatgaacttatttatctaagtcctagaggtgaattgttaacgcaaaaaattgcaaaacaattatcacaaaaaaatggagtagatcttatctgtggacactttgaaggaattgatcaaagagttatagaagaaagaaagattagagaaataagtattggtgattttattttatccggcggtgaaacagcagcgtttgtttttttagattccatacttagattgttgccaggcgttcttggcaattcttcttcattaaatgaagagagttttgaaaataatttattagaatatcctcaatatacaaaaccccaagagtggaaaggaagaactgttccggaagtacttttgtctgggaatcacgctaaaattaaggactggcgcttagcacaatccgaggatataacacgacgccagagacaagacttatgggaaaaatatcacaaataactaaattttaatgcaaatttctacaatgagaatagacgaattagataaacttcatattaagaaaattggtgaaaaaaaattaccagaattttctcctggagatactttaaaagtaaacgttcgaattatcgaaggaaaaagacaaagaatacaagcttacgaaggagtttgtattgctaaaaaaaatagaggaattaattctacttttacagttagaaaaatttcttttggtgaaggtgttgaaagattatttccagttcacagtccaaacgtagagtctgttgaagtaattagaagcggaaaagtaagaagagcaaaactttattatttaagagaaagaactggtaaatcagctagaattacagaaaaaattagaaaaaaaattggcgtagatattattcaacctttaccaaaaaaagaggcagtccaaaatattgaagcacaagcagctgtagttgctgaacaggctccaaaaaatacggaaaaagcttcagcgccaaagacagaagctcagaataaaaagaagtaatactagtttttatttaatggcaaagacaatttacgacaaaatatgggaaagtcatttagttgatgagcaaaatgacggaacatcactattgtacattgataggcatttagttcacgaagtaacgagtccacaggcatttgagggattacgtttatctaatagaaaagtaaaattacctggttcaacattagcagttgtagatcanaacgttccaacaacngatagatcaaaaggaatagcagataaagaatctgcaattcaagttgagactctttctaaaaattgtaaagattttggtatagaattttttggtttaacagataaaagacaaggcattgttcatgttattggtcctgaacaaggattcactcagcctggaatgacaattgtttgtggagatagtcatacttcaacgcatggcgcatttggtgcattagcttttggaatcggaacttcagaagtagagcatgttcttgcaacgcaaactttaattcaaagcagagccaaaaattttaaaattagtgttgatggaaaattgccattgggtgttactgctaaagatgtaatcctatctattattggaaaaattggaacagcaggtggaaccggttacgttattgaatactgtggagaagtttttagaaacttttctatggaagaaagaatgacggtttgtaatatgagtat

SEQ ID NO: 995 - DNA, 4000 bp, Escherichia coli
  misc_feature (126)..(126): n is a, c, g, or t
  misc_feature (155)..(155): n is a, c, g, or t
  misc_feature (168)..(168): n is a, c, g, or t
  misc_feature (354)..(354): n is a, c, g, or t
  misc_feature (441)..(441): n is a, c, g, or t
  misc_feature (502)..(502): n is a, c, g, or t
  misc_feature (511)..(511): n is a, c, g, or t
  misc_feature (560)..(560): n is a, c, g, or t
  misc_feature (595)..(595): n is a, c, g, or t
  misc_feature (632)..(632): n is a, c, g, or t
  misc_feature (725)..(725): n is a, c, g, or t
  misc_feature (791)..(791): n is a, c, g, or t
  misc_feature (890)..(890): n is a, c, g, or t
  misc_feature (986)..(986): n is a, c, g, or t
  misc_feature (992)..(992): n is a, c, g, or t
  misc_feature (1163)..(1163): n is a, c, g, or t
  misc_feature (1360)..(1360): n is a, c, g, or t
  misc_feature (1368)..(1369): n is a, c, g, or t
  misc_feature (1437)..(1437): n is a, c, g, or t
  misc_feature (1992)..(1992): n is a, c, g, or t
  misc_feature (2015)..(2015): n is a, c, g, or t
  misc_feature (2073)..(2073): n is a, c, g, or t
  misc_feature (2152)..(2153): n is a, c, g, or t
  misc_feature (2161)..(2161): n is a, c, g, or t
  misc_feature (2441)..(2441): n is a, c, g, or t
  misc_feature (2623)..(2623): n is a, c, g, or t
  misc_feature (2625)..(2625): n is a, c, g, or t
  misc_feature (2627)..(2627): n is a, c, g, or t
  misc_feature (2725)..(2725): n is a, c, g, or t
  misc_feature (2751)..(2751): n is a, c, g, or t
  misc_feature (3532)..(3532): n is a, c, g, or t
cggctcatcaatctaaagtcggcatgattaaacacgcttttaacgcccattttagattgcagcttatagaacgccacagccgaaaggcgcttaaaaacagggtcggccttgcgcgacaccttcacnccataaacaatatcgcttccttcacgatnatgttgcagcatncgcggtatggcttgcaggtcgtcttgcaggtcggcatcgatggttatcaccacatcagcccaatgtctagcagtgagcattccggccataatggcattttgatggcctacgtttcgggctagattgatgcctcgcacgtaattgttttggcgctgatgttggcaaataagctgccaagtggcatcnctgctaccatcgtttacaaacactatcatgcttttggccgacacctcgccactcttaacaagcgtgtcaagtaagtcggttagtcgngctaccgacgagttaagcactgcctcttcgttataacaaggcgaaacaatagccagtcgcntcatctttnttttccctttttacgtttcacaaagtcggtgtaggtaataaattcggcntcgcgccgtttcatcatctttaccaaacggtctantcggttaaccatatccatgccgctatggttgcgaatnatgaagggcatacgatattcgggatggtcgttaaggtcgtagaactcccacggatgaaaataggttaccaaataaccatcgtgtcgcaacacncgcctaaccatggcgtgataaagccattgaggcagattgtgcagcgacagccaaaacaaagggaancgcaaaaggggcgtaaccgatgcggggatttgcatcactgagcctttcataaaccatcggcggggcgtggtgaggtgcatataacgaccaggaatgaangcgggattgagcgacgaattatacaaatagccagcctcggccagtgcgtcgtcgctcacggggaacattcggggctgccgatagccatgcatgggnacgccngccacacgttcgagaatgttttttgagcgccacacgtcttcgggaacaggcttccaatggtccacaccatggcaagccacctcgtgtccctcgtccatgatgcggcgaataaggcgcggtgcctgctcggcaaagttacccgtgcagaaaaaagtggcacacacgccattncgtttcaggcaatcaagaatgcgcgttgtaccctctaccgacacgcgcataccctcttccaagctgatgtttacgccatgttcgcgtggcacatcaaactcttcggtgtcgaaacttagcaatatcagctctttgtcttttgtttgcatgctgcaaagttacgaaaataattggcaacaatgatgttttttcactgntcatcatnngcatttaacgcacgaaagaaaaacgcattatcaacttcgtgctcctacttttaaggctatatgcttcnctagggtgctaaccttttgtaactttgctctacctgatgccctttttgcgctgaataaagcttagctgcaaacagatgataagcgggcgaaagggaagaataaattaaagggggagatggtttgaacaacatcaaacacatctcccccttttgatttaatattcgtcttcgttgaagaggaaatcctcttttgtgggataatcgggccaaatatcttcgatactctcgtagacatcgccttcgtcttcaatctcttgcaagttctctaacacctccaaaggtgcgcccgaacgcatagcatagtctatgagttcttccttggttgctggccaaggtgcatcttctagtttagatgccaattccaatgtccaatacatatcttatcgtttttcttgttaatgttctcggtttaggctgcaaaaataacacttttattgttatttgcaagtgttttgccaagttttttcaagtaaatgtgcattaaaacagataaaacgagctaaaacaaagagataatcggataatctattgagatattgtaagataacgggcganaccgcatctgtatgcgagagggncacaacgcttcgctcggcgcgtctacaaatggtgcgacacacgtgcgcccaggctganaggggagttcctccaggtagtataaattgggtttgcggtggcaattggctctgcatttggtcgatggcttgctctaaannggcgatgntctcggccgatagtaagggcaaacggtggcaagacggctgtaacgacgcctgcgaactggtggcaagatggcaaccgatgttgaaaagctgctgctgaatggcttctatctgcggtgcatgtgcaccatcaggacaaagggctagcaaatatcccaaagatgaattaagctcatccactgtgccgtaggcctcaatgcgaacatgcgacttatctatacgcgttccgcctactaggcttgtaaaaccctcgtcgcctgttttggtgtatattttcatctntagtagctgaatgaggttaaaaattaatgacgtaatgttgtttagggcgggcactatcgaagaacgccacaccacaataatataggtcgaacgttacgccaacacgcttgtcctgctgcaaacgatgccacaattggcgagcatgggccgacttactcacttcgttgacaagcagaatggtntncncgttgaatttgggcaacaactgctcgaatatttcttcggcatgctctacgtcctgaagatgtaaaacaacaggctgttcgaagggtgtaagcgatggnatattgcagggctgcaaatgggtaanttgggtgcgtttgcatgctgtttgcacataaggtgcaagccaatgaggcgacgactggcaacaaatccaacgttcggcttgggcaaaattggccaacctaaagaaaaattcgcccaacttgcgctctctttttgagatgttgggcagctgctgacacaggtcggcataggcgtaataggggtaatgctcgttcactacatatcgtacgaacgaataagccgacggcgattgtatgccaaatccacggcaacaagtgagtcgggtgagccaaatccatagtcgttcgagatgatacattttcgtgatatatatttataattgatgaagtatgcaaagttaatcatttaaaacggaaacaatagcgatggcaaaaactaaaaccattaaaaagtaaggataataaaaaaatatgctgaaaagaaaacaacatagcgttattttcactatttttgcaaaacaaagttatagaaaggccactactgaccgatgaagagctggcacaacaatgtggacaacgataatcaatcagggtaatagcatttcaatataactcaacaactaaatacatcatctataaccgcgcataaaatcgaatcaattaaataacagataaacaacaatactcacaaaatttcatcgtatggataaaacaaaaatcgtagtcaccgcaattattggcctggtggttgttattggtgcatggtttattgcatcgggttttaaaaactttagagaaggacaacccgtaatcagtgtaacgggtatggccgaaaaagaaatnacaagcgacctcatcgtttggaaaattacggttaacgcagagggttcaactcgtagttcggcctttaccgagtttgagaaatcagctcgcgtgatgagcaagtacctacaaacgcatggcattcctgaaaaggaaattacattgagcagcgtggatatcagcaaacgcacaaaagacttttgggacgaagacagccgaaaatacgtaacgcttgaagatgggttctcggtttcgcagactttcacggttagctcgaacgatctcaaacgcgtggaaggggtttaccaacgtatctctgaactgtacaacagtggtatggatttcagtagcgagaaaccactgtactactacacgaaactgaacgacctgaagatggaaatgcttaaccaagcatcggccaacgcatacgaacgtgctcaaaccattgctaaaggtagcgattcgaaagtgggttcggttgtatcttca

SEQ ID NO: 996 - DNA, 4000 bp, Escherichia coli
  misc_feature (1)..(4): n is a, c, g, or t
  misc_feature (6)..(8): n is a, c, g, or t
  misc_feature (12)..(14): n is a, c, g, or t
  misc_feature (16)..(18): n is a, c, g, or t
  misc_feature (21)..(21): n is a, c, g, or t
  misc_feature (23)..(23): n is a, c, g, or t
  misc_feature (25)..(31): n is a, c, g, or t
  misc_feature (34)..(35): n is a, c, g, or t
  misc_feature (38)..(42): n is a, c, g, or t
  misc_feature (44)..(46): n is a, c, g, or t
  misc_feature (48)..(52): n is a, c, g, or t
  misc_feature (54)..(61): n is a, c, g, or t
  misc_feature (63)..(64): n is a, c, g, or t
  misc_feature (66)..(66): n is a, c, g, or t
  misc_feature (68)..(69): n is a, c, g, or t
  misc_feature (71)..(71): n is a, c, g, or t
  misc_feature (73)..(74): n is a, c, g, or t
  misc_feature (76)..(78): n is a, c, g, or t
  misc_feature (81)..(82): n is a, c, g, or t
  misc_feature (84)..(98): n is a, c, g, or t
  misc_feature (102)..(102): n is a, c, g, or t
  misc_feature (105)..(105): n is a, c, g, or t
  misc_feature (107)..(108): n is a, c, g, or t
  misc_feature (110)..(110): n is a, c, g, or t
  misc_feature (112)..(113): n is a, c, g, or t
  misc_feature (116)..(119): n is a, c, g, or t
  misc_feature (121)..(121): n is a, c, g, or t
  misc_feature (123)..(123): n is a, c, g, or t
  misc_feature (125)..(127): n is a, c, g, or t
  misc_feature (129)..(131): n is a, c, g, or t
  misc_feature (133)..(133): n is a, c, g, or t
  misc_feature (135)..(136): n is a, c, g, or t
  misc_feature (138)..(138): n is a, c, g, or t
  misc_feature (140)..(144): n is a, c, g, or t
  misc_feature (148)..(148): n is a, c, g, or t
  misc_feature (152)..(153): n is a, c, g, or t
  misc_feature (158)..(162): n is a, c, g, or t
  misc_feature (164)..(164): n is a, c, g, or t
  misc_feature (167)..(173): n is a, c, g, or t
  misc_feature (175)..(183): n is a, c, g, or t
  misc_feature (185)..(188): n is a, c, g, or t
  misc_feature (190)..(193): n is a, c, g, or t
  misc_feature (195)..(208): n is a, c, g, or t
  misc_feature (210)..(212): n is a, c, g, or t
  misc_feature (214)..(218): n is a, c, g, or t
  misc_feature (221)..(222): n is a, c, g, or t
  misc_feature (225)..(228): n is a, c, g, or t
  misc_feature (230)..(232): n is a, c, g, or t
  misc_feature (236)..(240): n is a, c, g, or t
  misc_feature (242)..(244): n is a, c, g, or t
  misc_feature (246)..(256): n is a, c, g, or t
  misc_feature (258)..(260): n is a, c, g, or t
  misc_feature (262)..(262): n is a, c, g, or t
  misc_feature (264)..(270): n is a, c, g, or t
  misc_feature (274)..(281): n is a, c, g, or t
  misc_feature (283)..(288): n is a, c, g, or t
  misc_feature (290)..(291): n is a, c, g, or t
  misc_feature (293)..(296): n is a, c, g, or t
  misc_feature (298)..(304): n is a, c, g, or t
  misc_feature (306)..(308): n is a, c, g, or t
  misc_feature (311)..(312): n is a, c, g, or t
  misc_feature (315)..(318): n is a, c, g, or t
  misc_feature (320)..(324): n is a, c, g, or t
  misc_feature (326)..(329): n is a, c, g, or t
  misc_feature (331)..(333): n is a, c, g, or t
  misc_feature (338)..(341): n is a, c, g, or t
  misc_feature (343)..(349): n is a, c, g, or t
  misc_feature (351)..(354): n is a, c, g, or t
  misc_feature (357)..(357): n is a, c, g, or t
  misc_feature (359)..(359): n is a, c, g, or t
  misc_feature (363)..(364): n is a, c, g, or t
  misc_feature (366)..(366): n is a, c, g, or t
  misc_feature (369)..(376): n is a, c, g, or t
  misc_feature (378)..(386): n is a, c, g, or t
  misc_feature (389)..(390): n is a, c, g, or t
  misc_feature (393)..(393): n is a, c, g, or t
  misc_feature (395)..(396): n is a, c, g, or t
  misc_feature (399)..(400): n is a, c, g, or t
  misc_feature (404)..(404): n is a, c, g, or t
  misc_feature (406)..(407): n is a, c, g, or t
  misc_feature (409)..(412): n is a, c, g, or t
  misc_feature (415)..(417): n is a, c, g, or t
  misc_feature (420)..(428): n is a, c, g, or t
  misc_feature (430)..(434): n is a, c, g, or t
  misc_feature (436)..(440): n is a, c, g, or t
  misc_feature (442)..(445): n is a, c, g, or t
  misc_feature (447)..(450): n is a, c, g, or t
  misc_feature (454)..(466): n is a, c, g, or t
  misc_feature (469)..(470): n is a, c, g, or t
  misc_feature (472)..(475): n is a, c, g, or t
  misc_feature (479)..(480): n is a, c, g, or t
  misc_feature (482)..(484): n is a, c, g, or t
  misc_feature (486)..(487): n is a, c, g, or t
  misc_feature (489)..(489): n is a, c, g, or t
  misc_feature (492)..(494): n is a, c, g, or t
  misc_feature (498)..(500): n is a, c, g, or t
  misc_feature (503)..(505): n is a, c, g, or t
  misc_feature (508)..(515): n is a, c, g, or t
  misc_feature (518)..(520): n is a, c, g, or t
  misc_feature (522)..(526): n is a, c, g, or t
  misc_feature (528)..(532): n is a, c, g, or t
  misc_feature (534)..(536): n is a, c, g, or t
  misc_feature (539)..(542): n is a, c, g, or t
  misc_feature (547)..(563): n is a, c, g, or t
  misc_feature (565)..(568): n is a, c, g, or t
  misc_feature (571)..(573): n is a, c, g, or t
  misc_feature (576)..(581): n is a, c, g, or t
  misc_feature (583)..(583): n is a, c, g, or t
  misc_feature (586)..(589): n is a, c, g, or t
  misc_feature (591)..(596): n is a, c, g, or t
  misc_feature (598)..(600): n is a, c, g, or t
  misc_feature (602)..(607): n is a, c, g, or t
  misc_feature (609)..(611): n is a, c, g, or t
  misc_feature (613)..(624): n is a, c, g, or t
  misc_feature (626)..(630): n is a, c, g, or t
  misc_feature (633)..(641): n is a, c, g, or t
  misc_feature (643)..(648): n is a, c, g, or t
  misc_feature (650)..(650): n is a, c, g, or t
  misc_feature (653)..(660): n is a, c, g, or t
  misc_feature (662)..(669): n is a, c, g, or t
  misc_feature (673)..(676): n is a, c, g, or t
  misc_feature (678)..(679): n is a, c, g, or t
  misc_feature (683)..(684): n is a, c, g, or t
  misc_feature (686)..(686): n is a, c, g, or t
  misc_feature (688)..(694): n is a, c, g, or t
  misc_feature (696)..(696): n is a, c, g, or t
  misc_feature (698)..(698): n is a, c, g, or t
  misc_feature (701)..(705): n is a, c, g, or t
  misc_feature (709)..(714): n is a, c, g, or t
  misc_feature (718)..(723): n is a, c, g, or t
  misc_feature (725)..(725): n is a, c, g, or t
  misc_feature (727)..(727): n is a, c, g, or t
  misc_feature (729)..(730): n is a, c, g, or t
  misc_feature (732)..(738): n is a, c, g, or t
  misc_feature (740)..(740): n is a, c, g, or t
  misc_feature (742)..(742): n is a, c, g, or t
  misc_feature (744)..(748): n is a, c, g, or t
  misc_feature (750)..(750): n is a, c, g, or t
  misc_feature (753)..(753): n is a, c, g, or t
  misc_feature (755)..(756): n is a, c, g, or t
  misc_feature (759)..(760): n is a, c, g, or t
  misc_feature (762)..(764): n is a, c, g, or t
  misc_feature (767)..(767): n is a, c, g, or t
  misc_feature (770)..(770): n is a, c, g, or t
  misc_feature (773)..(773): n is a, c, g, or t
  misc_feature (775)..(782): n is a, c, g, or t
  misc_feature (784)..(786): n is a, c, g, or t
  misc_feature (791)..(791): n is a, c, g, or t
  misc_feature (793)..(796): n is a, c, g, or t
  misc_feature (798)..(798): n is a, c, g, or t
  misc_feature (801)..(805): n is a, c, g, or t
  misc_feature (807)..(809): n is a, c, g, or t
  misc_feature (811)..(812): n is a, c, g, or t
  misc_feature (814)..(814): n is a, c, g, or t
  misc_feature (817)..(822): n is a, c, g, or t
  misc_feature (827)..(830): n is a, c, g, or t
  misc_feature (837)..(837): n is a, c, g, or t
  misc_feature (842)..(842): n is a, c, g, or t
  misc_feature (852)..(853): n is a, c, g, or t
  misc_feature (855)..(856): n is a, c, g, or t
  misc_feature (859)..(859): n is a, c, g, or t
  misc_feature (861)..(861): n is a, c, g, or t
  misc_feature (863)..(864): n is a, c, g, or t
  misc_feature (866)..(869): n is a, c, g, or t
  misc_feature (872)..(872): n is a, c, g, or t
  misc_feature (876)..(877): n is a, c, g, or t
  misc_feature (886)..(887): n is a, c, g, or t
  misc_feature (894)..(894): n is a, c, g, or t
  misc_feature (896)..(896): n is a, c, g, or t
  misc_feature (898)..(900): n is a, c, g, or t
  misc_feature (902)..(904): n is a, c, g, or t
  misc_feature (907)..(913): n is a, c, g, or t
  misc_feature (917)..(921): n is a, c, g, or t
  misc_feature (923)..(923): n is a, c, g, or t
  misc_feature (925)..(925): n is a, c, g, or t
  misc_feature (927)..(930): n is a, c, g, or t
  misc_feature (935)..(942): n is a, c, g, or t
  misc_feature (944)..(947): n is a, c, g, or t
  misc_feature (950)..(951): n is a, c, g, or t
  misc_feature (956)..(958): n is a, c, g, or t
  misc_feature (960)..(963): n is a, c, g, or t
  misc_feature (965)..(970): n is a, c, g, or t
  misc_feature (972)..(973): n is a, c, g, or t
  misc_feature (975)..(986): n is a, c, g, or t
  misc_feature (988)..(997): n is a, c, g, or t
  misc_feature (999)..(1002): n is a, c, g, or t
  misc_feature (1005)..(1013): n is a, c, g, or t
  misc_feature (1015)..(1018): n is a, c, g, or t
  misc_feature (1020)..(1022): n is a, c, g, or t
  misc_feature (1024)..(1031): n is a, c, g, or t
  misc_feature (1033)..(1037): n is a, c, g, or t
  misc_feature (1039)..(1058): n is a, c, g, or t
  misc_feature (1062)..(1066): n is a, c, g, or t
  misc_feature (1073)..(1075): n is a, c, g, or t
  misc_feature (1078)..(1081): n is a, c, g, or t
  misc_feature (1083)..(1084): n is a, c, g, or t
  misc_feature (1087)..(1090): n is a, c, g, or t
  misc_feature (1098)..(1101): n is a, c, g, or t
  misc_feature (1105)..(1111): n is a, c, g, or t
  misc_feature (1113)..(1118): n is a, c, g, or t
  misc_feature (1120)..(1120): n is a, c, g, or t
  misc_feature (1123)..(1125): n is a, c, g, or t
  misc_feature (1128)..(1130): n is a, c, g, or t
  misc_feature (1133)..(1135): n is a, c, g, or t
  misc_feature (1137)..(1140): n is a, c, g, or t
  misc_feature (1144)..(1145): n is a, c, g, or t
  misc_feature (1148)..(1150): n is a, c, g, or t
  misc_feature (1155)..(1164): n is a, c, g, or t
  misc_feature (1166)..(1172): n is a, c, g, or t
  misc_feature (1174)..(1176): n is a, c, g, or t
  misc_feature (1178)..(1181): n is a, c, g, or t
  misc_feature (1183)..(1183): n is a, c, g, or t
  misc_feature (1186)..(1186): n is a, c, g, or t
  misc_feature (1188)..(1193): n is a, c, g, or t
  misc_feature (1196)..(1204): n is a, c, g, or t
  misc_feature (1207)..(1207): n is a, c, g, or t
  misc_feature (1210)..(1214): n is a, c, g, or t
  misc_feature (1216)..(1216): n is a, c, g, or t
  misc_feature (1222)..(1224): n is a, c, g, or t
  misc_feature (1226)..(1227): n is a, c, g, or t
  misc_feature (1230)..(1231): n is a, c, g, or t
  misc_feature (1233)..(1247): n is a, c, g, or t
  misc_feature (1249)..(1249): n is a, c, g, or t
  misc_feature (1252)..(1256): n is a, c, g, or t
  misc_feature (1262)..(1267): n is a, c, g, or t
  misc_feature (1269)..(1269): n is a, c, g, or t
  misc_feature (1271)..(1272): n is a, c, g, or t
  misc_feature (1275)..(1275): n is a, c, g, or t
  misc_feature (1277)..(1277): n is a, c, g, or t
  misc_feature (1279)..(1292): n is a, c, g, or t
  misc_feature (1294)..(1295): n is a, c, g, or t
  misc_feature (1298)..(1301): n is a, c, g, or t
  misc_feature (1303)..(1312): n is a, c, g, or t
  misc_feature (1314)..(1321): n is a, c, g, or t
  misc_feature (1323)..(1325): n is a, c, g, or t
  misc_feature (1327)..(1336): n is a, c, g, or t
  misc_feature (1338)..(1342): n is a, c, g, or t
  misc_feature (1346)..(1347): n is a, c, g, or t
  misc_feature (1349)..(1351): n is a, c, g, or t
  misc_feature (1353)..(1354): n is a, c, g, or t
  misc_feature (1356)..(1356): n is a, c, g, or t
  misc_feature (1358)..(1361): n is a, c, g, or t
  misc_feature (1368)..(1369): n is a, c, g, or t
  misc_feature (1372)..(1374): n is a, c, g, or t
  misc_feature (1377)..(1380): n is a, c, g, or t
  misc_feature (1382)..(1383): n is a, c, g, or t
  misc_feature (1388)..(1388): n is a, c, g, or t
  misc_feature (1390)..(1390): n is a, c, g, or t
  misc_feature (1392)..(1392): n is a, c, g, or t
  misc_feature (1396)..(1396): n is a, c, g, or t
  misc_feature (1398)..(1399): n is a, c, g, or t
  misc_feature (1402)..(1403): n is a, c, g, or t
  misc_feature (1406)..(1406): n is a, c, g, or t
  misc_feature (1409)..(1413): n is a, c, g, or t
  misc_feature (1416)..(1418): n is a, c, g, or t
  misc_feature (1422)..(1428): n is a, c, g, or t
  misc_feature (1431)..(1440): n is a, c, g, or t
  misc_feature (1442)..(1442): n is a, c, g, or t
  misc_feature (1446)..(1446): n is a, c, g, or t
  misc_feature (1448)..(1453): n is a, c, g, or t
  misc_feature (1455)..(1455): n is a, c, g, or t
  misc_feature (1459)..(1461): n is a, c, g, or t
  misc_feature (1463)..(1463): n is a, c, g, or t
  misc_feature (1465)..(1472): n is a, c, g, or t
  misc_feature (1474)..(1474): n is a, c, g, or t
  misc_feature (1477)..(1480): n is a, c, g, or t
  misc_feature (1482)..(1483): n is a, c, g, or t
  misc_feature (1485)..(1490): n is a, c, g, or t
  misc_feature (1496)..(1496): n is a, c, g, or t
  misc_feature (1498)..(1498): n is a, c, g, or t
  misc_feature (1504)..(1504): n is a, c, g, or t
  misc_feature (1506)..(1508): n is a, c, g, or t
  misc_feature (1510)..(1510): n is a, c, g, or t
  misc_feature (1512)..(1516): n is a, c, g, or t
  misc_feature (1521)..(1522): n is a, c, g, or t
  misc_feature (1524)..(1527): n is a, c, g, or t
  misc_feature (1531)..(1532): n is a, c, g, or t
  misc_feature (1535)..(1539): n is a, c, g, or t
  misc_feature (1542)..(1542): n is a, c, g, or t
  misc_feature (1544)..(1544): n is a, c, g, or t
  misc_feature (1548)..(1549): n is a, c, g, or t
  misc_feature (1552)..(1555): n is a, c, g, or t
  misc_feature (1557)..(1558): n is a, c, g, or t
  misc_feature (1562)..(1564): n is a, c, g, or t
  misc_feature (1566)..(1570): n is a, c, g, or t
  misc_feature (1573)..(1583): n is a, c, g, or t
  misc_feature (1587)..(1588): n is a, c, g, or t
  misc_feature (1591)..(1591): n is a, c, g, or t
  misc_feature (1594)..(1594): n is a, c, g, or t
  misc_feature (1596)..(1597): n is a, c, g, or t
  misc_feature (1602)..(1602): n is a, c, g, or t
  misc_feature (1604)..(1605): n is a, c, g, or t
  misc_feature (1607)..(1608): n is a, c, g, or t
  misc_feature (1610)..(1610): n is a, c, g, or t
  misc_feature (1613)..(1616): n is a, c, g, or t
  misc_feature (1618)..(1618): n is a, c, g, or t
  misc_feature (1620)..(1626): n is a, c, g, or t
  misc_feature (1628)..(1628): n is a, c, g, or t
  misc_feature (1631)..(1634): n is a, c, g, or t
  misc_feature (1636)..(1636): n is a, c, g, or t
  misc_feature (1640)..(1645): n is a, c, g, or t
  misc_feature (1647)..(1649): n is a, c, g, or t
  misc_feature (1651)..(1654): n is a, c, g, or t
  misc_feature (1656)..(1659): n is a, c, g, or t
  misc_feature (1661)..(1664): n is a, c, g, or t
  misc_feature (1666)..(1669): n is a, c, g, or t
  misc_feature (1672)..(1673): n is a, c, g, or t
  misc_feature (1677)..(1680): n is a, c, g, or t
  misc_feature (1682)..(1684): n is a, c, g, or t
  misc_feature (1686)..(1691): n is a, c, g, or t
  misc_feature (1696)..(1702): n is a, c, g, or t
  misc_feature (1704)..(1707): n is a, c, g, or t
  misc_feature (1709)..(1710): n is a, c, g, or t
  misc_feature (1712)..(1712): n is a, c, g, or t
  misc_feature (1717)..(1724): n is a, c, g, or t
  misc_feature (1726)..(1726): n is a, c, g, or t
  misc_feature (1728)..(1728): n is a, c, g, or t
  misc_feature (1730)..(1736): n is a, c, g, or t
  misc_feature (1739)..(1740): n is a, c, g, or t
  misc_feature (1742)..(1747): n is a, c, g, or t
  misc_feature (1750)..(1753): n is a, c, g, or t
  misc_feature (1755)..(1757): n is a, c, g, or t
  misc_feature (1760)..(1767): n is a, c, g, or t
  misc_feature (1769)..(1769): n is a, c, g, or t
  misc_feature (1771)..(1771): n is a, c, g, or t
  misc_feature (1775)..(1781): n is a, c, g, or t
  misc_feature (1783)..(1783): n is a, c, g, or t
  misc_feature (1786)..(1786): n is a, c, g, or t
  misc_feature (1792)..(1797): n is a, c, g, or t
  misc_feature (1802)..(1807): n is a, c, g, or t
  misc_feature (1812)..(1817): n is a, c, g, or t
  misc_feature (1822)..(1828): n is a, c, g, or t
  misc_feature (1833)..(1834): n is a, c, g, or t
nnnntnnnaaannntnnnaananannnnnnnaannttnnnnnannntnnnnnannnnnnnntnnancnnantnnannnaanntnnnnnnnnnnnnnnnaaanatntnnanannttnnnnantntnnncnnntntnntntnnnnntttntttnnttttnnnnnanttnnnnnnnannnnnnnnnannnnannnnannnnnnnnnnnnnntnnnannnnnttnnaannnntnnnaaannnnnannnannnnnnnnnnnannntntnnnnnnntttnnnnnnnntnnnnnntnntnnnnannnnnnnannnaannttnnnnannnnnannnnannntaaannnnannnnnnncnnnntanancctnnantannnnnnnntnnnnnnnnnttnnaantnnttnnaaananntnnnnaannnttnnnnnnnnntnnnnntnnnnncnnnntnnnncaannnnnnnnnnnnnttnntnnnntttnntnnnanntnttnnnaaannnttnnnaannnnnnnnaannntnnnnnannnnntnnnaannnnttttnnnnnnnnnnnnnnnnntnnnnttnnnaannnnnnanaannnntnnnnnnannntnnnnnnannnannnnnnnnnnnntnnnnnttnnnnnnnnntnnnnnntnttnnnnnnnntnnnnnnnntttnnnnannttanntnannnnnnntnanttnnnnnaaannnnnnaaannnnnnananannannnnnnnanantnnnnnanaanannaannannnaanaanaanannnnnnnnannngaaantnnnngnaannnnnannnannanaannnnnnaaaannnnaaaaaanaaaanaaaaaaaaanntnnaananannannnnaanaaannaaaaaaaannaaaaaantntnnntnnnttnnnnnnnattnnnnntnantnnnncttannnnnnnntnnnnaannttttnnnannnnannnnnngnnannnnnnnnnnnntnnnnnnnnnntnnnnttnnnnnnnnntnnnntnnnannnnnnnnannnnncnnnnnnnnnnnnnnnnnnnntttnnnnnttttttnnnatnnnnannaannnnaaaaaaannnnaaannnnnnnannnnnnanttnnnttnnnttnnntnnnntttnnttnnnttttnnnnnnnnnntnnnnnnnannnannnnanatnannnnnnttnnnnnnnnnttnaannnnntnaaaaannntnnaannannnnnnnnnnnnnnnanaannnnnaaaaannnnnnananntantnannnnnnnnnnnnnnannttnnnnannnnnnnnnntnnnnnnnnannnannnnnnnnnnannnnnaaannannnannanannnnaaaaaannttnnnaannnntnnaaatnananaaantnnaannaanttnnnnnaannnaaannnnnnnaannnnnnnnnntngaanannnnnnanaaannnanannnnnnnnanaannnntnntnnnnnnttttananaataanannnantnnnnnaaaannannnnaaannaannnnnaananaatnnaannnnannaaannngnnnnnaannnnnnnnnnnaaannttnttnanntttantnnanntnaannnnanannnnnnntnaannnnanttannnnnnannnannnnannnnannnnannnnaanntaannnnannntnnnnnnaaaannnnnnnannnntnnanaaaannnnnnnncntntnnnnnnnttnncnnnnnnttnnnntnnnaannnnnnnnananaaannnnnnnanaanaaaaannnnnnaaaannnnnnaaaannnnnnaaaannnnnnnaaaanngatcaaaaacgatcaaaaacgatcaaaaacgatcaaaaacgatcaaaatataagtttcttaaaaattaataatttttttagaaaatattaaaatcatttttttaataaaaaaggtctaaaatcatcaaaaatttagcaaaaacaatcaaaaaagtggaaaattgatcaaaaaaacattaaaaatggttttttttaaaaaattaaattaaggcaatttatggcctaaataggtttctaacattctaaaccaatctatttcgcttaaatcaatacttaaagaattttttgcagcattaattctttcagtttttacggttccaattacaggatgaatttttgatggatgttttaatatccatgacaataataattgatcttttgaagcattgtattttttcataagctcttctaataaaaaatgaatttttttattattttcatccttatccttaaatatcgtccctaaagggctccagctcataggaattatatcattaacaaacatatagtctaatgatgaatcaaacaaaggtttattatgggataaagaaaactctatctgattagcactaaccttagatttagtagaaattaaatcagtttgaatatccgtaaaatttgaaactccaaatgaatttatttttccttgagacaataaagtttcaatagctttagaaatttcgtcagggtgcattagaggactaggcctatgtaacaaaaatatatctaaataatctgcatttaaatctttgattgatttttcggcactaaatattatataatccgagtcatactgatagtgtttgactttatttaatcgagtttctccgacatattgaataccacattttgaaattaactgaacttcttctcgtttaatactcgaatttttaaaagctttaccaaactccatttcagttgtataatctccatatatatcggcatgatcaaacgaagtaatccctttttctaaattaaaatgaattaatctttccatttcattttgagaaagcgaacttccccatttgccccagttcatacaaccttgtataattcttgaaaaattagatttcatttgaaattattttttattaaaatactaattaaaactgacttacatttgtgaaaatttaaaaaaattgattgccaattacactaaagaatttcgctataatttaaaattatcatttcctgtaatgcttggaatgttagggcatacatttgtggcgtttgccgataatgtaatggttggtcaactaggtacagcagaactggctgcagtttctttgggtaatagttttgtgtttatagcaatgtctttaggaattggattttcaactgctattactccgcttgttgctgaagctgatgcatccaataacatttcagaaggcaagaatgcattcaaacacggtttacttctttgtactattttaagcgttttactttttttaattattatattacttaaacctgtaatgtattatatggatcaacccaaagaggttgtagaattggctattccttatttaaactttgtttctctttcactaattcctctgatagtatttcaggcattaaaacaattttctgacggactttctaataccaaatacccaatgtatgccacaatattggctaacgtaataaacataacattaaattactttctaatatttggaacatttggttttcctaagttaggaataactggagcggctataggaactcttatatcaagaattattatggtttattttttatggatgattttcaagcacaaagaaaaatttaaaccttatataactggatttaattttagaaaagttgaaaaaaaaatcactaataaactatttaatttaggatttccatctgctcttcaaatgttttttgaagttgggatttttactgctgctatttggttaagtggagttttaggaaaaaatccacaagcagcaaatcaaatagccctaaacttatcgagtatgacttttatgataggaataggtctttcggttgccgctatggtaagagttggtaatcaaaaaggattaaatgattttgtttcgcttagaagaattgcgttttctattttctttttaacttttttaattgaaattatttttgcatcatttttcttggtgttcagagactggcttccaacat

SEQ ID NO: 997 - DNA, 4000 bp, Escherichia coli
  misc_feature (127)..(127): n is a, c, g, or t
  misc_feature (1369)..(1369): n is a, c, g, or t
  misc_feature (1990)..(1990): n is a, c, g, or t
  misc_feature (2422)..(2422): n is a, c, g, or t
  misc_feature (2431)..(2431): n is a, c, g, or t
  misc_feature (2653)..(2653): n is a, c, g, or t
  misc_feature (2847)..(2847): n is a, c, g, or t
  misc_feature (3138)..(3138): n is a, c, g, or t
  misc_feature (3308)..(3308): n is a, c, g, or t
  misc_feature (3334)..(3334): n is a, c, g, or t
  misc_feature (3349)..(3349): n is a, c, g, or t
  misc_feature (3359)..(3359): n is a, c, g, or t
  misc_feature (3814)..(3814): n is a, c, g, or t
  misc_feature (3991)..(3991): n is a, c, g, or t
gagcagattgattctctccacgccgcggcgcttgcggatgaagtcggcggcgctgccgacgtccttcacggcggtggacgtggtggtgagcggagcattgcgctcggccggctggtccatctccggnggacgcgtggagcgcccgtagccgcgcaggtcgacgaggtagacgtcgtagccctgccgcgcgatgtattccatccacgacacgccgttcagcggcaggtcgaaggccgtttccgccggatacgtcgagccgtgcacgaacagcacgatgcgctcgccggggaaccgcgactccgaggccgggcgcttgttgcgcacgtagagctcgatgccggggtcggccgagggaaccatgaactcctcggtgaccagggcttgctcgtgcagcacggtggcgcagccgcccagccacaacggcagggcgaggaacagcaatggcgcaagtctcgacatgaatgttgctccccggctagcgatcctcggcgtcgcgcatgtcctggtccagcagcgcatcacggcctttcgaggtgatggtgaaggcgccagcattcggcctggcgaggccgaaggcgccaagcttggcggcgatattcattggaacgctcggcgggtcgcgcttcgcgtccgcggcgtccctcagcttccgcagccagtcgaaatcctccgccgtcaggtccgaatccatgcctataataatctcccggatgcacatccaaaccgtcaaggcggcgtaccgccgctacgcgcgcgtctacgacgcgctgttcgggcccgtccttcagcccggtcgcaaggcggtcgtcaaggcgctcggctgccggccgggcgagcgcgtgctcgaggtcggcgtgggcaccgggctgtcgctgccgctttatccgccgcatacgcgcgtcaccggcatcgacgtgtcgacagagatgctcgacaaggcgcgcgcccgggtggaaaaccgcaggctggcgaacgtcgaggcgctgctcgagatgaacgccgaggagatgacgttccccgacgcgagcttcgacaaggtggtggcgatgtacgtggtctcggtcgtggagcgcccggcgcgcctgctcgaggagctgcaccgcgtctgccggccgcagggcgagatcttcatcgtcaatcacctgcgttccgacaacccgcttctcggcgccgtggaaaagagcctggcgcggttctcggacaagctcggattccgtcccgacttcgcgctgcgcgacctggtggatggctcggagcaggtgacggaagtggcgcgcatcaacctcctgtggaaagtgctgcgcctgcgcaacggcatcgcgcatccgcggtttgctacttcgtgcgcaccgcacccatcaggtgatcnggcagccaggtagcgatcgtcgggaacacgcagaggatcacgatcgcgaggaacatgcacagcacgtagggaatcgttccccagatcactttcatgagcggcacgtcgggagcgatggccttgacgatgtagatgttgaggccgaccggcggatggatcaggccgatctccatgttgatggtcatgatgacgccgaaccacaccgggtcgaagcccgccgcccggatgatcggcagcaggatcgggctggtcatcaggatgatcgccgccggcgggatgaagaagccgcacaccagcaggaacaggttgatcagcgccatcagcacccagcggttgacgtgcatgtcggcgatcgcctgcgcgagcgtctgcgtgaggtagagcgaagtcagcatgtagccgaacagcaccgccgcgccgatgatcgtcaggatcatcaccgactcgcgcgtcgtgtcgcgcaggatctgccaccagtcgcgcggctgccacatgcggtagatgagcaccgccagaaccacgcacagcgccgccccgacgccggcggcttccgacggcgtcgccacgcctccatacagcacgtacatgacgccgacgatgatggcgaggaacggcgctacnttcggcaccgactggaatttctccttccaggaatagcggaactccggcgcatgggcgcggaagccccggcgccagatggcgaacagcgtccagagcatgaacaggcccgtcagcatgagcccgggaaccacgccggcgaggaacaggcggccgatcgaggtctcggtggcgatgccgtagaggatgaaggtgatcgagggcgggatcaggatgccgagcgtgccgccggcgcagatcgagccggtggcgatctcgtccggatagccgcgccggcgcatctccgggatgcccatcttgccgatggcggcgcagcacgccggggacgagccggtgagcgccgcgaacagggcgcaggcgcccaggttggagatcaccagcccgcccggcagccggtacagccagcggtcgagcgcctcgtacaggtcgcgcccngcgggcgangagccgatcgccgcacccatcatgacgaacatcgggatcgagaccagggtgaaatcgttcaggccggcatagaaggtctccgccaccacctgcagcgagccgaatccctggaagatcagcaggaacacgatcgacagcgcgccgagcccgaacgccaccggggcgccgcaaagcagcacgatcagcgtcgcggtgaggacgatggcgccttgagtggcaggnctcatggctcgatgccgaacggcggctcgcgcccgctcacgaggcaataaagatcggcgaagtactgcaggcagaggatcgcgaggccgatcggcatcgagctgtagggaatccacagccgcgcgcgccacatcgtgtcggagacccagcggctgtcccaggcctcgagccagaaacgcgcggtcagcgctgcnaggaccaggcagaacgcgagcgacatgacgatcgaggccagggcgagccaccagcggccgcgcggcccgagatagtgcgggagaacgtccacgttcacgtgcccgcgggtcagcagcacataggggctgccgacgaacgtggcggccaccaggctccaggtgacgaagtcggtctgccagatggtgttctggttgagcgcgtagcgcacgaacaccatctcgcagaccaccagcacgccgagcccgatcagcgccgcggcgacgatgccgcagagctgcgagacgcggcgnatgccgcgaacgaagaagtccaagctacttgacgctcagcgcttcttcgatcagcttcttgccgttggggacttccttgtcgaactcggcatacgagctctcgcgcgccaccttgatccacgcgtcgtactcggccggcgtgagagtgatgacctcgaccttgtggtccntgaacaccttcaccatctcgtcgtcnagacctttggcgttngcggcgaagnactgctgcgacttcctgccggcctgcagcagggcgtcctgctgcttcctgtccaggcgcaggaaggttttcttggacatcagcaccggctcgtacatgaaccagagcgcgttgtcgcccggcgcggtcaggcacttcacctgctcgtagatgcggaacgagacgaagctgccggagctggtgtcggtggcgtcggcgacgccggtctgcaatgcgttgtagacctcgttcgacgggatcgacacgatcgaggcgccggccgattgccacatcgaggcgaaagtcggcccggcggagcgcaccttcaggcccttgatgtcctcgggcctgcggatgcagcctttcttcgaggcgatcgcgccggcgagccaggcgtcggcgagcacgacgacgcccgccttgtcgatgtgcgccttgatctccttcatgaagggcgaattgttgagccgctgcgcncgctcgtggctgcgcaccaggccgggcatcagcgtggcgccgaaggcgcgcaccttgccgctcgcgtaatcgagcgggaacgacgagatgtcgagctgcccgttgaccagggcgttccactgctcgttgggcttgaacagggacgccccggggtagacctggatctcgagatcgacnttggccgcc

SEQ ID NO: 998 - DNA, 4000 bp, Escherichia coli
  misc_feature (37)..(37): n is a, c, g, or t
  misc_feature (104)..(104): n is a, c, g, or t
  misc_feature (229)..(229): n is a, c, g, or t
  misc_feature (241)..(241): n is a, c, g, or t
  misc_feature (737)..(737): n is a, c, g, or t
  misc_feature (740)..(740): n is a, c, g, or t
  misc_feature (743)..(743): n is a, c, g, or t
  misc_feature (776)..(776): n is a, c, g, or t
  misc_feature (803)..(803): n is a, c, g, or t
  misc_feature (854)..(854): n is a, c, g, or t
  misc_feature (857)..(857): n is a, c, g, or t
  misc_feature (860)..(860): n is a, c, g, or t
  misc_feature (862)..(862): n is a, c, g, or t
  misc_feature (1664)..(1664): n is a, c, g, or t
  misc_feature (1990)..(1990): n is a, c, g, or t
  misc_feature (2228)..(2229): n is a, c, g, or t
  misc_feature (2303)..(2304): n is a, c, g, or t
  misc_feature (2306)..(2307): n is a, c, g, or t
  misc_feature (2315)..(2315): n is a, c, g, or t
  misc_feature (2317)..(2318): n is a, c, g, or t
  misc_feature (2322)..(2322): n is a, c, g, or t
  misc_feature (2330)..(2330): n is a, c, g, or t
  misc_feature (2333)..(2333): n is a, c, g, or t
  misc_feature (2341)..(2342): n is a, c, g, or t
  misc_feature (2348)..(2348): n is a, c, g, or t
  misc_feature (2351)..(2352): n is a, c, g, or t
  misc_feature (2355)..(2355): n is a, c, g, or t
  misc_feature (2357)..(2358): n is a, c, g, or t
  misc_feature (2360)..(2363): n is a, c, g, or t
  misc_feature (2365)..(2366): n is a, c, g, or t
  misc_feature (2368)..(2370): n is a, c, g, or t
  misc_feature (2372)..(2383): n is a, c, g, or t
  misc_feature (2387)..(2392): n is a, c, g, or t
  misc_feature (2399)..(2399): n is a, c, g, or t
  misc_feature (2401)..(2402): n is a, c, g, or t
  misc_feature (2404)..(2407): n is a, c, g, or t
  misc_feature (2411)..(2413): n is a, c, g, or t
  misc_feature (2416)..(2422): n is a, c, g, or t
  misc_feature (2424)..(2424): n is a, c, g, or t
  misc_feature (2427)..(2427): n is a, c, g, or t
  misc_feature (2429)..(2429): n is a, c, g, or t
  misc_feature (2432)..(2435): n is a, c, g, or t
  misc_feature (2438)..(2439): n is a, c, g, or t
  misc_feature (2441)..(2444): n is a, c, g, or t
  misc_feature (2447)..(2451): n is a, c, g, or t
  misc_feature (2453)..(2453): n is a, c, g, or t
  misc_feature (2455)..(2455): n is a, c, g, or t
  misc_feature (2457)..(2461): n is a, c, g, or t
  misc_feature (2463)..(2463): n is a, c, g, or t
  misc_feature (2465)..(2466): n is a, c, g, or t
  misc_feature (2468)..(2472): n is a, c, g, or t
  misc_feature (2474)..(2493): n is a, c, g, or t
  misc_feature (2495)..(2495): n is a, c, g, or t
  misc_feature (2497)..(2497): n is a, c, g, or t
  misc_feature (2501)..(2502): n is a, c, g, or t
  misc_feature (2504)..(2510): n is a, c, g, or t
  misc_feature (2512)..(2519): n is a, c, g, or t
  misc_feature (2522)..(2523): n is a, c, g, or t
  misc_feature (2525)..(2525): n is a, c, g, or t
  misc_feature (2527)..(2529): n is a, c, g, or t
  misc_feature (2535)..(2536): n is a, c, g, or t
  misc_feature (2538)..(2541): n is a, c, g, or t
  misc_feature (2543)..(2543): n is a, c, g, or t
  misc_feature (2546)..(2550): n is a, c, g, or t
  misc_feature (2552)..(2558): n is a, c, g, or t
  misc_feature (2560)..(2575): n is a, c, g, or t
  misc_feature (2577)..(2577): n is a, c, g, or t
  misc_feature (2580)..(2586): n is a, c, g, or t
  misc_feature (2589)..(2589): n is a, c, g, or t
  misc_feature (2591)..(2592): n is a, c, g, or t
  misc_feature (2596)..(2602): n is a, c, g, or t
  misc_feature (2604)..(2605): n is a, c, g, or t
  misc_feature (2607)..(2610): n is a, c, g, or t
  misc_feature (2612)..(2613): n is a, c, g, or t
  misc_feature (2615)..(2616): n is a, c, g, or t
  misc_feature (2618)..(2618): n is a, c, g, or t
  misc_feature (2620)..(2621): n is a, c, g, or t
  misc_feature (2624)..(2626): n is a, c, g, or t
  misc_feature (2628)..(2631): n is a, c, g, or t
  misc_feature (2633)..(2637): n is a, c, g, or t
  misc_feature (2639)..(2640): n is a, c, g, or t
  misc_feature (2642)..(2642): n is a, c, g, or t
  misc_feature (2644)..(2649): n is a, c, g, or t
  misc_feature (2651)..(2654): n is a, c, g, or t
  misc_feature (2657)..(2657): n is a, c, g, or t
  misc_feature (2661)..(2667): n is a, c, g, or t
  misc_feature (2669)..(2670): n is a, c, g, or t
  misc_feature (2672)..(2672): n is a, c, g, or t
  misc_feature (2674)..(2677): n is a, c, g, or t
  misc_feature (2679)..(2683): n is a, c, g, or t
  misc_feature (2685)..(2687): n is a, c, g, or t
  misc_feature (2689)..(2692): n is a, c, g, or t
  misc_feature (2695)..(2699): n is a, c, g, or t
  misc_feature (2701)..(2701): n is a, c, g, or t
  misc_feature (2703)..(2704): n is a, c, g, or t
  misc_feature (2706)..(2716): n is a, c, g, or t
  misc_feature (2718)..(2719): n is a, c, g, or t
  misc_feature (2722)..(2722): n is a, c, g, or t
  misc_feature (2724)..(2729): n is a, c, g, or t
  misc_feature (2731)..(2731): n is a, c, g, or t
  misc_feature (2734)..(2753): n is a, c, g, or t
  misc_feature (2756)..(2759): n is a, c, g, or t
  misc_feature (2761)..(2761): n is a, c, g, or t
  misc_feature (2763)..(2765): n is a, c, g, or t
  misc_feature (2769)..(2769): n is a, c, g, or t
  misc_feature (2771)..(2773): n is a, c, g, or t
  misc_feature (2775)..(2778): n is a, c, g, or t
  misc_feature (2780)..(2780): n is a, c, g, or t
  misc_feature (2782)..(2784): n is a, c, g, or t
  misc_feature (2787)..(2787): n is a, c, g, or t
  misc_feature (2790)..(2791): n is a, c, g, or t
  misc_feature (2794)..(2794): n is a, c, g, or t
  misc_feature (2798)..(2798): n is a, c, g, or t
  misc_feature (2800)..(2803): n is a, c, g, or t
  misc_feature (2805)..(2806): n is a, c, g, or t
  misc_feature (2808)..(2816): n is a, c, g, or t
  misc_feature (2818)..(2819): n is a, c, g, or t
  misc_feature (2821)..(2822): n is a, c, g, or t
  misc_feature (2826)..(2826): n is a, c, g, or t
  misc_feature (2831)..(2831): n is a, c, g, or t
  misc_feature (2833)..(2836): n is a, c, g, or t
  misc_feature (2838)..(2843): n is a, c, g, or t
  misc_feature (2845)..(2846): n is a, c, g, or t
  misc_feature (2848)..(2855): n is a, c, g, or t
  misc_feature (2857)..(2857): n is a, c, g, or t
  misc_feature (2859)..(2864): n is a, c, g, or t
  misc_feature (2868)..(2870): n is a, c, g, or t
  misc_feature (2872)..(2872): n is a, c, g, or t
  misc_feature (2877)..(2877): n is a, c, g, or t
  misc_feature (2880)..(2880): n is a, c, g, or t
  misc_feature (2884)..(2887): n is a, c, g, or t
  misc_feature (2889)..(2890): n is a, c, g, or t
  misc_feature (2892)..(2894): n is a, c, g, or t
  misc_feature (2896)..(2897): n is a, c, g, or t
  misc_feature (2900)..(2901): n is a, c, g, or t
  misc_feature (2903)..(2905): n is a, c, g, or t
  misc_feature (2909)..(2914): n is a, c, g, or t
  misc_feature (2917)..(2919): n is a, c, g, or t
  misc_feature (2921)..(2924): n is a, c, g, or t
  misc_feature (2927)..(2928): n is a, c, g, or t
  misc_feature (2930)..(2930): n is a, c, g, or t
  misc_feature (2932)..(2934): n is a, c, g, or t
  misc_feature (2937)..(2942): n is a, c, g, or t
  misc_feature (2944)..(2945): n is a, c, g, or t
  misc_feature (2947)..(2949): n is a, c, g, or t
  misc_feature (2951)..(2956): n is a, c, g, or t
  misc_feature (2958)..(2958): n is a, c, g, or t
  misc_feature (2960)..(2961): n is a, c, g, or t
  misc_feature (2965)..(2965): n is a, c, g, or t
  misc_feature (2967)..(2988): n is a, c, g, or t
  misc_feature (2990)..(2990): n is a, c, g, or t
  misc_feature (2992)..(2995): n is a, c, g, or t
  misc_feature (2997)..(2997): n is a, c, g, or t
  misc_feature (2999)..(3005): n is a, c, g, or t
  misc_feature (3007)..(3008): n is a, c, g, or t
  misc_feature (3011)..(3011): n is a, c, g, or t
  misc_feature (3013)..(3015): n is a, c, g, or t
  misc_feature (3017)..(3017): n is a, c, g, or t
  misc_feature (3019)..(3021): n is a, c, g, or t
  misc_feature (3024)..(3032): n is a, c, g, or t
  misc_feature (3034)..(3041): n is a, c, g, or t
  misc_feature (3043)..(3045): n is a, c, g, or t
  misc_feature (3049)..(3049): n is a, c, g, or t
  misc_feature (3051)..(3053): n is a, c, g, or t
  misc_feature (3055)..(3068): n is a, c, g, or t
  misc_feature (3070)..(3070): n is a, c, g, or t
  misc_feature (3072)..(3072): n is a, c, g, or t
  misc_feature (3076)..(3082): n is a, c, g, or t
  misc_feature (3085)..(3091): n is a, c, g, or t
  misc_feature (3093)..(3096): n is a, c, g, or t
  misc_feature (3099)..(3099): n is a, c, g, or t
  misc_feature (3101)..(3103): n is a, c, g, or t
  misc_feature (3107)..(3108): n is a, c, g, or t
  misc_feature (3111)..(3115): n is a, c, g, or t
  misc_feature (3119)..(3120): n is a, c, g, or t
  misc_feature (3122)..(3122): n is a, c, g, or t
  misc_feature (3124)..(3124): n is a, c, g, or t
  misc_feature (3126)..(3127): n is a, c, g, or t
  misc_feature (3129)..(3131): n is a, c, g, or t
  misc_feature (3133)..(3134): n is a, c, g, or t
  misc_feature (3136)..(3143): n is a, c, g, or t
  misc_feature (3145)..(3145): n is a, c, g, or t
  misc_feature (3147)..(3149): n is a, c, g, or t
  misc_feature (3151)..(3152): n is a, c, g, or t
  misc_feature (3155)..(3156): n is a, c, g, or t
  misc_feature (3158)..(3159): n is a, c, g, or t
  misc_feature (3162)..(3162): n is a, c, g, or t
  misc_feature (3164)..(3165): n is a, c, g, or t
  misc_feature (3167)..(3172): n is a, c, g, or t
  misc_feature (3177)..(3177): n is a, c, g, or t
  misc_feature (3179)..(3183): n is a, c, g, or t
  misc_feature (3186)..(3186): n is a, c, g, or t
  misc_feature (3188)..(3188): n is a, c, g, or t
  misc_feature (3190)..(3190): n is a, c, g, or t
  misc_feature (3192)..(3196): n is a, c, g, or t
  misc_feature (3200)..(3208): n is a, c, g, or t
  misc_feature (3210)..(3213): n is a, c, g, or t
  misc_feature (3215)..(3215): n is a, c, g, or t
  misc_feature (3217)..(3217): n is a, c, g, or t
  misc_feature (3220)..(3220): n is a, c, g, or t
  misc_feature (3222)..(3223): n is a, c, g, or t
  misc_feature (3225)..(3231): n is a, c, g, or t
  misc_feature (3236)..(3240): n is a, c, g, or t
  misc_feature (3242)..(3247): n is a, c, g, or t
  misc_feature (3249)..(3256): n is a, c, g, or t
  misc_feature (3258)..(3267): n is a, c, g, or t
  misc_feature (3269)..(3270): n is a, c, g, or t
  misc_feature (3273)..(3273): n is a, c, g, or t
  misc_feature (3275)..(3276): n is a, c, g, or t
  misc_feature (3278)..(3278): n is a, c, g, or t
  misc_feature (3281)..(3282): n is a, c, g, or t
  misc_feature (3284)..(3288): n is a, c, g, or t
  misc_feature (3290)..(3294): n is a, c, g, or t
  misc_feature (3296)..(3297): n is a, c, g, or t
  misc_feature (3299)..(3300): n is a, c, g, or t
  misc_feature (3302)..(3302): n is a, c, g, or t
  misc_feature (3304)..(3312): n is a, c, g, or t
  misc_feature (3315)..(3319): n is a, c, g, or t
  misc_feature (3324)..(3325): n is a, c, g, or t
  misc_feature (3328)..(3328): n is a, c, g, or t
  misc_feature (3331)..(3338): n is a, c, g, or t
  misc_feature (3341)..(3341): n is a, c, g, or t
  misc_feature (3344)..(3347): n is a, c, g, or t
  misc_feature (3349)..(3351): n is a, c, g, or t
  misc_feature (3355)..(3359): n is a, c, g, or t
  misc_feature (3361)..(3362): n is a, c, g, or t
  misc_feature (3364)..(3364): n is a, c, g, or t
  misc_feature (3366)..(3366): n is a, c, g, or t
  misc_feature (3368)..(3372): n is a, c, g, or t
  misc_feature (3375)..(3378): n is a, c, g, or t
  misc_feature (3380)..(3381): n is a, c, g, or t
  misc_feature (3385)..(3385): n is a, c, g, or t
  misc_feature (3390)..(3391): n is a, c, g, or t
  misc_feature (3397)..(3399): n is a, c, g, or t
  misc_feature (3402)..(3404): n is a, c, g, or t
  misc_feature (3406)..(3406): n is a, c, g, or t
  misc_feature (3413)..(3423): n is a, c, g, or t
  misc_feature (3425)..(3425): n is a, c, g, or t
  misc_feature (3427)..(3427): n is a, c, g, or t
  misc_feature (3429)..(3429): n is a, c, g, or t
  misc_feature (3432)..(3432): n is a, c, g, or t
  misc_feature (3434)..(3439): n is a, c, g, or t
  misc_feature (3441)..(3445): n is a, c, g, or t
  misc_feature (3451)..(3457): n is a, c, g, or t
  misc_feature (3459)..(3459): n is a, c, g, or t
  misc_feature (3461)..(3464): n is a, c, g, or t
  misc_feature (3468)..(3477): n is a, c, g, or t
  misc_feature (3480)..(3480): n is a, c, g, or t
  misc_feature (3482)..(3486): n is a, c, g, or t
  misc_feature (3488)..(3497): n is a, c, g, or t
  misc_feature (3500)..(3501): n is a, c, g, or t
  misc_feature (3504)..(3504): n is a, c, g, or t
  misc_feature (3507)..(3510): n is a, c, g, or t
  misc_feature (3512)..(3513): n is a, c, g, or t
  misc_feature (3515)..(3520): n is a, c, g, or t
  misc_feature (3522)..(3522): n is a, c, g, or t
  misc_feature (3524)..(3524): n is a, c, g, or t
  misc_feature (3527)..(3528): n is a, c, g, or t
  misc_feature (3530)..(3534): n is a, c, g, or t
  misc_feature (3536)..(3538): n is a, c, g, or t
  misc_feature (3540)..(3542): n is a, c, g, or t
  misc_feature (3546)..(3571): n is a, c, g, or t
  misc_feature (3574)..(3574): n is a, c, g, or t
  misc_feature (3576)..(3577): n is a, c, g, or t
  misc_feature (3580)..(3580): n is a, c, g, or t
  misc_feature (3582)..(3582): n is a, c, g, or t
  misc_feature (3584)..(3584): n is a, c, g, or t
  misc_feature (3586)..(3587): n is a, c, g, or t
  misc_feature (3589)..(3590): n is a, c, g, or t
  misc_feature (3592)..(3595): n is a, c, g, or t
  misc_feature (3597)..(3597): n is a, c, g, or t
  misc_feature (3599)..(3599): n is a, c, g, or t
  misc_feature (3601)..(3601): n is a, c, g, or t
  misc_feature (3603)..(3605): n is a, c, g, or t
  misc_feature (3609)..(3610): n is a, c, g, or t
  misc_feature (3613)..(3616): n is a, c, g, or t
  misc_feature (3618)..(3621): n is a, c, g, or t
  misc_feature (3624)..(3625): n is a, c, g, or t
  misc_feature (3627)..(3630): n is a, c, g, or t
  misc_feature (3632)..(3661): n is a, c, g, or t
  misc_feature (3664)..(3671): n is a, c, g, or t
  misc_feature (3675)..(3676): n is a, c, g, or t
  misc_feature (3678)..(3679): n is a, c, g, or t
  misc_feature (3682)..(3684): n is a, c, g, or t
  misc_feature (3686)..(3686): n is a, c, g, or t
  misc_feature (3690)..(3690): n is a, c, g, or t
  misc_feature (3693)..(3693): n is a, c, g, or t
  misc_feature (3695)..(3696): n is a, c, g, or t
  misc_feature (3698)..(3698): n is a, c, g, or t
  misc_feature (3701)..(3704): n is a, c, g, or t
  misc_feature (3706)..(3711): n is a, c, g, or t
  misc_feature (3713)..(3714): n is a, c, g, or t
  misc_feature (3719)..(3719): n is a, c, g, or t
  misc_feature (3721)..(3726): n is a, c, g, or t
  misc_feature (3728)..(3728): n is a, c, g, or t
  misc_feature (3730)..(3731): n is a, c, g, or t
  misc_feature (3733)..(3735): n is a, c, g, or t
  misc_feature (3737)..(3738): n is a, c, g, or t
  misc_feature (3740)..(3740): n is a, c, g, or t
  misc_feature (3743)..(3745): n is a, c, g, or t
  misc_feature (3747)..(3747): n is a, c, g, or t
  misc_feature (3750)..(3750): n is a, c, g, or t
  misc_feature (3753)..(3753): n is a, c, g, or t
  misc_feature (3756)..(3762): n is a, c, g, or t
  misc_feature (3764)..(3765): n is a, c, g, or t
  misc_feature (3768)..(3769): n is a, c, g, or t
  misc_feature (3771)..(3771): n is a, c, g, or t
  misc_feature (3773)..(3773): n is a, c, g, or t
  misc_feature (3776)..(3778): n is a, c, g, or t
  misc_feature (3780)..(3781): n is a, c, g, or t
  misc_feature (3786)..(3789): n is a, c, g, or t
  misc_feature (3792)..(3792): n is a, c, g, or t
  misc_feature (3794)..(3796): n is a, c, g, or t
  misc_feature (3798)..(3798): n is a, c, g, or t
  misc_feature (3800)..(3802): n is a, c, g, or t
  misc_feature (3804)..(3808): n is a, c, g, or t
  misc_feature (3811)..(3812): n is a, c, g, or t
  misc_feature (3815)..(3815): n is a, c, g, or t
  misc_feature (3817)..(3817): n is a, c, g, or t
  misc_feature (3820)..(3824): n is a, c, g, or t
  misc_feature (3827)..(3827): n is a, c, g, or t
  misc_feature (3829)..(3830): n is a, c, g, or t
  misc_feature (3832)..(3839): n is a, c, g, or t
  misc_feature (3842)..(3849): n is a, c, g, or t
  misc_feature (3851)..(3851): n is a, c, g, or t
  misc_feature (3853)..(3853): n is a, c, g, or t
  misc_feature (3856)..(3859): n is a, c, g, or t
  misc_feature (3862)..(3862): n is a, c, g, or t
  misc_feature (3864)..(3865): n is a, c, g, or t
  misc_feature (3867)..(3873): n is a, c, g, or t
  misc_feature (3880)..(3880): n is a, c, g, or t
  misc_feature (3882)..(3882): n is a, c, g, or t
  misc_feature (3884)..(3891): n is a, c, g, or t
  misc_feature (3894)..(3899): n is a, c, g, or t
  misc_feature (3903)..(3906): n is a, c, g, or t
  misc_feature (3908)..(3908): n is a, c, g, or t
  misc_feature (3910)..(3915): n is a, c, g, or t
  misc_feature (3918)..(3922): n is a, c, g, or t
  misc_feature (3924)..(3931): n is a, c, g, or t
  misc_feature (3933)..(3934): n is a, c, g, or t
  misc_feature (3937)..(3937): n is a, c, g, or t
  misc_feature (3940)..(3952): n is a, c, g, or t
  misc_feature (3956)..(3965): n is a, c, g, or t
  misc_feature (3967)..(3970): n is a, c, g, or t
  misc_feature (3973)..(3976): n is a, c, g, or t
  misc_feature (3979)..(3982): n is a, c, g, or t
  misc_feature (3985)..(3985): n is a, c, g, or t
  misc_feature (3987)..(3989): n is a, c, g, or t
  misc_feature (3993)..(3994): n is a, c, g, or t
  misc_feature (3996)..(3997): n is a, c, g, or t
  misc_feature (4000)..(4000): n is a, c, g, or t
agaatatacatgaccagcaacactttgcccattgtcntaaaaagatttccttttcctgccaccttctcttttcccatatatcctccatccatcttcgtaccttncgcctgcatccgtaacttattttttatatcatgttccggatacagtttcgctttgtactatatatgaaaaaaagatttatattatgtataaaaatgtctcctgccgcttaactttccaatcacgnataaaaataccnaaaatgtcggaatatttttccatcctgatttatcttctctgtttcctgaaagccaagtttatgaagcagtcccaacgatgcttcattccccggctccaccagacagtcaattcttcgaaaatcaagattgctttttgcccacgccatgattgcctgacagacctcatatgcataaccctgcctctggtattccggtgcaatgacataacccatctcaataatttcttcttctcccagcatgcgatagtcgattccggctcttccaatcagccggtgggtacctttttcctttgccagccacatgccatatccatagtagccatacatattttcaatatatgctctctggtactcctcctcttcctgcctttcgtaaaggggctcgatataatcggtgattcccttcttattatataaatcaaataaatcgtccatgtcatctaacgtaatctctctcagataacaccgctttgtctctaatatccgccacggcagntgntgnttccgctgaaatgtccgaagtaaaaattctgtntccacttcttccagtccaagaagcagnatatccacattgcttaaaggcatctgttttgaaaaatccggtacttcatanccnatnanggtaagctggtctgagtcagaatctgcatcctttttcgcccatgccacttcttccggttctgttgcaagcagcatacattcctccggctttacatgatgtccgctcaggaaaaatgtgatatctttttccaaatcagcatctgtaaaaagaagttccacttttttctgctctgacagttctttttgcaggcggcttaatgcatgtttctcttcttcagaaagtttttcttctaatgtttcttttcgtatgatacagttccagtttacagtattccagtgacacatatttccttctctctttctttacaaaaaagcctttttccgctatagtagaactacattctgttatgcaggatgaattcaatgaacagaaatgaggtatcttacaatggctcagaatcctattattacatttgaaatggaaaacggagatattatgaaagcggaattatatccgcaggttgctcctaacacagtaaataactttatcagccttgtcaacaagggattttatgatggacttatcttccatcgtgtcatcaacggttttatgattcagggtggtgacccggaaggaaccggaatgggcggtccaggatatggtatcaagggtgaatttgcacagaacggctttgccaatgacttaaagcattctgcaggcgttctttccatggctcgttccatgatgccaaactctgccggctcccagttctttatcatgcataaggatgctccacacttagatggtgcttacgctgctttcggtaaaatcatcgaaggcatggatgtggtaaataaaatngcagaagttgcaaccgactacagcgaccgtccaatggaagaccagcgaatgaaaaccgttaccgtagaaacctttggtgttgattacgacgaaccggaaaccgtataatgccatcgcaacagccgtatcagtgtatacactggcgcggctgttgtttttttgcaaagcttctctttttattctttcagtttccggtaaagcttctgtacaaactgcacatcctctctggtaagtttcttatggctatacgctgccacttcaagaatctgaagataacgctccttttcttccatgctccagcccccataatttaaaagctgttcccngaatgtccggtcggattgtacttttgcatttacaatgcccttccgccgtaaaatgcgataaatctggttcgaattccaacggatgatacgcttgtaactatgtgttcccttcttccgttttccttctatctctcttaagtaataccagatacctgctgcaagaagcagaatgatgattaccacaacaatcaaaatgacctttaaacggcttcccttttgattctgttttcctgccttnntgccatcctgcatggaattttctgtattccggttttccgtgccctgattttccgtatccgggttttctgtatcnngnntttctgtntnntgantttctgtnttntgattttnngtattntgnnttncnntnnnngnnannncnnnnnnnnnnnnatcnnnnnnactgtcntnntnnnnactnnnctnnnnnnnanttngntcnnnngtnntnnnntcnnnnntncngnnnnnantnntnnnnntnnnnnnnnnnnnnnnnnnnngntnaatnncnnnnnnntnnnnnnnngtnntntnnnccggcnncnnnncnacnnnnncnnnnnnnannnnnnnnnnnnnnnntnccnnnnnnncangnncctnnnnnnnannannnncnncnntntnnttnnnannnntnnnnntnntnannnnnnannnnctnacannnnnnncnntnannnncnnnnncnnnannnncannnnncncnnannnnnnnnnnncnnacngnnnnnntnctnnnnnnnnnnnnnnnnnnnntcnnnnanannntgtncnnntnnnncntnnnccnatnncanattntnnnnanncnnnnnnnnntnncnnttcnccagntnnnntnnnnnnanntnnnnnnnntnannnnnnttannntnataantancatnnnnannannncnnttnncnnnaaannnnnnatnnncnnnntcnnantnnnctnnnnnntnntnnncnnnnnncngnnttcncnnnnnnnnnnnnnnnnnnnnnntntnnnntncnnnnnnntnnttntnnntntnnntannnnnnnnntnnnnnnnngnnnattngnnntnnnnnnnnnnnnnntnanaccnnnnnnnatnnnnnnncnnnntantnnnattnnctnnnnnttcnntnantnncnnntnncnnnnnnnntnannncnntcnncnnaancnncnnnnnncaaancnnnnntanananannnnncatnnnnnnnnntnnnntncngtntnntnnnnnnncgtcnnnnncnnnnnngnnnnnnnnannnnnnnnnncnntangnncnccnncnnnnngnnnnncnncnngntnnnnnnnnnccnnnnnatagnntgncannnnnnnntanggnnnntnnncatnnnnntnntncncnnnnnaannnntnncccngtaannggtatnnnagnnntnggtatannnnnnnnnnntntntnccngnnnnnncnnnnnctgttnnnnnnngntnnnntccnnnnnnnnnntgncnnnnncnnnnnnnnnnganncanaannnntnnannnnnnantnttnnannnnncnnntnnntaannnnnnnnnnnnnnnnnnnnnnnnnntancnnatnancngnnanntnnnnancngncnnntccnnaannnncnnnnccnnannnntnnnnnnnnnnnnnnnnnnnnnnnnnnnnnnatnnnnnnnnaaannannttnnncnaaangantnncngcnnnnannnnnncnnctgtnannnnnncntnngnnncnntntcnnntncanttnttnnnnnnncnnttnntntngcnnncnnttctnnnnctntnnntncnnncnnnnnaannacnancgnnnnnacnannannnnnnnnacnnnnnnnngncntannnnttncnncnnnnnnnattccancngnnnnnnnnccnnnnnnccannnntncnnnnnncannnnntnnnnnnnnanncantgnnnnnnnnnnnnntgcnnnnnnnnnngnnnnatnnnncannnnaanannnagcnntnnaan

SEQ ID NO: 999 - DNA, 4000 bp, Escherichia coli
  misc_feature (1)..(1): n is a, c, g, or t
  misc_feature (3)..(3): n is a, c, g, or t
  misc_feature (5)..(5): n is a, c, g, or t
  misc_feature (7)..(7): n is a, c, g, or t
  misc_feature (9)..(12): n is a, c, g, or t
  misc_feature (15)..(18): n is a, c, g, or t
  misc_feature (21)..(23): n is a, c, g, or t
  misc_feature (25)..(26): n is a, c, g, or t
  misc_feature (29)..(33): n is a, c, g, or t
  misc_feature (38)..(38): n is a, c, g, or t
  misc_feature (41)..(51): n is a, c, g, or t
  misc_feature (53)..(54): n is a, c, g, or t
  misc_feature (56)..(58): n is a, c, g, or t
  misc_feature (60)..(60): n is a, c, g, or t
  misc_feature (62)..(62): n is a, c, g, or t
  misc_feature (64)..(67): n is a, c, g, or t
  misc_feature (69)..(76): n is a, c, g, or t
  misc_feature (82)..(84): n is a, c, g, or t
  misc_feature (86)..(86): n is a, c, g, or t
  misc_feature (88)..(89): n is a, c, g, or t
  misc_feature (91)..(95): n is a, c, g, or t
  misc_feature (98)..(98): n is a, c, g, or t
  misc_feature (100)..(101): n is a, c, g, or t
  misc_feature (104)..(108): n is a, c, g, or t
  misc_feature (110)..(111): n is a, c, g, or t
  misc_feature (113)..(113): n is a, c, g, or t
  misc_feature (115)..(119): n is a, c, g, or t
  misc_feature (121)..(121): n is a, c, g, or t
  misc_feature (123)..(127): n is a, c, g, or t
  misc_feature (129)..(129): n is a, c, g, or t
  misc_feature (133)..(133): n is a, c, g, or t
  misc_feature (136)..(137): n is a, c, g, or t
  misc_feature (139)..(141): n is a, c, g, or t
  misc_feature (143)..(149): n is a, c, g, or t
  misc_feature (151)..(153): n is a, c, g, or t
  misc_feature (155)..(161): n is a, c, g, or t
  misc_feature (164)..(164): n is a, c, g, or t
  misc_feature (166)..(166): n is a, c, g, or t
  misc_feature (168)..(168): n is a, c, g, or t
  misc_feature (170)..(171): n is a, c, g, or t
  misc_feature (173)..(174): n is a, c, g, or t
  misc_feature (176)..(176): n is a, c, g, or t
  misc_feature (178)..(179): n is a, c, g, or t
  misc_feature (183)..(193): n is a, c, g, or t
  misc_feature (197)..(197): n is a, c, g, or t
  misc_feature (199)..(202): n is a, c, g, or t
  misc_feature (204)..(207): n is a, c, g, or t
  misc_feature (209)..(209): n is a, c, g, or t
  misc_feature (211)..(212): n is a, c, g, or t
  misc_feature (214)..(215): n is a, c, g, or t
  misc_feature (217)..(217): n is a, c, g, or t
  misc_feature (219)..(219): n is a, c, g, or t
  misc_feature (222)..(222): n is a, c, g, or t
  misc_feature (224)..(225): n is a, c, g, or t
  misc_feature (228)..(229): n is a, c, g, or t
  misc_feature (231)..(238): n is a, c, g, or t
  misc_feature (241)..(243): n is a, c, g, or t
  misc_feature (245)..(245): n is a, c, g, or t
  misc_feature (247)..(248): n is a, c, g, or t
  misc_feature (250)..(256): n is a, c, g, or t
  misc_feature (261)..(261): n is a, c, g, or t
  misc_feature (265)..(265): n is a, c, g, or t
  misc_feature (267)..(268): n is a, c, g, or t
  misc_feature (270)..(270): n is a, c, g, or t
  misc_feature (272)..(276): n is a, c, g, or t
  misc_feature (278)..(279): n is a, c, g, or t
  misc_feature (281)..(282): n is a, c, g, or t
  misc_feature (284)..(286): n is a, c, g, or t
  misc_feature (289)..(289): n is a, c, g, or t
  misc_feature (291)..(293): n is a, c, g, or t
  misc_feature (298)..(305): n is a, c, g, or t
  misc_feature (307)..(313): n is a, c, g, or t
  misc_feature (315)..(321): n is a, c, g, or t
  misc_feature (324)..(324): n is a, c, g, or t
  misc_feature (326)..(326): n is a, c, g, or t
  misc_feature (329)..(329): n is a, c, g, or t
  misc_feature (331)..(332): n is a, c, g, or t
  misc_feature (334)..(339): n is a, c, g, or t
  misc_feature (341)..(342): n is a, c, g, or t
  misc_feature (344)..(345): n is a, c, g, or t
  misc_feature (347)..(347): n is a, c, g, or t
  misc_feature (349)..(351): n is a, c, g, or t
  misc_feature (353)..(356): n is a, c, g, or t
  misc_feature (358)..(361): n is a, c, g, or t
  misc_feature (363)..(375): n is a, c, g, or t
  misc_feature (377)..(381): n is a, c, g, or t
  misc_feature (383)..(384): n is a, c, g, or t
  misc_feature (386)..(390): n is a, c, g, or t
  misc_feature (392)..(392): n is a, c, g, or t
  misc_feature (394)..(396): n is a, c, g, or t
  misc_feature (400)..(400): n is a, c, g, or t
  misc_feature (404)..(404): n is a, c, g, or t
  misc_feature (406)..(406): n is a, c, g, or t
  misc_feature (408)..(408): n is a, c, g, or t
  misc_feature (410)..(410): n is a, c, g, or t
  misc_feature (413)..(418): n is a, c, g, or t
  misc_feature (420)..(420): n is a, c, g, or t
  misc_feature (422)..(427): n is a, c, g, or t
  misc_feature (430)..(432): n is a, c, g, or t
  misc_feature (434)..(438): n is a, c, g, or t
  misc_feature (440)..(444): n is a, c, g, or t
  misc_feature (446)..(450): n is a, c, g, or t
  misc_feature (452)..(463): n is a, c, g, or t
  misc_feature (466)..(466): n is a, c, g, or t
  misc_feature (469)..(471): n is a, c, g, or t
  misc_feature (474)..(476): n is a, c, g, or t
  misc_feature (478)..(478): n is a, c, g, or t
  misc_feature (480)..(480): n is a, c, g, or t
  misc_feature (482)..(482): n is a, c, g, or t
  misc_feature (484)..(486): n is a, c, g, or t
  misc_feature (490)..(490): n is a, c, g, or t
  misc_feature (492)..(502): n is a, c, g, or t
  misc_feature (505)..(506): n is a, c, g, or t
  misc_feature (508)..(509): n is a, c, g, or t
  misc_feature (512)..(513): n is a, c, g, or t
  misc_feature (515)..(516): n is a, c, g, or t
  misc_feature (518)..(518): n is a, c, g, or t
  misc_feature (520)..(521): n is a, c, g, or t
  misc_feature (523)..(531): n is a, c, g, or t
  misc_feature (533)..(534): n is a, c, g, or t
  misc_feature (538)..(550): n is a, c, g, or t
  misc_feature (552)..(552): n is a, c, g, or t
  misc_feature (556)..(560): n is a, c, g, or t
  misc_feature (562)..(566): n is a, c, g, or t
  misc_feature (568)..(570): n is a, c, g, or t
  misc_feature (1019)..(1019): n is a, c, g, or t
  misc_feature (1021)..(1023): n is a, c, g, or t
  misc_feature (1025)..(1027): n is a, c, g, or t
  misc_feature (1029)..(1031): n is a, c, g, or t
  misc_feature (1033)..(1033): n is a, c, g, or t
  misc_feature (1035)..(1037): n is a, c, g, or t
  misc_feature (1039)..(1042): n is a, c, g, or t
  misc_feature (1044)..(1044): n is a, c, g, or t
  misc_feature (1046)..(1046): n is a, c, g, or t
  misc_feature (1048)..(1051): n is a, c, g, or t
  misc_feature (1053)..(1053): n is a, c, g, or t
  misc_feature (1055)..(1057): n is a, c, g, or t
  misc_feature (1059)..(1063): n is a, c, g, or t
  misc_feature (1065)..(1065): n is a, c, g, or t
  misc_feature (1067)..(1070): n is a, c, g, or t
  misc_feature (1072)..(1072): n is a, c, g, or t
  misc_feature (1074)..(1074): n is a, c, g, or t
  misc_feature (1076)..(1076): n is a, c, g, or t
  misc_feature (1079)..(1083): n is a, c, g, or t
  misc_feature (1085)..(1085): n is a, c, g, or t
  misc_feature (1087)..(1087): n is a, c, g, or t
  misc_feature (1090)..(1094): n is a, c, g, or t
  misc_feature (1097)..(1098): n is a, c, g, or t
  misc_feature (1101)..(1101): n is a, c, g, or t
  misc_feature (1107)..(1107): n is a, c, g, or t
  misc_feature (1110)..(1113): n is a, c, g, or t
  misc_feature (1115)..(1115): n is a, c, g, or t
  misc_feature (1118)..(1121): n is a, c, g, or t
  misc_feature (1123)..(1124): n is a, c, g, or t
  misc_feature (1126)..(1127): n is a, c, g, or t
  misc_feature (1129)..(1129): n is a, c, g, or t
  misc_feature (1131)..(1136): n is a, c, g, or t
  misc_feature (1140)..(1145): n is a, c, g, or t
  misc_feature (1147)..(1147): n is a, c, g, or t
  misc_feature (1149)..(1153): n is a, c, g, or t
  misc_feature (1155)..(1155): n is a, c, g, or t
  misc_feature (1157)..(1161): n is a, c, g, or t
  misc_feature (1163)..(1163): n is a, c, g, or t
  misc_feature (1165)..(1167): n is a, c, g, or t
  misc_feature (1169)..(1176): n is a, c, g, or t
  misc_feature (1179)..(1188): n is a, c, g, or t
  misc_feature (1190)..(1190): n is a, c, g, or t
  misc_feature (1192)..(1193): n is a, c, g, or t
  misc_feature (1198)..(1199): n is a, c, g, or t
  misc_feature (1201)..(1203): n is a, c, g, or t
  misc_feature (1224)..(1224): n is a, c, g, or t
  misc_feature (1243)..(1243): n is a, c, g, or t
  misc_feature (1271)..(1271): n is a, c, g, or t
  misc_feature (1481)..(1481): n is a, c, g, or t
  misc_feature (1503)..(1503): n is a, c, g, or t
  misc_feature (1550)..(1550): n is a, c, g, or t
  misc_feature (1640)..(1640): n is a, c, g, or t
  misc_feature (1769)..(1769): n is a, c, g, or t
  misc_feature (1813)..(1813): n is a, c, g, or t
  misc_feature (1817)..(1817): n is a, c, g, or t
  misc_feature (1827)..(1827): n is a, c, g, or t
  misc_feature (1829)..(1829): n is a, c, g, or t
  misc_feature (1835)..(1835): n is a, c, g, or t
  misc_feature (1938)..(1938): n is a, c, g, or t
  misc_feature (1964)..(1964): n is a, c, g, or t
  misc_feature (1969)..(1969): n is a, c, g, or t
  misc_feature (1976)..(1976): n is a, c, g, or t
  misc_feature (1978)..(1981): n is a, c, g, or t
nangntnannnnctnnnnaannncnnatnnnnnaacancannnnnnnnnnngnnannntnantnnnntnnnnnnnnaaacannnancnntnnnnncantnncgnnnnnanngncnnnnnancnnnnngnattntcnntnnntnnnnnnncnnnannnnnnntcngntntnnannanannccgnnnnnnnnnnntttncnnnntnnnnananntnngncnaantnnatnntnnnnnnnnaannnananncnnnnnnnttttngtgncnnangnnnnnanncnnannnaanannnattgnnnnnnnncnnnnnnntnnnnnnnacnantantnnannnnnngnnannanannnannnntnnnncnnnnnnnnnnnnnannnnnanntnnnnnancnnnattntcantnantntannnnnnanannnnnnctnnnannnnnannnnnannnnnannnnnnnnnnnnatnaannnaannnananangnnnaatncnnnnnnnnnnnaannannganntnnanannannnnnnnnngnntaannnnnnnnnnnnnantaannnnnannnnntnnncacgaactgattataaaaaccactaatgaacatcttgttattaaacaaattgttaatacggtcatttcgtgaagaaagtgtttttacaacaacattctcacttaatctattggatagattaaaactgttagaataatatttaatataatgtttaattaacataaataaaattaataaaagaataatccatcgggtaccaaaacatacaattgaaaagcataaaaaaacgaataatattagtatgcttaataactctaaagccttattatgtttattactgaagttaacatatttatttaaaaaaaggcgtactgaggtaatataaaaagaccagcacataattcctattagagttggacctaacatatctgatgaaaaatgtacagtacatgtataaagtagatacgaaacactcaaaattactactagttgtaataaaggtatttgtntnnncnnnannngnannnannnntntntnnnngnannntnnnnntnannnntnanangcnnnnnancnatnnnnngtnnaantcgaanaannnngnatnnnncnntnntntnnnnnntaannnnnngnannnnntnannnnnangnnnannnnnnnntannnnnnnnnnantnngcacnngnnncatgcaacttattgttagcanctagtgcataaatagttangcctgtcgtaactgtaggtacagctaangaactagctaatttagctccttttgttagagcaattttcccaaacagcctactaaaaggatttcctccaactttgataagaaattcgttgatagtaataaaccagatgttagcaaaactacaataaatataactaaaacaaccagattcagagtaatgattgtaagttaacgttagtagaaatacaaatcgagcataacgactaaaaagnccaattaagcgcatatcggtancatagtgtatttcaacagttgctaattggctagcaaccatcttgganacctccgatttgggtttataattaataaacctaagtataatttttataatatatacaagatataaaacaaaaattatgtagaaagagggntccaaaacataaaatgccaatataatagcagtaaatagaatgaaaatatacttttcatctattttttttaaacctaatgactctaacgaaggtgttaaagacattattaaagttaagatagcgccaaanagtaaaagtaataaatagactttatcacttaataaaccaaaacntgtnaggtttaggnangtaaanattattaaacacaccaattggaacaatggcgttttgatataacagtacaaccagtagatcttaaatatctctggttgataaccctcataatcttggtttagcnttttgaaatcgggaaaaccaagatcntaatnttttatnannnntttaacaaatgtcatcgatgcctaaatgagctaataaattattacaagtaagatgcattggatctaaaaagatctcaggataaattcccataactagagtaagtataactagtggaagtaatgtcgcaaactcacgtttatctacatcagaaaacacattcatatattgaactttaatatttccaaaagcaactcggttaaataaccataaggaataaccaccccctaaaatcattccagtagcagaaagaacacatactgttgtatttgtttggaaagcacctgcaagaattagaaactctccaacaaaactgctcgttccaggtaaagcaatattagccatactaaaaaacataaaaatggcaatataaattggcatagtatgagctaaaccactataatacttaactaaacgagtatggtgacggtcatatataacaccaacacataagaataaagcaccagatacgagtccatgacttaactgttgaagaatacttccttctagtccttgtaaattataaacaaacataccaattagtactaagttcatatgtgcaacagaggcataagcaattatacgtttaagatctgtttgacgtatagcggttaaacttgtatatataacagcaatacaagcaaaagcataaatcaatggagtgaaataaatagaagcataaggaaataatggtaatgaaaaacgtaaaaaaccataagatcctaacttcaataaaattcctgctaaaataacagaaccggcagtcggagcctccacatgagcttcaggtaaccaaatgtgaacaggcaacattggaactttaacagcaaatgaagcgaaaaaagctaaccataataatttttgaacttctggatcaaaagtagttgtcaataaaatttgataatcagttgtacctgcctgataataaatatacagaatagcaagaagcattagtaccgatcccaataatgtatataagaagaacatataagcagcacgtatacgtcgctcacgtgaaccccacacaccaatgataataaacataggtattaaaacactttcaaagaaaacataaaataaaataatgtctaaaacacagaatacagcgataacaagagcttccatagctaaaaaggcaataaaatattctttttcattaaacttaatagcatcccaactagctaataaacaaattggtatcaataaagtagttaacaaaataaaaaataaggaaataccatctactcctaaataaaaaataatattagaagattcaatccaattatacgcctcaacaaactgaaaacgtgaactagagttatcaaaggacatccacatcattaatgaaagtaagaactctgctaatgaaaaagataaaaccacgactttgatagtctctttatattggcttggaataaataaaaccaaaaacgaaccaatcaaaggaattaaaattaaatttgataataacataatttatgatttagatgacgcttcttgttttgtaaaaaagctacccgaagcaaccgcagcgatcaataagatgaaaaataatcgaccatcaacaaatgatgagattacgtcccataagcctagaatggcaattaaaaaagttacacctaataacattacaaatgcgtagtggtatagaaaacctgtttgtaaaccagctaaagtatctccacgttttgtaaccatacgtgaaatacctaaaggtcctaagaattcaaacaccccacggtcaattaatttatatgacgtatgataaccaaagtgtaacatattttgtgtaatatactcattataaaccttatcaaaaaaccatttacggtttaaaaaagtatacaatttacgcccgaatgggtgaactttaatctcatataaccaacgagtgtggtttttatataagaaaaatgcagatattgctccagttaaactaaaaacaacaggaacaagctttatatgatgaggaataaactcagcttctaacaaagtcaaatgacttggatgagtaaataggg

SEQ ID NO: 1000 - DNA, 4000 bp, Escherichia coli
  misc_feature (2393)..(2394): n is a, c, g, or t
  misc_feature (2396)..(2398): n is a, c, g, or t
  misc_feature (2401)..(2401): n is a, c, g, or t
  misc_feature (2408)..(2408): n is a, c, g, or t
  misc_feature (2452)..(2454): n is a, c, g, or t
  misc_feature (2457)..(2459): n is a, c, g, or t
  misc_feature (2461)..(2461): n is a, c, g, or t
  misc_feature (2465)..(2467): n is a, c, g, or t
  misc_feature (2470)..(2472): n is a, c, g, or t
  misc_feature (2475)..(2475): n is a, c, g, or t
  misc_feature (2481)..(2485): n is a, c, g, or t
  misc_feature (2489)..(2489): n is a, c, g, or t
  misc_feature (2491)..(2493): n is a, c, g, or t
  misc_feature (2495)..(2495): n is a, c, g, or t
  misc_feature (2497)..(2499): n is a, c, g, or t
  misc_feature (2513)..(2513): n is a, c, g, or t
  misc_feature (2515)..(2521): n is a, c, g, or t
  misc_feature (2523)..(2523): n is a, c, g, or t
  misc_feature (2525)..(2525): n is a, c, g, or t
  misc_feature (2527)..(2529): n is a, c, g, or t
  misc_feature (2532)..(2536): n is a, c, g, or t
  misc_feature (2538)..(2538): n is a, c, g, or t
  misc_feature (2545)..(2545): n is a, c, g, or t
  misc_feature (2548)..(2548): n is a, c, g, or t
  misc_feature (2554)..(2554): n is a, c, g, or t
  misc_feature (2557)..(2558): n is a, c, g, or t
  misc_feature (2560)..(2560): n is a, c, g, or t
  misc_feature (2564)..(2564): n is a, c, g, or t
  misc_feature (2566)..(2567): n is a, c, g, or t
  misc_feature (2572)..(2572): n is a, c, g, or t
  misc_feature (2575)..(2575): n is a, c, g, or t
  misc_feature (2586)..(2589): n is a, c, g, or t
  misc_feature (2595)..(2595): n is a, c, g, or t
  misc_feature (2597)..(2598): n is a, c, g, or t
  misc_feature (2600)..(2601): n is a, c, g, or t
  misc_feature (2603)..(2604): n is a, c, g, or t
  misc_feature (2606)..(2607): n is a, c, g, or t
  misc_feature (2613)..(2613): n is a, c, g, or t
  misc_feature (2615)..(2620): n is a, c, g, or t
  misc_feature (2622)..(2628): n is a, c, g, or t
  misc_feature (2631)..(2632): n is a, c, g, or t
  misc_feature (2634)..(2634): n is a, c, g, or t
  misc_feature (2637)..(2639): n is a, c, g, or t
  misc_feature (2641)..(2641): n is a, c, g, or t
  misc_feature (2645)..(2645): n is a, c, g, or t
  misc_feature (2647)..(2648): n is a, c, g, or t
  misc_feature (2650)..(2650): n is a, c, g, or t
  misc_feature (2656)..(2660): n is a, c, g, or t
  misc_feature (2665)..(2665): n is a, c, g, or t
  misc_feature (2667)..(2667): n is a, c, g, or t
  misc_feature (2682)..(2682): n is a, c, g, or t
  misc_feature (2684)..(2690): n is a, c, g, or t
  misc_feature (2692)..(2700): n is a, c, g, or t
  misc_feature (2702)..(2706): n is a, c, g, or t
  misc_feature (2708)..(2710): n is a, c, g, or t
  misc_feature (2712)..(2713): n is a, c, g, or t
  misc_feature (2715)..(2718): n is a, c, g, or t
  misc_feature (2720)..(2720): n is a, c, g, or t
  misc_feature (2722)..(2727): n is a, c, g, or t
  misc_feature (2729)..(2734): n is a, c, g, or t
  misc_feature (2737)..(2737): n is a, c, g, or t
  misc_feature (2739)..(2740): n is a, c, g, or t
  misc_feature (2742)..(2743): n is a, c, g, or t
  misc_feature (2746)..(2748): n is a, c, g, or t
  misc_feature (2750)..(2751): n is a, c, g, or t
  misc_feature (2753)..(2754): n is a, c, g, or t
  misc_feature (2756)..(2758): n is a, c, g, or t
  misc_feature (2761)..(2761): n is a, c, g, or t
  misc_feature (2763)..(2765): n is a, c, g, or t
  misc_feature (2768)..(2769): n is a, c, g, or t
  misc_feature (2771)..(2772): n is a, c, g, or t
  misc_feature (2774)..(2776): n is a, c, g, or t
  misc_feature (2779)..(2779): n is a, c, g, or t
  misc_feature (2782)..(2782): n is a, c, g, or t
  misc_feature (2785)..(2785): n is a, c, g, or t
  misc_feature (2788)..(2788): n is a, c, g, or t
  misc_feature (2791)..(2791): n is a, c, g, or t
  misc_feature (2794)..(2794): n is a, c, g, or t
  misc_feature (2797)..(2797): n is a, c, g, or t
  misc_feature (2802)..(2802): n is a, c, g, or t
  misc_feature (2805)..(2805): n is a, c, g, or t
  misc_feature (2807)..(2817): n is a, c, g, or t
  misc_feature (2819)..(2824): n is a, c, g, or t
  misc_feature (2826)..(2827): n is a, c, g, or t
  misc_feature (2829)..(2830): n is a, c, g, or t
  misc_feature (2832)..(2832): n is a, c, g, or t
  misc_feature (2834)..(2838): n is a, c, g, or t
  misc_feature (2841)..(2841): n is a, c, g, or t
  misc_feature (2843)..(2843): n is a, c, g, or t
  misc_feature (2845)..(2845): n is a, c, g, or t
  misc_feature (2847)..(2852): n is a, c, g, or t
  misc_feature (2854)..(2856): n is a, c, g, or t
  misc_feature (2859)..(2874): n is a, c, g, or t
  misc_feature (2876)..(2881): n is a, c, g, or t
  misc_feature (2883)..(2888): n is a, c, g, or t
  misc_feature (2891)..(2904): n is a, c, g, or t
  misc_feature (2906)..(2910): n is a, c, g, or t
  misc_feature (2912)..(2918): n is a, c, g, or t
  misc_feature (2920)..(2924): n is a, c, g, or t
  misc_feature (2926)..(2929): n is a, c, g, or t
  misc_feature (2931)..(2931): n is a, c, g, or t
  misc_feature (2933)..(2936): n is a, c, g, or t
  misc_feature (2939)..(2946): n is a, c, g, or t
  misc_feature (2948)..(2953): n is a, c, g, or t
  misc_feature (2955)..(2958): n is a, c, g, or t
  misc_feature (2960)..(2963): n is a, c, g, or t
  misc_feature (2966)..(2966): n is a, c, g, or t
  misc_feature (2968)..(2973): n is a, c, g, or t
  misc_feature (2975)..(2975): n is a, c, g, or t
  misc_feature (2978)..(2989): n is a, c, g, or t
  misc_feature (2991)..(3005): n is a, c, g, or t
  misc_feature (3007)..(3007): n is a, c, g, or t
  misc_feature (3009)..(3016): n is a, c, g, or t
  misc_feature (3018)..(3019): n is a, c, g, or t
  misc_feature (3021)..(3021): n is a, c, g, or t
  misc_feature (3024)..(3025): n is a, c, g, or t
  misc_feature (3027)..(3027): n is a, c, g, or t
  misc_feature (3029)..(3030): n is a, c, g, or t
  misc_feature (3032)..(3033): n is a, c, g, or t
  misc_feature (3035)..(3040): n is a, c, g, or t
  misc_feature (3042)..(3046): n is a, c, g, or t
  misc_feature (3048)..(3051): n is a, c, g, or t
  misc_feature (3054)..(3054): n is a, c, g, or t
  misc_feature (3057)..(3061): n is a, c, g, or t
  misc_feature (3063)..(3071): n is a, c, g, or t
  misc_feature (3075)..(3076): n is a, c, g, or t
  misc_feature (3078)..(3087): n is a, c, g, or t
  misc_feature (3089)..(3089): n is a, c, g, or t
  misc_feature (3091)..(3093): n is a, c, g, or t
  misc_feature (3095)..(3096): n is a, c, g, or t
  misc_feature (3098)..(3099): n is a, c, g, or t
  misc_feature (3101)..(3103): n is a, c, g, or t
  misc_feature (3106)..(3108): n is a, c, g, or t
  misc_feature (3112)..(3133): n is a, c, g, or t
  misc_feature (3135)..(3136): n is a, c, g, or t
  misc_feature (3139)..(3139): n is a, c, g, or t
  misc_feature (3142)..(3145): n is a, c, g, or t
  misc_feature (3147)..(3147): n is a, c, g, or t
  misc_feature (3150)..(3154): n is a, c, g, or t
  misc_feature (3156)..(3156): n is a, c, g, or t
  misc_feature (3158)..(3170): n is a, c, g, or t
  misc_feature (3173)..(3176): n is a, c, g, or t
  misc_feature (3179)..(3188): n is a, c, g, or t
  misc_feature (3190)..(3193): n is a, c, g, or t
  misc_feature (3195)..(3196): n is a, c, g, or t
  misc_feature (3198)..(3198): n is a, c, g, or t
  misc_feature (3201)..(3201): n is a, c, g, or t
  misc_feature (3203)..(3205): n is a, c, g, or t
  misc_feature (3207)..(3210): n is a, c, g, or t
  misc_feature (3212)..(3214): n is a, c, g, or t
  misc_feature (3216)..(3217): n is a, c, g, or t
  misc_feature (3219)..(3222): n is a, c, g, or t
  misc_feature (3224)..(3232): n is a, c, g, or t
  misc_feature (3234)..(3235): n is a, c, g, or t
  misc_feature (3237)..(3239): n is a, c, g, or t
  misc_feature (3241)..(3250): n is a, c, g, or t
  misc_feature (3252)..(3254): n is a, c, g, or t
  misc_feature (3256)..(3257): n is a, c, g, or t
  misc_feature (3259)..(3271): n is a, c, g, or t
  misc_feature (3275)..(3275): n is a, c, g, or t
  misc_feature (3277)..(3277): n is a, c, g, or t
  misc_feature (3279)..(3280): n is a, c, g, or t
  misc_feature (3282)..(3284): n is a, c, g, or t
  misc_feature (3286)..(3287): n is a, c, g, or t
  misc_feature (3290)..(3292): n is a, c, g, or t
  misc_feature (3294)..(3296): n is a, c, g, or t
  misc_feature (3298)..(3304): n is a, c, g, or t
  misc_feature (3306)..(3317): n is a, c, g, or t
  misc_feature (3319)..(3319): n is a, c, g, or t
  misc_feature (3321)..(3324): n is a, c, g, or t
  misc_feature (3327)..(3328): n is a, c, g, or t
  misc_feature (3330)..(3331): n is a, c, g, or t
  misc_feature (3333)..(3336): n is a, c, g, or t
  misc_feature (3338)..(3338): n is a, c, g, or t
  misc_feature (3340)..(3340): n is a, c, g, or t
  misc_feature (3342)..(3349): n is a, c, g, or t
  misc_feature (3351)..(3355): n is a, c, g, or t
  misc_feature (3357)..(3361): n is a, c, g, or t
  misc_feature (3364)..(3365): n is a, c, g, or t
  misc_feature (3367)..(3368): n is a, c, g, or t
  misc_feature (3370)..(3371): n is a, c, g, or t
  misc_feature (3373)..(3374): n is a, c, g, or t
  misc_feature (3377)..(3378): n is a, c, g, or t
  misc_feature (3380)..(3384): n is a, c, g, or t
  misc_feature (3386)..(3390): n is a, c, g, or t
  misc_feature (3392)..(3403): n is a, c, g, or t
  misc_feature (3405)..(3408): n is a, c, g, or t
  misc_feature (3410)..(3417): n is a, c, g, or t
  misc_feature (3419)..(3420): n is a, c, g, or t
  misc_feature (3425)..(3425): n is a, c, g, or t
  misc_feature (3427)..(3435): n is a, c, g, or t
  misc_feature (3437)..(3443): n is a, c, g, or t
  misc_feature (3445)..(3445): n is a, c, g, or t
  misc_feature (3447)..(3451): n is a, c, g, or t
  misc_feature (3453)..(3468): n is a, c, g, or t
  misc_feature (3470)..(3473): n is a, c, g, or t
  misc_feature (3475)..(3476): n is a, c, g, or t
  misc_feature (3479)..(3480): n is a, c, g, or t
  misc_feature (3484)..(3484): n is a, c, g, or t
  misc_feature (3486)..(3487): n is a, c, g, or t
  misc_feature (3490)..(3499): n is a, c, g, or t
  misc_feature (3501)..(3506): n is a, c, g, or t
  misc_feature (3508)..(3514): n is a, c, g, or t
  misc_feature (3516)..(3516): n is a, c, g, or t
  misc_feature (3518)..(3525): n is a, c, g, or t
  misc_feature (3527)..(3533): n is a, c, g, or t
  misc_feature (3535)..(3535): n is a, c, g, or t
  misc_feature (3537)..(3542): n is a, c, g, or t
  misc_feature (3544)..(3544): n is a, c, g, or t
  misc_feature (3546)..(3546): n is a, c, g, or t
  misc_feature (3548)..(3560): n is a, c, g, or t
  misc_feature (3562)..(3568): n is a, c, g, or t
  misc_feature (3570)..(3576): n is a, c, g, or t
  misc_feature (3578)..(3585): n is a, c, g, or t
  misc_feature (3587)..(3593): n is a, c, g, or t
  misc_feature (3595)..(3596): n is a, c, g, or t
  misc_feature (3598)..(3601): n is a, c, g, or t
  misc_feature (3603)..(3612): n is a, c, g, or t
  misc_feature (3614)..(3622): n is a, c, g, or t
  misc_feature (3624)..(3624): n is a, c, g, or t
  misc_feature (3626)..(3626): n is a, c, g, or t
  misc_feature (3629)..(3632): n is a, c, g, or t
  misc_feature (3635)..(3635): n is a, c, g, or t
  misc_feature (3640)..(3641): n is a, c, g, or t
  misc_feature (3645)..(3656): n is a, c, g, or t
  misc_feature (3658)..(3659): n is a, c, g, or t
  misc_feature (3661)..(3662): n is a, c, g, or t
  misc_feature (3666)..(3672): n is a, c, g, or t
  misc_feature (3676)..(3679): n is a, c, g, or t
  misc_feature (3681)..(3685): n is a, c, g, or t
  misc_feature (3687)..(3689): n is a, c, g, or t
  misc_feature (3691)..(3698): n is a, c, g, or t
  misc_feature (3700)..(3700): n is a, c, g, or t
  misc_feature (3702)..(3707): n is a, c, g, or t
  misc_feature (3710)..(3715): n is a, c, g, or t
  misc_feature (3717)..(3717): n is a, c, g, or t
  misc_feature (3720)..(3721): n is a, c, g, or t
  misc_feature (3723)..(3726): n is a, c, g, or t
  misc_feature (3728)..(3728): n is a, c, g, or t
  misc_feature (3730)..(3731): n is a, c, g, or t
  misc_feature (3733)..(3733): n is a, c, g, or t
  misc_feature (3736)..(3752): n is a, c, g, or t
  misc_feature (3756)..(3759): n is a, c, g, or t
  misc_feature (3761)..(3764): n is a, c, g, or t
  misc_feature (3766)..(3771): n is a, c, g, or t
  misc_feature (3773)..(3781): n is a, c, g, or t
  misc_feature (3783)..(3783): n is a, c, g, or t
  misc_feature (3785)..(3787): n is a, c, g, or t
  misc_feature (3789)..(3796): n is a, c, g, or t
  misc_feature (3798)..(3798): n is a, c, g, or t
  misc_feature (3800)..(3801): n is a, c, g, or t
  misc_feature (3803)..(3805): n is a, c, g, or t
  misc_feature (3809)..(3809): n is a, c, g, or t
  misc_feature (3812)..(3812): n is a, c, g, or t
  misc_feature (3814)..(3817): n is a, c, g, or t
  misc_feature (3822)..(3822): n is a, c, g, or t
  misc_feature (3824)..(3824): n is a, c, g, or t
  misc_feature (3827)..(3827): n is a, c, g, or t
  misc_feature (3830)..(3831): n is a, c, g, or t
  misc_feature (3833)..(3833): n is a, c, g, or t
  misc_feature (3835)..(3838): n is a, c, g, or t
  misc_feature (3840)..(3843): n is a, c, g, or t
  misc_feature (3849)..(3850): n is a, c, g, or t
  misc_feature (3855)..(3856): n is a, c, g, or t
  misc_feature (3858)..(3858): n is a, c, g, or t
  misc_feature (3860)..(3860): n is a, c, g, or t
  misc_feature (3862)..(3868): n is a, c, g, or t
  misc_feature (3870)..(3873): n is a, c, g, or t
  misc_feature (3875)..(3877): n is a, c, g, or t
  misc_feature (3879)..(3879): n is a, c, g, or t
  misc_feature (3881)..(3884): n is a, c, g, or t
  misc_feature (3886)..(3887): n is a, c, g, or t
  misc_feature (3889)..(3889): n is a, c, g, or t
  misc_feature (3891)..(3891): n is a, c, g, or t
  misc_feature (3893)..(3895): n is a, c, g, or t
  misc_feature (3898)..(3899): n is a, c, g, or t
  misc_feature (3902)..(3903): n is a, c, g, or t
  misc_feature (3905)..(3906): n is a, c, g, or t
  misc_feature (3909)..(3909): n is a, c, g, or t
  misc_feature (3912)..(3912): n is a, c, g, or t
  misc_feature (3914)..(3914): n is a, c, g, or t
  misc_feature (3917)..(3917): n is a, c, g, or t
  misc_feature (3919)..(3921): n is a, c, g, or t
  misc_feature (3924)..(3925): n is a, c, g, or t
  misc_feature (3930)..(3934): n is a, c, g, or t
  misc_feature (3937)..(3937): n is a, c, g, or t
  misc_feature (3940)..(3944): n is a, c, g, or t
  misc_feature (3947)..(3948): n is a, c, g, or t
  misc_feature (3951)..(3952): n is a, c, g, or t
  misc_feature (3954)..(3960): n is a, c, g, or t
  misc_feature (3962)..(3968): n is a, c, g, or t
  misc_feature (3970)..(3970): n is a, c, g, or t
  misc_feature (3972)..(3972): n is a, c, g, or t
  misc_feature (3974)..(3974): n is a, c, g, or t
  misc_feature (3976)..(3976): n is a, c, g, or t
  misc_feature (3978)..(3979): n is a, c, g, or t
  misc_feature (3981)..(3986): n is a, c, g, or t
  misc_feature (3989)..(3992): n is a, c, g, or t
  misc_feature (3994)..(3995): n is a, c, g, or t
  misc_feature (3997)..(3997): n is a, c, g, or t
  misc_feature (3999)..(4000): n is a, c, g, or t
cgcgcgcgaaacggcgtcacgagcggtgacgtcacgcgcgcattcgacgcgtggacgacgcgcgcagacgacgcgcgcgcgtggacgaccgggacagcggtcggcgtgtgtatgtgtacgcgagttcgcatcatggcgcgcgcgagaggtccacgcggcgcggtatgcggaggggcgtggtatgatgtgggctggagacttgaagagcctggagcgctccggcgtgcgcgcgaggtgaaatgacgagcctgaagtgcgcgaatatcgcgtgaaggatacaaggtaaagttacaaaaatctatgattagtacgattccggggtcgctgagccgttcgggtgcgcgttgacgtcgcgcggtttgtggagcgcgcgtcggcgcgcgatttcagccgataaagcatccagctcgctttcgacgcggtctttgacttggtcgtgctggccagcgacgatggcgagaatgtcttcgatcatatcttcgttgcccatgatgttgatgtggtcgccttcggctctaccttggaaggaagcgacggattgaggggcgacgtgcgcgtattctcgagtgacgactgggacgcccgctgggttcaattttttgctcgtgcgccaaacgcttcggcagacgtacccgagtgaagctaaagtgatggtaccatcgccatggacttgccgcacgccattttgaattccacgcgcgtgatattgcacatccaactgaaatggacgcaacgtgtcggtggcgtgatgttcgtacacgtacgcccgctcggatgctttacctgtgccgtacaagcagaacaccttcatgtttggcgcatacggcaacggccgcgtcaatgcattcccgaaatctgttgcacgtttattcgcgagcgacgggtcattacgcaacagctgcgcttgcgtcttgggatgcgtcacgtgcgagaattccgcaacgttgtgcggattcttctcctgcatcgtcgcgaataaaaaatcaagcgcactgtcgatagtgtgattgacaccttcttgtcgaggcgcgcctgcggcgcgtatttgcaaaaagtaattcaatcgctcgtcatccggggcatcatcgggcgagccgagttcgttgtcgccccacaccgccgcgccgccgcgcgggagcatggcccataccgatccccacgagcgaaaggtttcgcacgcttctttgagctgactagcgataacgcgtccaacggcgacatcaagcaaacctccaagcaacccttcgagttcgccgagcatcgtcgtatcgcgcatttcgcccgaaagcaaactcggaagcgccttggcgacgccaagcatcggcccggcgatgtccacatacgactcgacgtgcttctctacccatcgtcgaccgccgccgccaccaccttttgacacgggagtttcgacccaatcgaaaaagtacctcgccacggtatcgccgtacgaatgcgccaatatcacgctcttctcaccgtgcacctcggtaaacgtctcgatgacgctcttcagtcgcgtcatgtacccatcgcgcttttccagctgcaacggactcaaacgccaatcgtacgacgcagagtgaatattattggcatcgtacccgagctcgccgagctcttcgatgtgtcgcgcccagacaaaatagccgggcgcgaaccaatccaccgcttctaaaccgcgtaccgcgcggagttttataccctccggatccaatccagtatttggatcaaggcgcatgtgctccatccaacaccgcatattcgcaaagaacgcgcgcgccatcgcgggcgtcccccacatgcgctgtcgaaagaactgcttcccgcacgctcgccccgaccacaactcgagcccggtgctcacgaaccccggcacgatcaccaccggatgctttggcgccatgcctcgcgcctttgcgcgcgcaccaggtccattgacattcgtgttctgaaacccaccgtattcgagcgcgggcaacctcgcgagcaccgtcgtgttcaaccactccccgcccggcgacgcgcgcaccacggcgtcgaaccgcagcacattcctcaaatacgtcgccgcgcacgccaccgcgagcacgagcaccgcacgcgcgaacgacaccgtcgtcgtcgcctctcgcacgaccgcgccgcgatcgcacgcgcgcgcgagaaaccgcgcgcgaacgcgcgtgagccaccatcgcgcggcatcggtgcgcgcaaccgttcgtctccctcgtcgccctgtgccgacgcgcgacggcgttttcgacgcggcgcgaggcgcgcgaggcgcgcgagacgcgcgagaggcgtcgtccgcgtcgtccgcggcgtccgcggcgtccgcggcgcgcgcgcgacgcgtgcgcatcgcggtcgcgacgacgaatggcgannannnctngaggacnatttttcaccaatcacgaccaggcacacgaggggggactcgacnnnccnnncnctcnnncgnnnggncggcgnnnnnttcntnnncncnnncgcgcgcgcgcgtncnnnnnnngntngnnnggnnnnncnaaccggnagncgcgcnccnngnccgncnncgccnccncgatcgttcgnnnngttcgncnngnngnncnncggcgngnnnnnngnnnnnnngtnngnggnnngngggngnncngggggnnnnnggcgngncggcggcgcgacgangnnnnnnngnnnnnnnnngnnnnngnnngnngnnnngnannnnnngnnnnnnggngnngnngcnnngnngnngnnnggngnnnggnngnngnnnggnggnggnggnggnggnggnggggnggngnnnnnnnnnnngnnnnnngnngnngngnnnnnggntncngnnnnnnannnggnnnnnnnnnnnnnnnntnnnnnnannnnnnaannnnnnnnnnnnnngnnnnngnnnnnnnannnnntnnnnantnnnnatnnnnnnnngnnnnnngnnnngnnnnttngnnnnnnanggnnnnnnnnnnnngnnnnnnnnnnnnnnntnannnnnnnngnngncgnngntnngnngnnnnnngnnnnngnnnnctnggnnnnngnnnnnnnnnttgnntnnnnnnnnnnanannnannanngnnngannntggnnnnnnnnnnnnnnnnnnnnnngnnggnggnnnngnggnnnnngngnnnnnnnnnnnnnatnnnnaannnnnnnnnnannnnannanccnannngnnnncnnngnngnnnngnnnnnnnnnanngnnnannnnnnnnnnannntnnannnnnnnnnnnnntggnancnngnnngnncgnnngnnngnnnnnnngnnnnnnnnnnnngncnnnnggnngnngnnnngntnannnnnnnntnnnnngnnnnncgnngnngnntnncgnntnnnnncnnnnnannnnnnnnnnnngnnnntnnnnnnnncnncgaancnnnnnnnnncnnnnnnncngnnnnngnnnnnnnnnnnnnnnngnnnntnnccnngttncnnggnnnnnnnnnngnnnnnncnnnnnnncntnnnnnnnngnnnnnnntngnnnnnngnantnnnnnnnnnnnnngnnnnnnngnnnnnnngnnnnnnnncnnnnnnncnncnnnncnnnnnnnnnngnnnnnnnnntngnaannnnaanaaaannagannnnnnnnnnnnanngnnaaannnnnnnaaannnngnnnnngnnngnnnnnnnncnannnnnnaannnnnnanggnnannnngngnntncgnnnnnnnnnnnnnnnnngccnnnnannnncnnnnnncnnnnnnnnncnannncnnnnnnnntncnncnnncccnccncnnnncgacntngtnatnncntnnnnannnntgaagnntggcnnangngnnnnnnngnnnntnnntnannnntnnanancnnnaannccnncnnccnccngngtncnnntgnnggcannnnnggnggnnnnnggnnggnnannnnnnnannnnnnnanangntnanngnnnnnnaannnncnnangnn

SEQ ID NO: 1001 - DNA, 4000 bp, Escherichia coli
  misc_feature (8)..(9): n is a, c, g, or t
  misc_feature (12)..(13): n is a, c, g, or t
  misc_feature (18)..(19): n is a, c, g, or t
  misc_feature (21)..(27): n is a, c, g, or t
  misc_feature (29)..(31): n is a, c, g, or t
  misc_feature (33)..(34): n is a, c, g, or t
  misc_feature (37)..(37): n is a, c, g, or t
  misc_feature (40)..(44): n is a, c, g, or t
  misc_feature (47)..(49): n is a, c, g, or t
  misc_feature (53)..(54): n is a, c, g, or t
  misc_feature (60)..(62): n is a, c, g, or t
  misc_feature (65)..(66): n is a, c, g, or t
  misc_feature (70)..(70): n is a, c, g, or t
  misc_feature (72)..(72): n is a, c, g, or t
  misc_feature (77)..(77): n is a, c, g, or t
  misc_feature (79)..(79): n is a, c, g, or t
  misc_feature (81)..(83): n is a, c, g, or t
  misc_feature (86)..(86): n is a, c, g, or t
  misc_feature (90)..(91): n is a, c, g, or t
  misc_feature (93)..(94): n is a, c, g, or t
  misc_feature (99)..(99): n is a, c, g, or t
  misc_feature (102)..(106): n is a, c, g, or t
  misc_feature (108)..(108): n is a, c, g, or t
  misc_feature (112)..(113): n is a, c, g, or t
  misc_feature (117)..(118): n is a, c, g, or t
  misc_feature (120)..(122): n is a, c, g, or t
  misc_feature (129)..(132): n is a, c, g, or t
  misc_feature (134)..(135): n is a, c, g, or t
  misc_feature (137)..(138): n is a, c, g, or t
  misc_feature (141)..(141): n is a, c, g, or t
  misc_feature (144)..(144): n is a, c, g, or t
  misc_feature (147)..(148): n is a, c, g, or t
  misc_feature (150)..(150): n is a, c, g, or t
  misc_feature (152)..(154): n is a, c, g, or t
  misc_feature (157)..(157): n is a, c, g, or t
  misc_feature (160)..(162): n is a, c, g, or t
  misc_feature (164)..(164): n is a, c, g, or t
  misc_feature (166)..(167): n is a, c, g, or t
  misc_feature (169)..(171): n is a, c, g, or t
  misc_feature (174)..(177): n is a, c, g, or t
  misc_feature (180)..(187): n is a, c, g, or t
  misc_feature (190)..(191): n is a, c, g, or t
  misc_feature (193)..(193): n is a, c, g, or t
  misc_feature (195)..(195): n is a, c, g, or t
  misc_feature (199)..(201): n is a, c, g, or t
  misc_feature (203)..(204): n is a, c, g, or t
  misc_feature (208)..(208): n is a, c, g, or t
  misc_feature (211)..(211): n is a, c, g, or t
  misc_feature (213)..(213): n is a, c, g, or t
  misc_feature (216)..(216): n is a, c, g, or t
  misc_feature (219)..(219): n is a, c, g, or t
  misc_feature (222)..(222): n is a, c, g, or t
  misc_feature (225)..(226): n is a, c, g, or t
  misc_feature (228)..(233): n is a, c, g, or t
  misc_feature (236)..(237): n is a, c, g, or t
  misc_feature (239)..(239): n is a, c, g, or t
  misc_feature (242)..(242): n is a, c, g, or t
  misc_feature (244)..(244): n is a, c, g, or t
  misc_feature (246)..(247): n is a, c, g, or t
  misc_feature (249)..(249): n is a, c, g, or t
  misc_feature (252)..(253): n is a, c, g, or t
  misc_feature (255)..(255): n is a, c, g, or t
  misc_feature (257)..(258): n is a, c, g, or t
  misc_feature (261)..(261): n is a, c, g, or t
  misc_feature (263)..(266): n is a, c, g, or t
  misc_feature (271)..(271): n is a, c, g, or t
  misc_feature (273)..(274): n is a, c, g, or t
  misc_feature (277)..(279): n is a, c, g, or t
  misc_feature (281)..(281): n is a, c, g, or t
  misc_feature (283)..(283): n is a, c, g, or t
  misc_feature (286)..(288): n is a, c, g, or t
  misc_feature (290)..(293): n is a, c, g, or t
  misc_feature (296)..(297): n is a, c, g, or t
  misc_feature (303)..(303): n is a, c, g, or t
  misc_feature (306)..(312): n is a, c, g, or t
  misc_feature (315)..(315): n is a, c, g, or t
  misc_feature (320)..(320): n is a, c, g, or t
  misc_feature (322)..(323): n is a, c, g, or t
  misc_feature (325)..(325): n is a, c, g, or t
  misc_feature (327)..(327): n is a, c, g, or t
  misc_feature (332)..(335): n is a, c, g, or t
  misc_feature (337)..(342): n is a, c, g, or t
  misc_feature (344)..(345): n is a, c, g, or t
  misc_feature (348)..(348): n is a, c, g, or t
  misc_feature (350)..(350): n is a, c, g, or t
  misc_feature (352)..(355): n is a, c, g, or t
  misc_feature (357)..(358): n is a, c, g, or t
  misc_feature (360)..(362): n is a, c, g, or t
  misc_feature (365)..(365): n is a, c, g, or t
  misc_feature (367)..(367): n is a, c, g, or t
  misc_feature (369)..(374): n is a, c, g, or t
  misc_feature (376)..(378): n is a, c, g, or t
  misc_feature (380)..(381): n is a, c, g, or t
  misc_feature (385)..(385): n is a, c, g, or t
  misc_feature (388)..(388): n is a, c, g, or t
  misc_feature (390)..(397): n is a, c, g, or t
  misc_feature (400)..(403): n is a, c, g, or t
  misc_feature (406)..(408): n is a, c, g, or t
  misc_feature (410)..(415): n is a, c, g, or t
  misc_feature (418)..(422): n is a, c, g, or t
  misc_feature (424)..(424): n is a, c, g, or t
  misc_feature (426)..(427): n is a, c, g, or t
  misc_feature (429)..(430): n is a, c, g, or t
  misc_feature (432)..(435): n is a, c, g, or t
  misc_feature (438)..(438): n is a, c, g, or t
  misc_feature (442)..(445): n is a, c, g, or t
  misc_feature (447)..(448): n is a, c, g, or t
  misc_feature (450)..(450): n is a, c, g, or t
  misc_feature (452)..(462): n is a, c, g, or t
  misc_feature (464)..(465): n is a, c, g, or t
  misc_feature (467)..(479): n is a, c, g, or t
  misc_feature (482)..(485): n is a, c, g, or t
  misc_feature (487)..(487): n is a, c, g, or t
  misc_feature (490)..(490): n is a, c, g, or t
  misc_feature (492)..(494): n is a, c, g, or t
  misc_feature (496)..(499): n is a, c, g, or t
  misc_feature (502)..(512): n is a, c, g, or t
  misc_feature (518)..(518): n is a, c, g, or t
  misc_feature (522)..(524): n is a, c, g, or t
  misc_feature (526)..(531): n is a, c, g, or t
  misc_feature (533)..(536): n is a, c, g, or t
  misc_feature (539)..(539): n is a, c, g, or t
  misc_feature (541)..(541): n is a, c, g, or t
  misc_feature (545)..(547): n is a, c, g, or t
  misc_feature (549)..(550): n is a, c, g, or t
  misc_feature (552)..(552): n is a, c, g, or t
  misc_feature (554)..(556): n is a, c, g, or t
  misc_feature (561)..(561): n is a, c, g, or t
  misc_feature (566)..(567): n is a, c, g, or t
  misc_feature (573)..(575): n is a, c, g, or t
  misc_feature (577)..(579): n is a, c, g, or t
  misc_feature (582)..(583): n is a, c, g, or t
  misc_feature (585)..(585): n is a, c, g, or t
  misc_feature (587)..(592): n is a, c, g, or t
  misc_feature (594)..(600): n is a, c, g, or t
  misc_feature (604)..(605): n is a, c, g, or t
  misc_feature (608)..(609): n is a, c, g, or t
  misc_feature (612)..(615): n is a, c, g, or t
  misc_feature (619)..(619): n is a, c, g, or t
  misc_feature (621)..(632): n is a, c, g, or t
  misc_feature (635)..(636): n is a, c, g, or t
  misc_feature (638)..(639): n is a, c, g, or t
  misc_feature (641)..(641): n is a, c, g, or t
  misc_feature (643)..(645): n is a, c, g, or t
  misc_feature (647)..(651): n is a, c, g, or t
  misc_feature (655)..(658): n is a, c, g, or t
  misc_feature (660)..(666): n is a, c, g, or t
  misc_feature (668)..(668): n is a, c, g, or t
  misc_feature (671)..(673): n is a, c, g, or t
  misc_feature (675)..(678): n is a, c, g, or t
  misc_feature (680)..(680): n is a, c, g, or t
  misc_feature (685)..(688): n is a, c, g, or t
  misc_feature (690)..(692): n is a, c, g, or t
  misc_feature (694)..(697): n is a, c, g, or t
  misc_feature (699)..(700): n is a, c, g, or t
  misc_feature (702)..(702): n is a, c, g, or t
  misc_feature (704)..(704): n is a, c, g, or t
  misc_feature (706)..(706): n is a, c, g, or t
  misc_feature (709)..(709): n is a, c, g, or t
  misc_feature (711)..(712): n is a, c, g, or t
  misc_feature (714)..(727): n is a, c, g, or t
  misc_feature (729)..(729): n is a, c, g, or t
  misc_feature (731)..(736): n is a, c, g, or t
  misc_feature (738)..(742): n is a, c, g, or t
  misc_feature (744)..(744): n is a, c, g, or t
  misc_feature (746)..(746): n is a, c, g, or t
  misc_feature (749)..(758): n is a, c, g, or t
  misc_feature (760)..(775): n is a, c, g, or t
  misc_feature (778)..(781): n is a, c, g, or t
  misc_feature (784)..(784): n is a, c, g, or t
  misc_feature (786)..(786): n is a, c, g, or t
  misc_feature (789)..(789): n is a, c, g, or t
  misc_feature (791)..(794): n is a, c, g, or t
  misc_feature (796)..(796): n is a, c, g, or t
  misc_feature (798)..(798): n is a, c, g, or t
  misc_feature (803)..(803): n is a, c, g, or t
  misc_feature (806)..(809): n is a, c, g, or t
  misc_feature (811)..(812): n is a, c, g, or t
  misc_feature (814)..(814): n is a, c, g, or t
  misc_feature (816)..(817): n is a, c, g, or t
  misc_feature (819)..(819): n is a, c, g, or t
  misc_feature (822)..(825): n is a, c, g, or t
  misc_feature (827)..(829): n is a, c, g, or t
  misc_feature (832)..(832): n is a, c, g, or t
  misc_feature (835)..(835): n is a, c, g, or t
  misc_feature (837)..(839): n is a, c, g, or t
  misc_feature (841)..(842): n is a, c, g, or t
  misc_feature (844)..(847): n is a, c, g, or t
  misc_feature (851)..(851): n is a, c, g, or t
  misc_feature (854)..(855): n is a, c, g, or t
  misc_feature (858)..(858): n is a, c, g, or t
  misc_feature (860)..(860): n is a, c, g, or t
  misc_feature (862)..(863): n is a, c, g, or t
  misc_feature (865)..(865): n is a, c, g, or t
  misc_feature (868)..(876): n is a, c, g, or t
  misc_feature (881)..(882): n is a, c, g, or t
  misc_feature (886)..(888): n is a, c, g, or t
  misc_feature (890)..(898): n is a, c, g, or t
  misc_feature (900)..(900): n is a, c, g, or t
  misc_feature (902)..(902): n is a, c, g, or t
  misc_feature (905)..(906): n is a, c, g, or t
  misc_feature (911)..(915): n is a, c, g, or t
  misc_feature (917)..(919): n is a, c, g, or t
  misc_feature (921)..(923): n is a, c, g, or t
  misc_feature (925)..(926): n is a, c, g, or t
  misc_feature (930)..(931): n is a, c, g, or t
  misc_feature (933)..(937): n is a, c, g, or t
  misc_feature (939)..(944): n is a, c, g, or t
  misc_feature (946)..(946): n is a, c, g, or t
  misc_feature (949)..(950): n is a, c, g, or t
  misc_feature (955)..(955): n is a, c, g, or t
  misc_feature (962)..(963): n is a, c, g, or t
  misc_feature (971)..(971): n is a, c, g, or t
  misc_feature (1144)..(1144): n is a, c, g, or t
  misc_feature (1167)..(1167): n is a, c, g, or t
  misc_feature (1229)..(1229): n is a, c, g, or t
  misc_feature (1238)..(1238): n is a, c, g, or t
  misc_feature (1331)..(1331): n is a, c, g, or t
  misc_feature (1382)..(1382): n is a, c, g, or t
  misc_feature (1391)..(1391): n is a, c, g, or t
  misc_feature (1441)..(1441): n is a, c, g, or t
  misc_feature (1555)..(1555): n is a, c, g, or t
  misc_feature (1589)..(1589): n is a, c, g, or t
  misc_feature (1592)..(1592): n is a, c, g, or t
  misc_feature (1603)..(1603): n is a, c, g, or t
  misc_feature (1677)..(1677): n is a, c, g, or t
  misc_feature (1686)..(1686): n is a, c, g, or t
  misc_feature (1754)..(1754): n is a, c, g, or t
  misc_feature (1763)..(1763): n is a, c, g, or t
  misc_feature (1805)..(1805): n is a, c, g, or t
  misc_feature (1831)..(1831): n is a, c, g, or t
  misc_feature (1840)..(1840): n is a, c, g, or t
  misc_feature (2547)..(2547): n is a, c, g, or t
  misc_feature (2574)..(2574): n is a, c, g, or t
  misc_feature (2583)..(2583): n is a, c, g, or t
  misc_feature (2598)..(2598): n is a, c, g, or t
  misc_feature (2639)..(2639): n is a, c, g, or t
  misc_feature (2676)..(2676): n is a, c, g, or t
  misc_feature (2682)..(2682): n is a, c, g, or t
  misc_feature (2685)..(2685): n is a, c, g, or t
  misc_feature (2732)..(2733): n is a, c, g, or t
  misc_feature (2737)..(2737): n is a, c, g, or t
  misc_feature (2814)..(2814): n is a, c, g, or t
  misc_feature (2824)..(2824): n is a, c, g, or t
  misc_feature (2835)..(2835): n is a, c, g, or t
  misc_feature (2838)..(2838): n is a, c, g, or t
  misc_feature (2847)..(2847): n is a, c, g, or t
  misc_feature (2876)..(2876): n is a, c, g, or t
  misc_feature (2898)..(2898): n is a, c, g, or t
  misc_feature (2907)..(2907): n is a, c, g, or t
  misc_feature (2910)..(2910): n is a, c, g, or t
  misc_feature (2928)..(2928): n is a, c, g, or t
  misc_feature (2931)..(2934): n is a, c, g, or t
  misc_feature (2938)..(2940): n is a, c, g, or t
  misc_feature (2942)..(2942): n is a, c, g, or t
  misc_feature (2944)..(2947): n is a, c, g, or t
  misc_feature (2949)..(2952): n is a, c, g, or t
  misc_feature (2954)..(2956): n is a, c, g, or t
  misc_feature (2958)..(2960): n is a, c, g, or t
  misc_feature (2962)..(2964): n is a, c, g, or t
  misc_feature (2967)..(2971): n is a, c, g, or t
  misc_feature (2973)..(2975): n is a, c, g, or t
  misc_feature (2978)..(2978): n is a, c, g, or t
  misc_feature (2980)..(2987): n is a, c, g, or t
  misc_feature (2990)..(2992): n is a, c, g, or t
  misc_feature (2997)..(2998): n is a, c, g, or t
  misc_feature (3000)..(3002): n is a, c, g, or t
  misc_feature (3004)..(3004): n is a, c, g, or t
  misc_feature (3006)..(3012): n is a, c, g, or t
  misc_feature (3014)..(3019): n is a, c, g, or t
  misc_feature (3021)..(3026): n is a, c, g, or t
  misc_feature (3028)..(3032): n is a, c, g, or t
  misc_feature (3035)..(3038): n is a, c, g, or t
  misc_feature (3041)..(3041): n is a, c, g, or t
  misc_feature (3043)..(3045): n is a, c, g, or t
  misc_feature (3048)..(3058): n is a, c, g, or t
  misc_feature (3060)..(3060): n is a, c, g, or t
  misc_feature (3062)..(3064): n is a, c, g, or t
  misc_feature (3066)..(3066): n is a, c, g, or t
  misc_feature (3068)..(3071): n is a, c, g, or t
  misc_feature (3074)..(3075): n is a, c, g, or t
  misc_feature (3077)..(3077): n is a, c, g, or t
  misc_feature (3079)..(3081): n is a, c, g, or t
  misc_feature (3084)..(3085): n is a, c, g, or t
  misc_feature (3088)..(3089): n is a, c, g, or t
  misc_feature (3092)..(3101): n is a, c, g, or t
  misc_feature (3106)..(3106): n is a, c, g, or t
  misc_feature (3109)..(3109): n is a, c, g, or t
  misc_feature (3111)..(3117): n is a, c, g, or t
  misc_feature (3119)..(3120): n is a, c, g, or t
  misc_feature (3122)..(3124): n is a, c, g, or t
  misc_feature (3126)..(3126): n is a, c, g, or t
  misc_feature (3128)..(3140): n is a, c, g, or t
  misc_feature (3144)..(3144): n is a, c, g, or t
  misc_feature (3146)..(3146): n is a, c, g, or t
  misc_feature (3148)..(3151): n is a, c, g, or t
  misc_feature (3153)..(3156): n is a, c, g, or t
  misc_feature (3158)..(3162): n is a, c, g, or t
  misc_feature (3165)..(3171): n is a, c, g, or t
  misc_feature (3173)..(3189): n is a, c, g, or t
  misc_feature (3191)..(3191): n is a, c, g, or t
  misc_feature (3193)..(3203): n is a, c, g, or t
  misc_feature (3206)..(3208): n is a, c, g, or t
  misc_feature (3210)..(3210): n is a, c, g, or t
  misc_feature (3212)..(3212): n is a, c, g, or t
  misc_feature (3214)..(3216): n is a, c, g, or t
  misc_feature (3220)..(3220): n is a, c, g, or t
  misc_feature (3222)..(3231): n is a, c, g, or t
  misc_feature (3234)..(3243): n is a, c, g, or t
  misc_feature (3245)..(3253): n is a, c, g, or t
  misc_feature (3255)..(3257): n is a, c, g, or t
  misc_feature (3259)..(3263): n is a, c, g, or t
  misc_feature (3265)..(3270): n is a, c, g, or t
  misc_feature (3272)..(3272): n is a, c, g, or t
  misc_feature (3275)..(3283): n is a, c, g, or t
  misc_feature (3287)..(3288): n is a, c, g, or t
  misc_feature (3290)..(3301): n is a, c, g, or t
  misc_feature (3304)..(3306): n is a, c, g, or t
  misc_feature (3308)..(3312): n is a, c, g, or t
  misc_feature (3315)..(3320): n is a, c, g, or t
  misc_feature (3324)..(3324): n is a, c, g, or t
  misc_feature (3326)..(3328): n is a, c, g, or t
  misc_feature (3330)..(3330): n is a, c, g, or t
  misc_feature (3333)..(3335): n is a, c, g, or t
  misc_feature (3337)..(3338): n is a, c, g, or t
  misc_feature (3340)..(3346): n is a, c, g, or t
  misc_feature (3349)..(3350): n is a, c, g, or t
  misc_feature (3352)..(3356): n is a, c, g, or t
  misc_feature (3358)..(3360): n is a, c, g, or t
  misc_feature (3362)..(3364): n is a, c, g, or t
  misc_feature (3366)..(3371): n is a, c, g, or t
  misc_feature (3373)..(3375): n is a, c, g, or t
  misc_feature (3378)..(3381): n is a, c, g, or t
  misc_feature (3383)..(3384): n is a, c, g, or t
  misc_feature (3386)..(3389): n is a, c, g, or t
  misc_feature (3391)..(3392): n is a, c, g, or t
  misc_feature (3394)..(3395): n is a, c, g, or t
  misc_feature (3397)..(3399): n is a, c, g, or t
  misc_feature (3401)..(3401): n is a, c, g, or t
  misc_feature (3404)..(3407): n is a, c, g, or t
  misc_feature (3413)..(3414): n is a, c, g, or t
  misc_feature (3417)..(3417): n is a, c, g, or t
  misc_feature (3419)..(3419): n is a, c, g, or t
  misc_feature (3421)..(3429): n is a, c, g, or t
  misc_feature (3431)..(3438): n is a, c, g, or t
  misc_feature (3440)..(3440): n is a, c, g, or t
  misc_feature (3443)..(3443): n is a, c, g, or t
  misc_feature (3445)..(3446): n is a, c, g, or t
  misc_feature (3448)..(3448): n is a, c, g, or t
  misc_feature (3450)..(3454): n is a, c, g, or t
  misc_feature (3456)..(3460): n is a, c, g, or t
  misc_feature (3462)..(3462): n is a, c, g, or t
  misc_feature (3464)..(3464): n is a, c, g, or t
  misc_feature (3468)..(3473): n is a, c, g, or t
  misc_feature (3476)..(3476): n is a, c, g, or t
  misc_feature (3478)..(3479): n is a, c, g, or t
  misc_feature (3481)..(3492): n is a, c, g, or t
  misc_feature (3495)..(3495): n is a, c, g, or t
  misc_feature (3497)..(3501): n is a, c, g, or t
  misc_feature (3503)..(3506): n is a, c, g, or t
  misc_feature (3508)..(3509): n is a, c, g, or t
  misc_feature (3511)..(3513): n is a, c, g, or t
  misc_feature (3515)..(3519): n is a, c, g, or t
  misc_feature (3521)..(3524): n is a, c, g, or t
  misc_feature (3526)..(3526): n is a, c, g, or t
  misc_feature (3528)..(3533): n is a, c, g, or t
  misc_feature (3535)..(3543): n is a, c, g, or t
  misc_feature (3547)..(3552): n is a, c, g, or t
  misc_feature (3554)..(3555): n is a, c, g, or t
  misc_feature (3557)..(3564): n is a, c, g, or t
  misc_feature (3567)..(3569): n is a, c, g, or t
  misc_feature (3571)..(3578): n is a, c, g, or t
  misc_feature (3581)..(3581): n is a, c, g, or t
  misc_feature (3585)..(3588): n is a, c, g, or t
  misc_feature (3590)..(3590): n is a, c, g, or t
  misc_feature (3593)..(3593): n is a, c, g, or t
  misc_feature (3596)..(3602): n is a, c, g, or t
  misc_feature (3604)..(3607): n is a, c, g, or t
  misc_feature (3609)..(3613): n is a, c, g, or t
  misc_feature (3616)..(3620): n is a, c, g, or t
  misc_feature (3624)..(3628): n is a, c, g, or t
  misc_feature (3630)..(3631): n is a, c, g, or t
  misc_feature (3633)..(3633): n is a, c, g, or t
  misc_feature (3635)..(3635): n is a, c, g, or t
  misc_feature (3637)..(3642): n is a, c, g, or t
  misc_feature (3644)..(3647): n is a, c, g, or t
  misc_feature (3649)..(3655): n is a, c, g, or t
  misc_feature (3660)..(3660): n is a, c, g, or t
  misc_feature (3662)..(3663): n is a, c, g, or t
  misc_feature (3665)..(3667): n is a, c, g, or t
  misc_feature (3670)..(3670): n is a, c, g, or t
  misc_feature (3672)..(3673): n is a, c, g, or t
  misc_feature (3675)..(3676): n is a, c, g, or t
  misc_feature (3678)..(3679): n is a, c, g, or t
  misc_feature (3681)..(3681): n is a, c, g, or t
  misc_feature (3683)..(3683): n is a, c, g, or t
  misc_feature (3686)..(3686): n is a, c, g, or t
  misc_feature (3689)..(3692): n is a, c, g, or t
  misc_feature (3694)..(3695): n is a, c, g, or t
  misc_feature (3697)..(3697): n is a, c, g, or t
  misc_feature (3701)..(3704): n is a, c, g, or t
  misc_feature (3706)..(3706): n is a, c, g, or t
  misc_feature (3708)..(3713): n is a, c, g, or t
  misc_feature (3715)..(3724): n is a, c, g, or t
  misc_feature (3726)..(3730): n is a, c, g, or t
  misc_feature (3732)..(3732): n is a, c, g, or t
  misc_feature (3734)..(3734): n is a, c, g, or t
  misc_feature (3736)..(3740): n is a, c, g, or t
  misc_feature (3742)..(3744): n is a, c, g, or t
  misc_feature (3746)..(3746): n is a, c, g, or t
  misc_feature (3748)..(3748): n is a, c, g, or t
  misc_feature (3750)..(3754): n is a, c, g, or t
  misc_feature (3757)..(3765): n is a, c, g, or t
  misc_feature (3767)..(3784): n is a, c, g, or t
  misc_feature (3786)..(3788): n is a, c, g, or t
  misc_feature (3790)..(3792): n is a, c, g, or t
  misc_feature (3794)..(3799): n is a, c, g, or t
  misc_feature (3803)..(3804): n is a, c, g, or t
  misc_feature (3806)..(3809): n is a, c, g, or t
  misc_feature (3812)..(3815): n is a, c, g, or t
  misc_feature (3817)..(3819): n is a, c, g, or t
  misc_feature (3822)..(3822): n is a, c, g, or t
  misc_feature (3824)..(3824): n is a, c, g, or t
  misc_feature (3826)..(3828): n is a, c, g, or t
  misc_feature (3830)..(3832): n is a, c, g, or t
  misc_feature (3834)..(3835): n is a, c, g, or t
  misc_feature (3837)..(3840): n is a, c, g, or t
  misc_feature (3842)..(3843): n is a, c, g, or t
  misc_feature (3845)..(3855): n is a, c, g, or t
  misc_feature (3858)..(3860): n is a, c, g, or t
  misc_feature (3862)..(3878): n is a, c, g, or t
  misc_feature (3880)..(3880): n is a, c, g, or t
  misc_feature (3882)..(3882): n is a, c, g, or t
  misc_feature (3884)..(3889): n is a, c, g, or t
  misc_feature (3891)..(3891): n is a, c, g, or t
  misc_feature (3893)..(3901): n is a, c, g, or t
  misc_feature (3903)..(3905): n is a, c, g, or t
  misc_feature (3907)..(3907): n is a, c, g, or t
  misc_feature (3909)..(3914): n is a, c, g, or t
  misc_feature (3917)..(3925): n is a, c, g, or t
  misc_feature (3927)..(3930): n is a, c, g, or t
  misc_feature (3932)..(3932): n is a, c, g, or t
  misc_feature (3934)..(3938): n is a, c, g, or t
  misc_feature (3942)..(3945): n is a, c, g, or t
  misc_feature (3947)..(3949): n is a, c, g, or t
  misc_feature (3953)..(3958): n is a, c, g, or t
  misc_feature (3960)..(3963): n is a, c, g, or t
  misc_feature (3965)..(3966): n is a, c, g, or t
  misc_feature (3969)..(3971): n is a, c, g, or t
  misc_feature (3973)..(3973): n is a, c, g, or t
  misc_feature (3977)..(3979): n is a, c, g, or t
  misc_feature (3981)..(3984): n is a, c, g, or t
  misc_feature (3986)..(3987): n is a, c, g, or t
  misc_feature (3989)..(3989): n is a, c, g, or t
  misc_feature (3991)..(3991): n is a, c, g, or t
  misc_feature (3993)..(3993): n is a, c, g, or t
  misc_feature (3995)..(3997): n is a, c, g, or t
  misc_feature (3999)..(3999): n is a, c, g, or t
tgggctcnnagnntcacnntnnnnnnncnnnannaanaannnnntcnnnaagnnaatgannntcnnaaantnatgantntnnnctnagcnntnntcatnacnnnnntntttnncctnntnnncgccctnnnnanntnnttntcngcnnancnnnctntcnnntntnnannnatnnnnctnnnnnnnnttnnantngttnnngnntttnccntntanttnatntannannnnnnttnncnatncnanngnccnnananngancnnnntcaangnncannntncnggnnntnnnnacnngttatnctnnnnnnnatntttcntnngntncttgnnnncnnnnnnannagntncnnnncnncnnnccntnannnnnnannngnnccantgncnnnnnnnnttnnnngannngnnnnnntannnnntngnntnnannnnaanaaannnntnnanannnnnnnnnnnanngnnnnnnnnnnnnnttnnnnanaanannnannnnctnnnnnnnnnnntcaatntttnnntnnnnnnannnnaananttcnnncnntnannnttccnccccnnattttnnnannnganntngnnnnnnannnnnnntttnntgnnctnnnntttntnnnnnnnnnnnnaanngnncntnnngnnnnntccnnnnannnnnnncnggnnntnnnnanaattnnnnannnannnnannancnanttntnncnnnnnnnnnnnnnnanannnnnntnnnnngngngcnnnnnnnnnntnnnnnnnnnnnnnnnnatnnnnaangncanannnnantnccttnctnnnntnntntnncnctnnnntnnnatnaanannngnncnnnnaacncanntcnancnngnttnnnnnnnnnaaaannaaannnannnnnnnnngngnttnnttttnnnnntnnntnnntnnaaanntnnnnntnnnnnntnccnnatagntttctcnnatcttttntgataaaataggctcaatctatttctaggaggataaaatatgatttctactattggtattgttagtttatctagtggcattatcggagaggactttgtcaaacacgaagtggacttgggtgtccaacgtctcaaggacctgggactcaatcctatctttttgccccattcgcnaaaaggattagactttatcaagnaccatcctgaagctcgtgcagaggatttgattcatgccttttctgatgatagcatcgacatnatcctatgngccatcggtggagacgatacctatcgcttactaccttatctttttgaaaatgaccaactccaaaaggttatcaaacaaaaaatttttcttggnttctcggatacaaccatgaaccatctcatgttgcataaactaggaatcaanactttttanggtcaatccttcttagcagacatttgtgaattagacaaagaaatgctagnctatagccttcactactttaaagaattgattgagacgggaagaatctcagaaatccgccctagtgacgtttggtatgatgaaaggactgacttcagtcccaaggctctgggganacctcgtgtcagtcatgcaaataccggttttganttnttgcaaggaantgcccagttcgagggaaaaatcctcggtggttgcctcgaatccctctacgatatctttgacaactctcgatacncagatagcncggagctctgccaaaaatacaaacttttccctgacttgtcagactgggaaggaaagatcctcttgctngaaacaagngaagaaaagcctgagccggaagacttcaaaaagatgttgcgnactttaaaggacactggcatattcgnggtcatcantggactcttggtcggaaaacctatggatgaaactttctatgacgactataaagaggcactattggatatcattgatagcaatatcccgattgtctataatttgaatgtcggccacgcaactccaagagcaattgtccccttcggagttcacgcctatgtagatgcaaaggagcaaatcattcgctttgactataacaaaaaataaatagtttctctatttttgtgcttttgtattcgttttcgttacaatttgtatctgaatttattgcatttcgctaatttctatgatatccttttgaaggaggtgtatatgacaaaacaaaaaattaatcgaatcgtaggttctattggtgcctttattggaattatagtatttattgcctacatacctcaaattatcgctaatttacagggaaataaagctcaaccatttcaacctttatcagctgctatatcttgcttaatctgggttatttatggatggacaaaggaacctaagaaggattggatactaatcattccaaattcagctggtgttattttaggtggaatcacttttttgacttcactctaacaaatctaatagtatatataaaaagctgggaaaaatttctcagcttttttctatattctcagatatgctagttacctgtacacactaattcctgcttttccattcacaatcattctcgtggtcatcaactagncctgcagcctgtagaaaagacaagacngcgactggncctgtgaacttgaancctcgttttttgagatctttggctaatttctcagacaaagntgttttagctggggcttggcggtaatcgggaacatcnttaacnatngttttcccctcaacaaaagaccaaagataggcatcaaaagagccatnntctncctgtagtcgtagaaaggcttgggcgttagcgcgtgtagcaaaaatcttggctctatttcggatgatggctggattntccagcaagncttccaattcngtntcggtcatntctgcgaccgcttgaatttgatagccatnaaatgcttctcggaaagcttgncgtttgttnagnaccgtttcccaagacagnccnnnntgannngntnnnntnnnnannnannnannnaannnnngnnnatnannnnnnnnttnnncccanncnnnancnnnnnnngnnnnnnannnnnnannnnncannnngancnnngannnnnnnnnnntnannntntnnnnctnntngnnnaannttnnaannnnnnnnnngaaanggntnnnnnnngnntnnntngnnnnnnnnnnnnntttntngnnnntnnnnannnnngtnnnnnnntnnnnnnnnnnnnnnnnngngnnnnnnnnnnnttnnnantntnnntttncnnnnnnnnnntgnnnnnnnnnntnnnnnnnnngnnnannnnntnnnnnnantannnnnnnnnccanntnnnnnnnnnnnngtnnngnnnnnttnnnnnnaatntnnngnaannnanncnnnnnnntanngnnnnngnnntnnntnnnnnnannnaannnngnntnnnnannannannntnaannnnaagagnngananannnnnnnnncnnnnnnnngnaancnnantnnnnnannnnntnanatgnnnnnntgnannannnnnnnnnnnnagntnnnnntnnnnanncnnnannnnntnnnnanannnnnnannnnnnnnnttgnnnnnncnnannnnnnnntannnannnnnnnnatncagnnnntnacngtnnnnnnngnnnncnnnnncannnnntttnnnnntnntntngnnnnnnannnntnnnnnnnattcnannannnttntnntnnanntntnatnttnnnntnntntacnnnnantnnnnnnannnnnnnnnntnnnnngnancnnnnntnnnanancnnnnntgnnnnnnnnntnnnnnnnnnnnnnnnnnngnnnannntnnnnnngatnntnnnnttnnnngnnntgntnannnannngnnannnngnntnnnnnnnnnnnggnnngnnnnnnnnnnnnnnnnntntncnnnnnntnannnnnnnnntnnntntnnnnnnttnnnnnnnnnannnntncnnnnnaaannnnannntgtnnnnnntnnnntnnatnnntnattnnntnnnntnntntncnannnana

SEQ ID NO: 1002 - DNA, 4000 bp, Escherichia coli
  misc_feature (101)..(101): n is a, c, g, or t
  misc_feature (481)..(481): n is a, c, g, or t
  misc_feature (492)..(492): n is a, c, g, or t
  misc_feature (524)..(524): n is a, c, g, or t
  misc_feature (569)..(569): n is a, c, g, or t
  misc_feature (690)..(690): n is a, c, g, or t
  misc_feature (1086)..(1086): n is a, c, g, or t
  misc_feature (2145)..(2145): n is a, c, g, or t
  misc_feature (2354)..(2354): n is a, c, g, or t
  misc_feature (2414)..(2414): n is a, c, g, or t
  misc_feature (2416)..(2416): n is a, c, g, or t
  misc_feature (2441)..(2441): n is a, c, g, or t
  misc_feature (2445)..(2445): n is a, c, g, or t
  misc_feature (2470)..(2470): n is a, c, g, or t
  misc_feature (2498)..(2498): n is a, c, g, or t
  misc_feature (2506)..(2506): n is a, c, g, or t
  misc_feature (2509)..(2510): n is a, c, g, or t
  misc_feature (2513)..(2513): n is a, c, g, or t
  misc_feature (2529)..(2529): n is a, c, g, or t
  misc_feature (2532)..(2532): n is a, c, g, or t
  misc_feature (2536)..(2536): n is a, c, g, or t
  misc_feature (2547)..(2547): n is a, c, g, or t
  misc_feature (2549)..(2549): n is a, c, g, or t
  misc_feature (2553)..(2553): n is a, c, g, or t
  misc_feature (2569)..(2569): n is a, c, g, or t
  misc_feature (2653)..(2653): n is a, c, g, or t
  misc_feature (2655)..(2655): n is a, c, g, or t
  misc_feature (2658)..(2658): n is a, c, g, or t
  misc_feature (2662)..(2662): n is a, c, g, or t
  misc_feature (2664)..(2664): n is a, c, g, or t
  misc_feature (2669)..(2670): n is a, c, g, or t
  misc_feature (2676)..(2676): n is a, c, g, or t
  misc_feature (2679)..(2680): n is a, c, g, or t
  misc_feature (2708)..(2708): n is a, c, g, or t
  misc_feature (2712)..(2712): n is a, c, g, or t
  misc_feature (2743)..(2743): n is a, c, g, or t
  misc_feature (2793)..(2793): n is a, c, g, or t
  misc_feature (2814)..(2814): n is a, c, g, or t
  misc_feature (2841)..(2841): n is a, c, g, or t
  misc_feature (2975)..(2975): n is a, c, g, or t
  misc_feature (3025)..(3025): n is a, c, g, or t
  misc_feature (3044)..(3044): n is a, c, g, or t
  misc_feature (3060)..(3060): n is a, c, g, or t
  misc_feature (3105)..(3105): n is a, c, g, or t
  misc_feature (3121)..(3121): n is a, c, g, or t
  misc_feature (3186)..(3186): n is a, c, g, or t
  misc_feature (3193)..(3193): n is a, c, g, or t
  misc_feature (3213)..(3213): n is a, c, g, or t
  misc_feature (3258)..(3258): n is a, c, g, or t
  misc_feature (3275)..(3275): n is a, c, g, or t
  misc_feature (3310)..(3310): n is a, c, g, or t
  misc_feature (3312)..(3312): n is a, c, g, or t
  misc_feature (3351)..(3351): n is a, c, g, or t
  misc_feature (3555)..(3555): n is a, c, g, or t
  misc_feature (3598)..(3598): n is a, c, g, or t
  misc_feature (3631)..(3631): n is a, c, g, or t
  misc_feature (3700)..(3700): n is a, c, g, or t
  misc_feature (3931)..(3931): n is a, c, g, or t
  misc_feature (3942)..(3942): n is a, c, g, or t
  misc_feature (3949)..(3949): n is a, c, g, or t
acattaagcgtctaaagggcgtgggagactatactgctgctgccatcggaagcttcgcttttggtcttcaagtggctgcagttgacggcaacttctatcgngtgctggcgcgttactttggtattgacacgccaatgaacactcccgagggagttaaactctttgccgctttggcccaagagcaccttcctgagggtgcagcggctgactataaccaagctgttatggacttcggtgcaacgctatgtaccccaaaagctccgcaatgtacaaggtgtccattggctgaaacgtgtgttgcgaggcgcgaaaacaaggttgatcaactgcccgttaaactaaaaacactaaaggtgctgacgcgaaacctctccttatattatataaggtggaatgggaaaacagccattcataaacgtggaagcggtgatatatggcaaggattatggacagttcccgagtccgaacatctcactccacnactccgaaaanctgccgttctactgcaaaaaggggtgaaacangtgctcactcaccgcattctacttgccgacttctatctcctctcnccaaaagaaaagcctgctttgcccgaagattttatctggatagatgaaaaagacatcgaaaactatggcataccaaggctgatggagaagctgataagccttgctcaaccccttcaaaganaaggaatcagaccatgaaagcctacaaagaaaacagaaaagcgctactctacatcgtgtaaagtaacgccttccttatcgtcaactaaattaattcgtttcagaaattcagtatccttaacttgtcagttagccttctccgctcttagacaagcaaggatatgtttcctacttaaactcattccgaatcttctctgctatttccttaaattcttcttcgcttagtttcacatgatgtttgaagtctacatcggcctcactattcatgggaagaagatgtatatgcgcatgatttacctccaaaccaagcactacttcagccacctttttacatggaaaggcagccttgattgccttggctacgcgcttagcgaacacctgaaactcagccaattcntcatcatccatgtcgaagatatagtctacttcgcgacgtggaacaaccaaagtgtgtccctttgtgactggatcaatgtcgagaaacgcataaaatttgtcgctctctgcacacttatagctgggtatttcgcctgcagcaatctttgaaaatatcgtactcattgcggtaatctttatgttattgcaaagcttaagcctcgatactaatcttatctatgcgtagtttgatgacgccacgcggtatctttacctctacaacatcaccgactttatgattcaacaagccttgagcaataggcgtcttgatgctgattttgccctgctttagattggcttcactttcacttacaatagtatataccatcttagacttattagacatgttcgtcatctctacctttgacataatctgaacggcatccgcgcttaaacgagacacgtcaactatctttgcttcggcaatgtcaagcttcatcttattgattttactttcaagatgagcttgggcttctttggccgcatcatactctgaattctcacttaaatcgcctttatctcgggcctcagcaattgcggctgatgccttaggacgctctattgattcgagccgtttgagctctgctacaagtttgtcgtagccttcttgtgacatgtaagccataatctttcttgtttgtttaatataaattgaacgctgtaagagtaaacaataagataagaattccgacatattgtctctgtcggaattccaaatcctctttctactctttgtgttttatctgctgcaaagatagagattaaatctgaataaaacaagtttttaaatatcttttgcgtaaaacggcaagttcaaatgggtttgtttgcgtacacaaagttgacataaatcaattaaaactattataaattacttttatagataatagacttgacaagattagtaaaatggagtaactttgcaatgtgtttttcatagtattagatttaaggttaataaagattgggactcagcggagccccttttttgtttttagccagtttgtaacgccgaaaaacngcaaacccaagaactttcaaaagtcgttttaagcggaaatcatttgtattgtgaagagaaataaagctaaatcacaaacaatagtcctcaaatcgtttcatcaactgcaaccattgccccacagcctcatcctccctcattccctacccccacacaacttagctctcctctcctatggaggaggtgggaaaggtgcaatcaaaagcgangtaaaatgaggcagattagtgcacgaaatgacgcagattagcgcatgaagtgacgcaaangncagcgtgaaatgacgcagattgcgncagncaatgctacaaagcataaaataaangccgttttcagtccttacaacttgctgnaaacggcnttnnaanttctattttattgatntanaaantgcttttatcntncacnccttctttatataaanacacaaaaaacgcccgcattttgtgcgggcgaatgattgaaagcaagtttcaatatattatggctaagtttgtagtttgcttgngntcncacntngattnnattttnatnntcctttaatcttgtgcaatcaacgatancatntcaggtaagacagggcgcgaaaggcatgtcnttggcacaccattccgcccatttgaagtctatctcttaacgattttattntctattttgatgccggctgcncgtgtttgtgaggcacgactgaagacnatatcattagattttgcataactataacgggcaagtttgaagtcgataaactcgttgttattcactcctatcatagtaccttcaaagcggtttgcatcaagatagctctgcatgttacttgttttatcgagcanagtgatgcgatatttcttcttagaaccatcataagtgacatagatatcgnttgtagtcttgtcgatttnccatgtaaaatagagngtttgtgattgcgtattaccatttgaagtggctgtatctatctcncgaccacggcctttcngtcccgttgcatcatattgatcgaactctaattgtgcgttaaattgtgcgatggcgcgttgtccnttgtcgncattatactcatatctcatngcgccttcccagtgtcctcgcagggtgttggctaagtttttgagntattgtgcatcgctgtntgcattgccatctgaattattcgaccaccagtctngnttgtcttcatagtatgttgagcctgaactacagcttganaatgctatggaaacagatgctatcaacagcaaaaataagattttagtgagctttttcatatcctaattctattttaataaacaaatgatttatcttttattcagcgaagaatcgttgtggacggctttctgatttgactgcactgcgactcttggcatagccataatagccatcagaataatagttgttgtaattataatcgtnccagtttggcgaataagtatggtaaagtgtgatggtcaaatcnttgccagtgttcgttcgaatatatcccgacagncggtcatcgctaagactataattatagattactatgtcagtattctcttctatgaagtgaatatagatnttagaattccttacttgccacgtgatgtgactcgcttgatagtcataaggagcattactgtagtagtcaacccaatagccatcgcccgagttataaccgctattgaactgcactttgctttccgatgctttatattcacggtcattatatcgcgaagatacatagacattgccctgccatgtgccgtttaaggtggcagcaacttcggcatcttcgtcacaagaaaccaangcaacagaaancattgtnataagaaccatggagaatattgtcgtaaatcgtttcataataacatgagtt

SEQ ID NO: 1003 - DNA, 4000 bp, Escherichia coli
  misc_feature (1639)..(1639): n is a, c, g, or t
  misc_feature (1715)..(1715): n is a, c, g, or t
  misc_feature (1953)..(1953): n is a, c, g, or t
  misc_feature (1955)..(1955): n is a, c, g, or t
  misc_feature (1960)..(1960): n is a, c, g, or t
  misc_feature (1966)..(1966): n is a, c, g, or t
  misc_feature (1984)..(1984): n is a, c, g, or t
  misc_feature (1990)..(1990): n is a, c, g, or t
  misc_feature (1992)..(1994): n is a, c, g, or t
  misc_feature (1997)..(1997): n is a, c, g, or t
ggccctgcgcaggtcgagcggacggcctgcgatgcagaccacgataagcggcgttcccgtcgcctttatgcgccgcagcagctcttcctgttctccgagcagcgcgagcgtcgctcggtcgaaaccttcgccgcactccatgtcgcgcacctcgtcgtgcgcggctttggccgcgcccgtttgcaggaattccgtgtcgaagtcgcgggcgctcgatccgccgatgaccacgaccgccgcatctgtgccgcgggccgcggagacggccgccgcgatttccgaccgatcgccgccgcgcaccgtacagccgcggctgtagacgacgcggtcgcgccccagcagtttttccagcccgtcccggacggtgttcgccgctgtctgctgggccgtataatcccctaactggttgtagatgttgtcggcgttgggaccgatgacggctacccgccgcaggcgccggggatcgagcggcagggtgccgctgcggttttcgagcagcgtcaccgactgccgagccgcttcgagcgccagctccgagtgggcggcgcatccgacctccgcggcggcagcttcgtcgatataggggttctcgaacagtcccatttcgaacttcagggccagcacgcgctccacggcccggtcgatctccgcttcggcgacgtcgcccgcttccgcggcctcgcggagtgaggcgaaggcgccgcccttcaggtctgcgtccacgcccgcccgcaatgcctgcacggcggcttcccggacgcttccggccacgccgtgcgtctcgtgcagcccttcgatgctcagcaggtcggagaccacgaagccgtcgaagccccattcgccgcgcaggatgtcggtcagcatgcggcggttggccgtgcagggaatgccgtctaccgagttgtaggccgtcatcaccgagcgcgctccggcctttacggctgcttcgaacggcggcaggtaggtctcgcgcagttcgcgttcgcccagcaggttgcttccgccgttctggccgccctccgatgcgccgtaggcgatgaagtgcttgagtgtcgagagggcgtgccgcgactgtgagaggtcgccggaacccgtgccgcggacataggcttcaccgatgcgcgccgtcaggtaacagtcctcgccgtagctctcttcggtgcgcgaccagcgcgggtcgcggacgatgtccagcacgggaccgtaacagatatgtccgccctgcaggcggatttcggcggcgatgaccttgcccatgcgttcgatcagctccgggttccatgtcgaagcctgtcccggcgccgtggggaatgtcgtggccccgatggccatgtggccgtggggggcttcctcagcgaggaagaggggaatgcccagccgcgagtgctgcacggcgtagcgctgcattcggttggccagccgcgccgccagctgcggggtcagccccgtccgcaggtctttctgcgtccacggatcggcgcggaacgtaccccacaacatgccgatatgtccgttttgcaccgcttcgcggaaagcgtcggtcagacggaccgagtcgccgtgccgttcgtacatctcccagccgtaaggcgacgtcagctgtccgatcttctcgtcgagcgtcatctcggccgtcagnagttcggcccgtttctgcggcggaaggcttgtgtcgcgccagtcggcgctgcatgccgcggcggccgcgcacgccntcagcagtaaaagtcgtttcataggggttgctgttttgtccagtctgcgggttcgggacccatttcgaagcggagttccccgcctgcggcgatctccgcgtaatcgatgtaatatttccggtacgcttcgccgttgagcgtaatgcgctgtatgtagatgttctccggcgagttgtccgcagccgtgatgcggaattccccgccgcggacccgcagcgtcgcgccgtctacggcgggngngccgnagaagnagcggccgccggccggcnccgccngnnncangcccagcgccgagagtacgtaccatgccgacatctgcccgacgtcctcgttgccgcagagtccttccggacggtcgtggtagagttcgccgaggatgcggcgcaccttctcggcgcatttccacggttgcccgatcatcgtgtaaatataggttatgtggtggctcggctcgttgccgtgggcgtactggccgatcagccccgatatgtcgggcgaagcgtgcgcgcccatgtcgccttcggcgaggaacagcgagtcgagcttcccgacgaagcgttcccggccgccgaagcactccatgagtccttcgatgtcgtgcggcacgagccatgtgtactgccatgcgttgccttcggtgtagtcctgctccatgtggcgcgagtggaacggatcgaaaggcgtgcgccatgcgcccgacgccgatctgccgcggataaacccggtcgaggggtcgaaataatggcggtaggccttgctgcgggcgaggaaatagtcgtaatcctcccgtttgccttcgcgctgcgcggcctgcgccagtgcccagtccgcgatggcgtattcgagacagtatccgaccgattcgttgaactcatagggaatatatccgtacctcttgtagaggtccagcctccggtcgtcgcgcatggccgaactcttcatcgcttcgtaggctttcgcccggtcgaagccgccgaatcctttcagcagggcgtcggccaccacggggatggccggattgccgaccatgcagtcggtttcgcagcccatcaggtgccagacgggaagtttgccctgctgttcgtggatgcgcagcatcgtattgatcaggtcgccgaccttttcgggatggatgagcgtcagcaggggatgcgccgcgcggtaggtgtcccaaagcgagaaggtggtgtaattggtgaaggtcgtgtcgcggcggaccgctccgtcggcgccgcggtagtcgccgttcacgtcgcagaagagcgacggcgcgatcatggtgtggtaaagcgctgtgtagaagatccgtcgcaccgccggatcggctgtttcgatgcggattttcgacaactcgccgttccatgccctgcgggtggcttcgcgcacggcttcgaaatcccagccggggcactccgcctgcatgttccgccgggcattttccgcggaaacggccgaaagcccgaccttgacggtgatgcgttcgttctcctccgtccgaaaaccgaagcgtccgtagagtttccgcccgcgggccgagcggccgtcggcggagagcgtatccgcgccggtgaagacgatccgttcgaagggcttcgagaattcggcgtggaagtagacgcgctggtcgtcggcccagcccgtcgaatatcgccagccctcgaccgtacggtcgctgcatgcggtgatgccgcagtcggtggagcggtcccagccctgcccgttttcgaggtcgaggacgatacccgcgtcgtccgatgcggggaaggcgtagcggctcattccgacgcgcggcgaggcggtcagctcgacgccgatgccgtagcgcagcaggcgagtggcatagtagcccggcgcgcaccgttcgtcggcgcggctgaaacgggaccacatgcccgacgacggatcgccggccgtgccgcgtcccggcgtgactttgccgacgaccggcatcagcgagatgtcgttcaggtcgccgatgcccgtgccgctcaggtgcgtgtgaccgaacccgatgacggtcgtgtcggcgtaattgtagccggagcaccagtcccatgtctgcgggatgctcgtcggaccgagctgtacgaatccgaacgggacgttggcgcccatgaagacgtgtccgtggtcgcccgtgccgatgtagggatcgacgtattgcgtgtaatcctccggcacggcggaactgcatgcgccgcagagcagcgcggcgattgccgggagaaagatgatgcgtttcataattcgtgtcgttatacagcggatgcggcggacgcagccgc

SEQ ID NO: 1004 - DNA, 4000 bp, Escherichia coli
  misc_feature (128)..(128): n is a, c, g, or t
  misc_feature (155)..(155): n is a, c, g, or t
  misc_feature (1408)..(1408): n is a, c, g, or t
  misc_feature (1992)..(1992): n is a, c, g, or t
  misc_feature (2037)..(2037): n is a, c, g, or t
  misc_feature (2044)..(2044): n is a, c, g, or t
  misc_feature (2046)..(2047): n is a, c, g, or t
  misc_feature (2050)..(2052): n is a, c, g, or t
  misc_feature (2055)..(2055): n is a, c, g, or t
  misc_feature (2061)..(2061): n is a, c, g, or t
  misc_feature (2128)..(2128): n is a, c, g, or t
  misc_feature (3125)..(3125): n is a, c, g, or t
  misc_feature (3473)..(3473): n is a, c, g, or t
  misc_feature (3617)..(3617): n is a, c, g, or t
atttaccaccagaagtccccagtaataataatggtaagcccatgcctaaactgagcacataaagtgttaaaccaccgacgaggtagtcaccactttgcgccacataaagtaaagcagcagacaatggngctgttgtacacggtgaagcaatcaanccagacaatacacccatcataaatacgccaacatagttgccgcctttttgctggttactaacctgagtgagcttattcatcatgccgctaggtaatttgatttcgtaccagccaaacatcgacattgccaataatacaaataagatactaaagctaattagtacagtaggatgctgtaaatacccttgtacttgcccacctaatgatgcaaccactaagcccagcgctgcgtaagtaacggccataccttgtacatatacaaacgacagcgagaacgcttttttagtcgacaaattctgctgacccgcaataaggctcgacaaaatcggaaacattggaaatacgcaaggcgtaaaagccagaccaatacccactaaaaagaagattactaggttagttagtaaaccttgcgatgccagcttatcggtatatgactgctcacctgctggttttgatgcttcttgagagggcgctgatgatgcttcatttgtatcagctgcttgtgttaatgccgctaatgcgttccccgcatctgcagtctgtgatacttgctcacctgcaatcacagataaaggaatggttctaacttctggcggataacataaccctgcttcggcgcagccttgaaaacgcactttaacaactgcaccttctgtgacgttgctgagcttagaaaccacacttaacgaatcaaagaatacctcagtcttaccaaaaaattcatcttcaataatcacgcccttgccaagatcaggaacttcaatatcagcgcctttggcaataatttcgactttctttttgtaaaggtaataatcaggcgcaatatcccagccaataaataaggttttgccttgctggtcaaaatcgaaaacaaacgcctgatcaaccgggagaaatgtttgctccgcaggttgtagtagatttccaagtaaattgttattacttgcacttgctggcataagccacaatgcacaaagtaataaaaggaacgatcgcattaattaagtacctcatccatccaattaaaataggctaaattgcccgtagccacatcaacgacctgaatttcaggcacctcataactatgcaatttcttgatagtttggatcacctcattcattttttctgacttagttttgatcagtaacttactctcaatagcttgagttacctcgccttcccacatgtaaatagattcaatagtaggcaaaatgttcacacaagcagctagcttttctttaactagatgttgngccaactgacgggcttcagcctcatttgcacaagtcgtaaaaataagtcgaaaatgcgtagtcataaggaacctttatttgattacgtgagtcgcaccatagtagccgatagtaactataatgtgtagcgagcaaggtgatcctaggttccgtcttgaaaaatgacctgctcaccccaatttatatttcactgactcgaaagagaatgacattttttagagagcgttatgtttagatttttgtttttgttatttattttagtgccgattgtggagatcgcgttactcatccaagtgagtgaagtgatcggcggctttgccaccatagcgcttgtaattgtgaccgcgattgtcggtgcgaaattagtgaagcagcaaggtatgggcgcgattcaaaacgtgcaattacaaatggcacaagggcaaatgcctgcaaaagaattatttactggattatgtgtgattatcgccggtgttttattaatgacaccaggcatcatgactgacttttttggctttttactacttacgccagcaatccgcaacaaactggctgcaggccttgctagtcaagcgactgtgcgnatgagttcgcaggcaaatcaaggctctgcacacttccaataccanagtaaancnnccnnncangaaganccaaaccatcaacctacaactattgatggtgaatttgagcgaaaagattaaaattttttaatttttntacttggatttttttaagccacccccattaatgaatgcaatgaaacgcaacgggtggcttagcactcccctgcaataacacaagattttttctgtactgttcagaaactgttaggagaactaaataaatgaacattcgtcctttacatgatcgcgtcatcgttaagcgtctagaagaagaaactaagtctgctggcggtattgtattaactggctctgcagctgaaaaatcaactcgcggagaagttatcgctgttggtaatggccgtgttttagacaacggtgaagtaagagcattagaagttaaagccggtgacactgtgctgttcggctcttatgttgaaaaagctgaaaagatcgaaggtcaagagtacctgatcatgcgtgaagataacattctaggcattgtaggctaatcctacttttcgtttagcaacccgtttacagaatttaagaggaatttaatcatggcagcaaaagaagtactttttgcaggtgacgcacgtggcaaaatgctaactggcgtaaacattttagcaaacgcagtaaaagtaactttaggtcctaaaggccgtaacgttgtattagacaaatcattcggcgctccagtgatcactaaagatggtgtatctgttgcaaaagaaatcgagcttgaagacaagttcgaaaacatgggcgcacaaatggttaaagaagtagcgtctaaagcgaatgacgctgcaggtgacggtacaacaactgcaacagtattagcgcaagctatcgtaaacgaaggcttaaaagcagttgcagcgggtatgaacccaatggaccttaagcgcggtatcgacaaagcagttactgcggcagttgaagagcttaaagcactttctgttccatgtgcagacactaaagcaattgcacaagtaggtactatttctgctaactctgataaagaaatcggtgacatcattgcagaagcaatggaaaaagtaggccgtgattcaggcgttatcacngttgaagaaggtcagtcgttagaaaacgaactagacgtagttgaaggtatgcagtttgaccgcggttacctttctccttatttcatcaacaacgctgaaaaaggcgctgtagagctagacaacccattcattctacttgtagacaaaaaagtatctaacatccgtgagctactacctacattagaagcagtagctaaagctagcaagccactacttatcattgctgaagaccttgaaggtgaagcacttgcaacacttgttgtaaacaacatgcgcggtatcgttaaagtatctgcggttaaagcacctggttttggcgaccgtcgtaaagcaatgctacaagacatngcagtgttaacaggtggtactgttatttctgaagaaatcggtttagagctagagaaagcgacaatcgaagacctaggtacagcgaagcgcgttgtgatcactaaagatgatacaacaatcatcgacggtgcaggcgaagaaganggcatcaatggtcgtgttgcacaaatcaaagcacaaatcgaagaagcgacgtctgactacgataaagagaaactacaagagcgtatggctaaactagctggcggtgttgcagtaatcaaagttggcgcagcaactgaaatcgaaatgaaagagaaaaaagaccgcgttgaagatgctctacacgcaactcgcgcagcggttgaagaaggtgttgtaccaggtggtggtgttgcactagttcgcgtagcaagcaaacttgttgaacttgctggcgacaacgaagaccaaagccacggtatcaaagttgcactacgtgcgatggaagcaccacttcgtcaaatcgtaactaacgcaggtgacgaagcatctgttgttgttaactc

SEQ ID NO: 1005 - DNA, 4000 bp, Escherichia coli
  misc_feature (315)..(315): n is a, c, g, or t
  misc_feature (692)..(692): n is a, c, g, or t
  misc_feature (983)..(983): n is a, c, g, or t
  misc_feature (1002)..(1002): n is a, c, g, or t
  misc_feature (1430)..(1430): n is a, c, g, or t
  misc_feature (1541)..(1541): n is a, c, g, or t
  misc_feature (1550)..(1551): n is a, c, g, or t
  misc_feature (1553)..(1553): n is a, c, g, or t
  misc_feature (1601)..(1601): n is a, c, g, or t
  misc_feature (1640)..(1640): n is a, c, g, or t
  misc_feature (2207)..(2207): n is a, c, g, or t
  misc_feature (2387)..(2387): n is a, c, g, or t
  misc_feature (2412)..(2412): n is a, c, g, or t
  misc_feature (2456)..(2456): n is a, c, g, or t
  misc_feature (2462)..(2462): n is a, c, g, or t
  misc_feature (2468)..(2468): n is a, c, g, or t
  misc_feature (2901)..(2901): n is a, c, g, or t
  misc_feature (2980)..(2980): n is a, c, g, or t
  misc_feature (3042)..(3042): n is a, c, g, or t
  misc_feature (3091)..(3091): n is a, c, g, or t
  misc_feature (3104)..(3104): n is a, c, g, or t
  misc_feature (3135)..(3135): n is a, c, g, or t
  misc_feature (3137)..(3137): n is a, c, g, or t
  misc_feature (3262)..(3262): n is a, c, g, or t
  misc_feature (3264)..(3264): n is a, c, g, or t
  misc_feature (3267)..(3267): n is a, c, g, or t
  misc_feature (3286)..(3286): n is a, c, g, or t
  misc_feature (3288)..(3288): n is a, c, g, or t
  misc_feature (3303)..(3303): n is a, c, g, or t
  misc_feature (3315)..(3315): n is a, c, g, or t
  misc_feature (3330)..(3330): n is a, c, g, or t
  misc_feature (3333)..(3333): n is a, c, g, or t
  misc_feature (3336)..(3336): n is a, c, g, or t
  misc_feature (3342)..(3342): n is a, c, g, or t
  misc_feature (3348)..(3348): n is a, c, g, or t
  misc_feature (3389)..(3389): n is a, c, g, or t
  misc_feature (3393)..(3394): n is a, c, g, or t
  misc_feature (3396)..(3397): n is a, c, g, or t
  misc_feature (3399)..(3399): n is a, c, g, or t
  misc_feature (3403)..(3403): n is a, c, g, or t
  misc_feature (3407)..(3407): n is a, c, g, or t
  misc_feature (3409)..(3412): n is a, c, g, or t
  misc_feature (3414)..(3415): n is a, c, g, or t
  misc_feature (3419)..(3420): n is a, c, g, or t
  misc_feature (3424)..(3424): n is a, c, g, or t
  misc_feature (3426)..(3427): n is a, c, g, or t
  misc_feature (3429)..(3429): n is a, c, g, or t
  misc_feature (3462)..(3462): n is a, c, g, or t
  misc_feature (3501)..(3501): n is a, c, g, or t
  misc_feature (3507)..(3507): n is a, c, g, or t
  misc_feature (3534)..(3534): n is a, c, g, or t
  misc_feature (3603)..(3603): n is a, c, g, or t
  misc_feature (3636)..(3638): n is a, c, g, or t
  misc_feature (3643)..(3645): n is a, c, g, or t
  misc_feature (3647)..(3647): n is a, c, g, or t
  misc_feature (3655)..(3655): n is a, c, g, or t
  misc_feature (3657)..(3657): n is a, c, g, or t
  misc_feature (3661)..(3662): n is a, c, g, or t
  misc_feature (3664)..(3664): n is a, c, g, or t
  misc_feature (3670)..(3670): n is a, c, g, or t
  misc_feature (3674)..(3674): n is a, c, g, or t
  misc_feature (3676)..(3681): n is a, c, g, or t
  misc_feature (3685)..(3685): n is a, c, g, or t
  misc_feature (3688)..(3690): n is a, c, g, or t
  misc_feature (3697)..(3699): n is a, c, g, or t
  misc_feature (3703)..(3703): n is a, c, g, or t
  misc_feature (3705)..(3706): n is a, c, g, or t
  misc_feature (3717)..(3717): n is a, c, g, or t
  misc_feature (3720)..(3721): n is a, c, g, or t
  misc_feature (3726)..(3726): n is a, c, g, or t
  misc_feature (3735)..(3735): n is a, c, g, or t
  misc_feature (3741)..(3741): n is a, c, g, or t
  misc_feature (3743)..(3743): n is a, c, g, or t
  misc_feature (3754)..(3754): n is a, c, g, or t
  misc_feature (3792)..(3792): n is a, c, g, or t
  misc_feature (3795)..(3795): n is a, c, g, or t
  misc_feature (3808)..(3808): n is a, c, g, or t
  misc_feature (3811)..(3812): n is a, c, g, or t
  misc_feature (3814)..(3816): n is a, c, g, or t
  misc_feature (3820)..(3821): n is a, c, g, or t
  misc_feature (3826)..(3827): n is a, c, g, or t
  misc_feature (3837)..(3837): n is a, c, g, or t
  misc_feature (3876)..(3876): n is a, c, g, or t
  misc_feature (3878)..(3878): n is a, c, g, or t
  misc_feature (3906)..(3906): n is a, c, g, or t
  misc_feature (3915)..(3915): n is a, c, g, or t
  misc_feature (3918)..(3921): n is a, c, g, or t
  misc_feature (3926)..(3926): n is a, c, g, or t
  misc_feature (3931)..(3933): n is a, c, g, or t
  misc_feature (3940)..(3941): n is a, c, g, or t
  misc_feature (3945)..(3945): n is a, c, g, or t
  misc_feature (3949)..(3949): n is a, c, g, or t
  misc_feature (3951)..(3951): n is a, c, g, or t
  misc_feature (3953)..(3954): n is a, c, g, or t
  misc_feature (3960)..(3963): n is a, c, g, or t
  misc_feature (3965)..(3966): n is a, c, g, or t
  misc_feature (3972)..(3972): n is a, c, g, or t
  misc_feature (3975)..(3978): n is a, c, g, or t
  misc_feature (3987)..(3987): n is a, c, g, or t
  misc_feature (3989)..(3989): n is a, c, g, or t
  misc_feature (3999)..(3999): n is a, c, g, or t
ctactcgttactatgatagcaaggcagaagcaataaaagatcctattgctcagcaagattataaagactctgttaagtatttaggcatctactcttaccagaaatgcttagaaactcaaatcggattaggtcttgaccttaaaggaggtatgaacgtaattcttgagatttcagtaccagatgttcttgaaacacttgcagaccacaaaacagatgctttctttgtgaaggctatggaggaagcaaagaaagaagaagaaacaagccaaggcgattttatttcgttgtttgttaaatcttttaagaagtatgcancaggtcatcgtttagctgaaatctttgcaactcaacagttgcaaggcaagatttcgcctaatagtagcgactctgaggtagagaaagtgttgagagaagaagttaaaaatgctattgataactctttcaacgtagttcgtacacgtatcgacaagtttggtgttgtacagccaaacattcaaaagttagaaggacaagaaggccgaatcatggtcgaaatgcctggtattcgtgagccagagcgtgttcgtaagcttctacaaggaagtgcaaaccttgagttttgggaaacattcaattccgatgagatagttccttatcttgtacagttagaccaacgcttggcaaatggtgaaacaacagccgacacaacagcngttgccgacaccgcaaaggtagctaaagcagcagaacctaagttagagttgaacgctaacaaaaaaggcaatgcaaagctaaatgtaacagacgaggctaagatagcagaagcaaagcgtgctcatccattgctttcaatgcttcaaacaacaggaaacggtgcgcttgcccttgtaggttttgcaagcgttcgtgatacagccgaaatcaacaaagccatctattcagcaacagcaaaacaagtattgccttcagatttgaagctaatgtggagtgctaagccagaaganggaatcaaagcaaagaacntttacggcttatatgcaattaaagtgaccacagcaaacggtagagcgccacttgaaggtgatgttattaccgacgcaaaagaccaatttaacagcgtaacaggtgctcctgaggtaggaatgacaatgaataccgaaggttcaagacgttgggcagctcttacaaaggccaacacaggcaaggcaattgccattgttttggacggagttgtttactctgcgcctcgtgttaatggcgaaatcgatggcggtcaatcatcaatttcaggtagtttcactatcgaagacaccaaagacttggctaatacacttaaatcaggacgtatgccagcacctgctcgcattgttcaagaagaagtagtaggaccaactcttggagcacaatcaattcaacaaggtatcgtttcattcggtattgccttcgtaatncttatgatctacatggtgatgatgtatggtttcacaccaggtatgatggccaaccttgcattgttggttaacttattcttcacacttggtattttaacatcgttccaagcngctctaacnntntcgggaattgccggtatggtgctctcacttggtaccgctgtagacgcnaacgtgttgatatacgaacgtacaaaagaagagttagcnctcggaaaagatacccgtcaggccatgtcagaaggttatcgcaacgcattctcagcgatcttcgactccaacttcacatcaatcatcacaggtatcattctttatgtgttcggaacaggacctattagaggattcgctaccacattgattattggtattatctgttcattcttcaccgcagtttacttaacacgtcttgtattcgagaacagaatgaacaaaggaaagtggttaaatcttactttcacaacaggtatttcaagaaacctaatgaccaacactcacatcggtttcatgaacttctataagaaaacattcagcttcgtaggagtaattatccttgtagctattgtaagttttgcagttagaggtttaagtagaagtatcgacttcacaggtggacgcaactatgttatcaccttcgaacgcccagttgagccagaacaaatacgtggaatcattgcaaatgcattcccaggcacaaccacaagtgcacttgcgttgggtaccgaccacaaaactataagaatttcaaccaactataagatcgaatctaacagtccaacngtagacgacgaggcagaaacaatcttatacaacgcattaaagaaaggtggatttgtatctcaaccaaacgttgaatcattcaagaatccagatattagagaaggcggttcaatcatcagcagtaccaaagtaggaccttcagtggctaaagatatcacccacggagccatcctaagtgtngttcttgcattgttcgcaatcttcntctacattctcattcgtttccgcaacatggcgttctcaattggntcaacnattgcncttgcggtagacaccatcatcgtattaggcgtatatagcctatgttggggttggatgccattctcactcgaaatcgaccaaaccttcatcggagcgatcctaaccgttattggttactcaatcaacgacaaggtggtagtcttcgaccgtattcgtgagaacatgcaactacaccaaaagcaagatttcaagacattgttcaacgacagtatcaaccaaaccctaaccagaaccatcaacacatcaacttcaaccttaattgtgttgttgtgtatcttcttcttaggtggcgaaagcattcgcagtttctcattcgcaatgagtctcggtgttatcgttggtaccctatcatcaatcttcgttgcagcacctattgccttcctaacacttggtaagcaaaaaggaaaaagacgtgcatcagaagaagtagttnaagcataatatacagaaagagatggaagttacacctatttatatataggggtagcttccattttttatctttttatcancaaactacacccctattaccatctaactactatcattttatacattaataaggcagcttttncaaagctaaccctgcaaaaaataaacgattcaatacaatagcccttgtngaaagggtcaacncaagcaaagtgatgctgtagagagtcgtaananatattttattactaacaatttaattcattaaccgattatgaataaaattactttattggcttgcgccttgatgtcgtgtacgctcgcaaatgcacagcgcacacccacccatccattggatattnangangcaaattacgaccaattancntactatttcgaccgntggactccaggnacacagcctcaaggngtntcnagaatngacgangagttctttatctcacgtgtaaagcctcgtaaaagaatcanaganntnnantatnaggntnnnncnnatgnngatncnnancgtaaaatgtgtctttgggtacccctcgacgancccacttctaagtggaaagccctcccacgttattgcttngagggngataactttagtctttggtcttacatngacattcatggtaactggacagcaccatggatgcgtgtttcagcaggcttgtcagacgtagcccataanaatggtgttaaggtaggatgtgtgatgagtatnnnctggnnngnaagaatantncttnntngttggnattnannnnnncacncannngtacttnnnaagntnncagaaaaaganagnnaaggnaactttaanaactcnanaaagcttgtanagttgatgaagtattatggaattgatggtcttggagtnaantcagagttcactnctnnannngganncatgnntactcttatngctttctttgaagattgtcacaaaaaagcaaaagaaatngnttgggaattccaattacattggtacganggaaccaangannnnggtgntattnnnttcgatnnaggncttngntnncacaannnnannatgttnggnnnnaaagatcangnagttaccgana

SEQ ID NO: 1006 - DNA, 4000 bp, Escherichia coli
  misc_feature (126)..(126): n is a, c, g, or t
  misc_feature (1986)..(1986): n is a, c, g, or t
  misc_feature (1988)..(1988): n is a, c, g, or t
  misc_feature (2017)..(2017): n is a, c, g, or t
  misc_feature (2042)..(2042): n is a, c, g, or t
  misc_feature (2277)..(2277): n is a, c, g, or t
  misc_feature (2319)..(2319): n is a, c, g, or t
  misc_feature (2379)..(2379): n is a, c, g, or t
  misc_feature (2418)..(2418): n is a, c, g, or t
  misc_feature (2477)..(2477): n is a, c, g, or t
  misc_feature (2616)..(2616): n is a, c, g, or t
  misc_feature (2826)..(2826): n is a, c, g, or t
  misc_feature (2946)..(2946): n is a, c, g, or t
  misc_feature (3151)..(3151): n is a, c, g, or t
  misc_feature (3854)..(3854): n is a, c, g, or t
aattcgcaaagattagtagaagttgcaaaaagatttggttgtaaagaaagtattctaatgcattctgatcaagaattaccggttgataagattaagaattcaaaaaatataggcattacttccggngcttcagctcctgaaatattggttgagaatttaattaaagaaattaaaagtgttactaatgttaaacttgaagaagtgattacatcggttgaaaatgtttcttttaaacttcctacaatacttattaaataatggctgtttataccaagttagaacatcaagaagtcagacagtttttagagcaatacaatattaataactttaaagattacaaaggaattactgagggcgtagaaaatactaactatcttattaaaacatcagaacaagattatatccttactatttatgaaaaaagagttgatgaaaatgatttgccattctttataaaattattgtcatatttatcagaaaataaatttccttgcccaaaacctattgcaaataagaataatgaaaaaattaacagaattaagaataaaaatgctgctttagtaacttttttaaatggacaatctaagaataagataactagtgaagagtgttttgaaatagggaaaataacagctcaattacatgagataacaaaaaaatttgatattaatagaaaaaataatttatctattgaaaattgggagagtatttttgaaaaaacaatcaaacaaaaaatagatttagacgaatctattattaaaaaaactaagaattatttaaattttttaaaggacaaatggccaaaaaatcttcctcaaggtattattcatgcagatttatttccggacaatatattttttacaaataataaagtttctggaattatagatttttatttcgcgtgtaatgatttctttgcttatgagatagcaatttgcataaactctctatgttttgataacaattctacattcaatatgacaaaggccaaaaatcttatagatggatacacatccataaggactttgagcgaagatgaaaaaaaatatttacctattttgtctatgggtgcggccatgagattttttttaacaaggttatatgatttttatcatacagataataaagcagatgttaaaattaaagatccttttgaataccttaaaaaaattgaatttcattcaactattaaaaattttaacgaatattttatttaatgaatgagattgtaatttatacagacggttcctgcctaggcaatccaggtaaagggggttgggctgctgtaattattaatgacagtatagaagaggtaatatttggatctgaaaaagaatctacaaataatagaatggaattaacagctgctataaatgctttattgaaaatcaaacaagataaaaaaataaagatctacactgactctaagtatgtcaaagatggtattgaaaaatggattaataattggaagttaaataattggaaaaatgccaataaaaaagatgtaaaaaataaagatctttggacaaaattagacagcataattagtaaaaaagaaattacttggaactgggtaaaagctcactcgatcaacgaatacaataacaaagtagacattattgcaaggaatgctgctaatgcaaacgattagcttttatataatttttaattttatttaaattgttaggcagcaccttataaaattctttttttttgagatttttactaatcccactaggaatcttgggattcctttttaatattttataaatagtttctctaaattttgcaggatgcgctgtttctaaacaaaataaattctctgattttttactattatcaagataatagttttctaaagccttcaatccaacagaagaatgtgggtctaatattttactattatatttataaactaacttaatagtttttttagtatcttttgcattcactgactttgaataaaaaatatttttaatatttttnanaatatttctatctatcttataaaaacccntgttattaagctgcttcattaattnagatatttttttagaattattattatagtaagaagaaattaatctttcaaaattactagccacttgaatatccatgcttggtgaaatactaaattttactttggatggtttgtaaattccatttttcaaaaatttatataaaagatcattttcatttgttgcgataattaatttagatataggcaagcccattttgtaagcaatgtatccagcataaatatctccaaaattcccngttggaactgagaagacgctttttttatttttgtcagataancgaaaatgagaataaaaataataaactatctgaacaactattcttgcccaattgattganttaactcctgacatgttaatagatcttctaaagtgacgntcattgaacattgattttactaatgtttgacaatcatcaaatgaccctttaaccgcaanattaaacacattttttgaatttactgtagtcattagctttctctgcgtaatagaaacttttcctcttggatgtaaaacaaaaattcttaaattttttttattttttacagcatcaatggctgcggccccagtatccccngatgttgctgtaactagattaattttatttttactttttgaaagaacagtttcgtacatattgcctatcacttgcattgcaatatctttaaaagctaaagttgggccgtgatataattctactaaattaaatttttttactcttgaaaattttattacattattactatcaaatttattgtaagaattttttataattttttttaactcnttttttgaaaaggtattacctgtataaatctttataatttcgtaagctaaatcattgtaatttaattttgataatcttttcaaagtaatcttagataaacgaggaatcttttttggaatntacagaccgccatcatgcgcaagtccatttaaaaaagtatcaataaaattataagtttttttattatctctagtactgatgtatttcattaagctttcttcctataatataaaaaaaaaattatagtaaacaatgctaacccataccatgttatagcatattgcaaatgattatttgataaacgaacttcataaccattaggaanaatatctttgtttgccgttgaagtttgaataattaataatggataaatattcttatttagagattttttcaaattatcaatctcaattgaatataaaaaatcttctttaatattattattgggagtaaataaacttttttcccttattttttttgtatagccctcaataatgtcatcgttaaacgatgtgttttttattaaattaatcttatcttttctaatccaacctttgtctactaagacaactaatgaactattgacttcataaggaactataactttgaaacctatctctcctttgtttaagtgatataaaaatatttttgattttaaatattttttcttaaataaaacttttgtatattctttatctatatctgcattaaaattaattgaatttttttttagattactttctaaatcagaaattaaattattttttgaatgtaatctaaaaacttgccatgttcctaaggagagaacaataaatataaaaaatataaaaaatatatctaaagatttaattttaaacaaaatactctattaacttccccaaatatatattgaagcaaataagaacagccaaactacatcaacaaaatgccaataccacgccgcagcctcaaatccgaaatgatgatcaggcttataatgcccagcttttgctctaaagtagcaaactgctaaaaagattgttccaacnagtacgtgaaagccatgaaaacctgtggccatataaaaagttgctccataaatgcctgtgctaattttaaaatcagcaacagcatattcgtaagcttgaaaacaggtaaaaataactccaagaattactgttaataacaatccatt

SEQ ID NO: 1007 - DNA, 4000 bp, Escherichia coli
  misc_feature (642)..(642): n is a, c, g, or t
  misc_feature (1127)..(1127): n is a, c, g, or t
  misc_feature (1313)..(1313): n is a, c, g, or t
  misc_feature (1366)..(1366): n is a, c, g, or t
  misc_feature (1475)..(1475): n is a, c, g, or t
  misc_feature (1612)..(1612): n is a, c, g, or t
  misc_feature (1985)..(1985): n is a, c, g, or t
  misc_feature (1987)..(1987): n is a, c, g, or t
  misc_feature (1990)..(1990): n is a, c, g, or t
  misc_feature (1998)..(1998): n is a, c, g, or t
  misc_feature (2014)..(2015): n is a, c, g, or t
  misc_feature (2030)..(2030): n is a, c, g, or t
  misc_feature (2643)..(2643): n is a, c, g, or t
  misc_feature (2939)..(2939): n is a, c, g, or t
  misc_feature (3689)..(3689): n is a, c, g, or t
  misc_feature (3805)..(3805): n is a, c, g, or t
  misc_feature (3981)..(3981): n is a, c, g, or t
tcgtcatcggcacccacgccctaattgaagacaacgtggaattcgcacggctcggtttcgtcgccattgacgagcagcatcgcttcggcgtgctgcagcgcaagcgcctcatggacaaagccgccgcacacggccacgccccacacgtcctcgtcctcaccgccacgcccatcccgcgcacgctttcgctcactctctatggcgacctcgacgtttccgtcctcgacgaactcccgcccggccgcactcccatcgtcacgcgcatgaccacggaacagcatctccccggcgtttgggaatttctccgccgcgaagtcgcggccggacaccagggctacgtcgtttatccggtcattgaggaatcgaagctcgaactgaaagcggccatggaagagtacgagcgattgtcgcgagaagtttttccaaagctaaagcttggcctgttgcacggccgcctctccagcgacgaaaaagaagaagtcatgcagcgtttccgcaaaaacgaagcgcaaattctcgtcgccaccaccgtcgtggaagtcggcgtcgacgtccccaacgccaccgtcatggtcatcgaacacgccgagcgcttcggcctcgcccagctccaccagcttcgcggccgcattggccgcggcncgcaaaaatcccactgcatcctcgtcgccccctttcgtatgactgacgaagcccgcgcgcgcctcgagaccatggtgcgcacctccaacggcttcgaaatcgccgaaaccgatctcctcctccgtggccccggcgaatttttcggcacccgccagtcaggcgacctcggcttccacatcgccaaccccttgcgcgaccgcgaactcctcgaactcgcccgccgcgaagccttcaccctagccgccgattccgcccagcacgaaaccatgcagcgcctcctgcaccaactcccccccgaatggcagcgccgctaccacctcgcccgcatcggctaacggcttagtgggtaggctgccgacaaatctttccagtgacatccatatggggagacattgtcgattttccaggtttgcaacgaatagccttcgaaattataaccaggtcgaggtgacgggcgggcttagagcgcgagtcggatcgtgaanatcttcgcctccaccttaccatcaaggttctgcgcaggctgaaaccaccaccttctggccgcttccattacagctcttacccgctcgccgcattcctcagtcactcccacgttttgaatgtccgtcgcgcgtccctctttgctcacgagaatgttcaaggcgaaggtgccatgacaattgcttggngtagcgggcaactgaatagggcaccagaggcactgcggttctccgatgtgtgnggagctcgccccatcactttctcccctcggcgcttcagtttccaggccgagaggaagaagcttcgcaacctgatctgtcaatggaagtatcgcccagaaagtcatagancgaggtttaggctgaccgatggcgtagaagtcgatccgcactgcgcgctgcatttttgagaatgagccaaatatacaagtttcggcgcctgcttgtcttgcgtacgccctgtccctcttaggatcccaaacgtgccntgcgcggctcccttggtccgcgtcccgattccgcttctcgaggagcgagctgatggtggagcgatcaataacctggagctcgggatggcgttgcgcaacagtcgtcgagatctggtcagccatccagctgccaaacggcgctcgcaaaccttttgggccgacaagatcaaaaacgaccgctttcccagggttcccttcctggataaagcgcgcgagatagtcccccaaatcctcaactctggactggagatcatcctgcggaggcgtcgctgctttgacgtcttgagccgtcccacggccccctaagaagattgcaaatcctatgcagaggtttgtaactaacactcctacaagcatcgttcgcaacatagcnanacnattgtaanacttgacctatcgtgnnacagcggatttcgtntcctcctcattgtcagtaattagcggttctggagcagcaccgcccgcgattctttgtttcttgactaaaaactaaaaaatgacaactaataactgcactcatgcgcgtcatcgccggaacctaccgaagccgcatcctgaagagcctcaaaggcctcgcactgcgccccaccagcgaccgcctgcgcgaaactctcttcaacgtgctggccccgaatataggcggctctcgattcgtcgatcttttcgctggaaccggcgccatcggcattgaggccctcagccgcggcgccgccgaagtcgtcttcatcgaaaatcacgcgcccgccgccacgctgatccgccgcaatctcgaatcattgggcatcaacaccggcgtgaccgtgcttgccgttgatgctcttcgcggcctcgcgatgctggcctcccgaaagcagcactccctcggactcgactacgtttttctcgaccccccctacgccgctgccgaagactactcccgcgtgctagaatttcttggttccacggatcttctcgcgccgagcggcatcgtagtcgccgagcatcgccgcaacttcgacttgcgcgaagaagccggcgtactgcggaggtancgcgttctcagacacggcgacgccgccctgagtttttaccgccgtcgcggcgcggctgccggtgaaaataactctgccgagtaaacccccgcccgcagagtttcatctatgatgaggtgcttgcgcatccttggtctagcgaagcctgagcgttttctttgtagtggcgggcgggtcttcagacccgtcgggttgagcgcgccaagcagggcgcgcgcatcttactaccgtcgagggggaaatttctttgagccaggtcggcagggcactcgatctcttaggacaggccgccaagnctgccgctcccgcacgtctgcgggcaggacacgagccgaatctcgaagtagcctggggaagttttcaccaggggatcggcagcagcctgatcgctatcttcagcagatcaaatgtccccaagcgttttctgcgcggaggattcttcagagattgctggattgaggggcgcattccccgccgtgccctggttgccgccgccttgtggcacgtcgttttcattgtcatgccgttcccgcagctccccgccgcaccgccccactatcccgcgttcgagaacaccgaactcacctggtcgggcccgatcgatgacttacctttggtggagatgaagactcccaaagccaaaccaagcccgcgcggcgagcctgctgctaaacctctccgtcccgagggcgccgacgccttccatccgcggcagcgcatcttcaccgatcccgtacacccgacgcatccgcgccagacgttgatcaattccgccgctcctccggagccgccgaagattcttccgaaccttcccaatctcgtgcaattccagcagatgcccggcccggcgcgtccgcgcctgcagatcagccaggaaacgctctccaagctgcgcccgcgtgagcttcgcaaggttaagttcacctccgcgccggctcctgaccttccaacgctggaccaaaaactctcggatatcgcaccggcaatgttgccaaacgctcccgcgcgtccaaagttggaattgaacgccggcgccgccccgcgantcgcgtcccgtgcgcaagcgggtgaagcagaacctgcgcccgaagttggctcttcccaatccagcgttgcgaatggaaatgccacaacattcatcgctctctccgcgacgcccggnccgcccgcacctgtagtgcaaccgccgcaagggaatctggccgcccgcgtctccatttcacccgaaggcaagcaacccggcgtacccggaggctcgccgaacgggatgcccggcgcaaacggaagcgcgggcggcggaccggatagcagtgggggaaccgcaacgggcaacggcgncgcgaaaaatgacatagac

SEQ ID NO: 1008 - DNA, 4000 bp, Escherichia coli
  misc_feature (834)..(834): n is a, c, g, or t
  misc_feature (1287)..(1287): n is a, c, g, or t
  misc_feature (1856)..(1856): n is a, c, g, or t
ctttttccaattggtccacgatcacggtgatattgccgccactcaccatcatgcggcgtgacaactcgcccatcgtcagaccttcgcggtgacgttcgagctgcgccatcaagtcaaagcgcgatagtgtgatgtcaaatttctcgcgtaatttttgtcgaatcgtttcttcgataagcgtggtgcatgagagcaaacgaagccataagcgcaacgaggcgtggtggtcttcgtgtgcacgtagctcttggtcttgggtttcggtcgccgcattcatcccgccaactccccaccgtcgatagcgatggcttgcccattgatggcaccgcttcctggcccgcatagccacaaaacagcttgggcgatttcttctggttgcaccaattgcttttgtggatttcgatcggctaaagcctggcgcgcttgtgtcggagtttttccagtcttggctacgatgttttcaacagccgattgcacaatgtctgtttcggtgtagcctggacaaatggcattcacggtaatgtttttacgcgcaagctcaagtgccaaagcacgcgtcagaccgatgacgccatgcttggcagcggtgtaggcggatacatacgcgtagccttgcaggcctgctgtgctagccacattaatgatgcggccaggcgcaccgctggaagccgcctgcaacatcgacggtaatgccgcatgcgtgcaaatgtaggtgccagtgaggttggttgtgatcatggattgccacatcgccaggtctgttttgtcgaaaggctgactgctggcttgtcctgcgttgttaaccaagatgtgtatgggacccagcgcttgttnggcagcttgcatcgcagtgtggaccgccgcgttgtcggtgatatcaacagcttcagtatgaacgcgtgtcaacgctcgcagttctgcagcaatattttctaagctatcacgtgatcggccgatcaaggtgaggtgcgcaccggcatgtgcaagtgcgcgcgcaatggccgcaccaatgccacgtgaggcgcccgtgaccacggcatggcgttgttggagcaagggagtgttattcggcatgactatttgctgattggcgtggcgagcgcggcttgtacggcagcacgctcaaaattagtttccagctgtcgtttgccagatatgtagggtttgggccacggcatggcttggtaaccaatacgcgctgcttccgtcaaggtccaagcggggttggccaaatggggacgcgccaccgcacacaggtcggcccgaccagcagcaatgatgctgttnacgtgatcggcttcgcttatggcacccaccgcaatcgtggcaatgccggcctcttgacggatgcggtctgaaaacggagtttgaaacatacgaccaaaaacgggtttttcccgcttgctcacttgtcctgaagaacagtcaatcacatcagcgccggcggctttgaaggctttggcaatcagcaccgcatcggcgggtgtgatgccaccttcaacccaatcatgcgcagagatacgcacggacatgggcagatgctgaggccatgcagcgcgtaccgctttgaacacggccagtgggtaacgcaagcggttttccaagatgccgccatacgcatcggtgcgctgattggtcaacggagaaataaagctcgataacaaatatccgtgtgcgcaatgtaattcaagccagtcaaaacccgcctccgcggcacgaagtgtggctgcaacaaagtcagcggtcacgcgggccatgtctgtttcggtcatggcccgtgaggtttgactttcaccgtcgatgtattgctggggggaggcgctgatcaaaggccagttgggctcggtgtcgtcagntgccaagggttggtcaatgccatcccaagcacgtcttgtggagcctttggcaccagcatggcctatctgcaccgccatgcgcgccccgctatgttgatgtgcccagtcgacgatttttttccatgcgagtttttgcacatcattccacaagcccggacagccgggggtaatgcgggcatccgcgctcacgcaagtcatttcagcgaacaccatgccagcaccacccatggcgcgcgcgccgaggtgaaccaagtggtagtcggtgggaatgccatcatgtgcggaatattgcgccataggagatacgactacacggtttttgagcgtgatggatcgcaaggtgtacggggtgaacatggggggcgtcgttgtcactgcggtcgatgcctcgctcatgaactgctgggcaaaccaattttcataaccgtccagccatgttttgtcccgcagacgcaggttttcgtggctgatgcgctggctgcgggtcaacatcgaatacatgaattgttcaggttcaagttggtcgcaatagcgctcaccacaaacttcaaaccactccatggcattccatgctgcgttttgaattttgagtgtttcgatgcgccggctttcttggtagtcggtgagtacatttgaaatgtgagcgggctcacagccatgaatttcgaattggtgcgtcagttcaattgcatcttccaaagcgagtttggtgcccgagccaatcgcaaagtgggccgtatgcacagcgtcacccatcagcaccacatagctaccgtgtttgttttttagccaccactgttcgcacacaacgcgctgaaagttcaaccaagcggagcctctcagatgacgcgagttggtcatgagtttggcgccttgcaagttgtctgcaaagagttgttcgcaaaacgtaatcgattgctcttggctggccttgtctaaaccgtgtgccagccacacagactcggggcactcggcaataaaagtggccgtgtcatcgtcaaatttgtaaatatgtgcctgaaaccaaccgtgtacagttttcttgaaatcaaatgtgaaggcgtcgtattgacggtgggtacctagccaaatatagcgattagggcgcgtggcaatatcgggtttgaatacatcttcgtattgcgtgcgaattttggagttgatgccatcgctcgcgataattaagtcagcatcaggaaaatctaagtctgaattcacatcgcaatcaaatttcaggacaacgcctagttcttcgcaacgtacttgcagaatattcagtaattttttacgacctatgcctacaaagccatgaccaccggatcttatagttcgacctttgaacaagagttcaatgtcatcccaatggttgaaggcttcttgaatttgatcggcggtagtgcgatcccattgccgcatgttgtccatcgtggcatcggaaaacacaacgccccagccaaacgtgtcgtagggtaagttgcgctccaccacagtgatttggtggtcgggccaccgagctttcatgagcaagccaaagtacaaaccagctggaccaccaccaatacaaacaatgttcatgctccgctccagatttgcttttatattgaatatttcaatattaaaataaatatcttcgaaaattcatgaactgtcaataggggttttaaatcttttttagaaaaagaactcagtaaggtttgactgatctgagtgcggcgtcagcagggtcaaactgtaaatattgtcttcagtatgtactctaatgaatgggctaatcgacttgggttcgaactagtgacctaaggtttgagagctaacccattcaccaaaacaccttggtctgagaactgttgcgccttagccttgccaatacctgcaacgcgagacatcaaatctttccaattcataaaaggcttgtcagcacgcgctgttaatactttgcgcgtcattgcaggtcccaaacctttgatgctgtcgagttctgcttcgttggcttggttgatctctaatgccaatacgcttaggcaggcgcacgccaatgctccaactaaccaatgcttaagcaagtaacgctgccatgtaatgcgtgacgccagtggccacatctgcaaacacatggttgcaacccgtgctgcgtaagaggttca

SEQ ID NO: 1009 - DNA, 4000 bp, Escherichia coli
  misc_feature (81)..(81): n is a, c, g, or t
  misc_feature (143)..(143): n is a, c, g, or t
  misc_feature (157)..(158): n is a, c, g, or t
  misc_feature (165)..(165): n is a, c, g, or t
  misc_feature (176)..(176): n is a, c, g, or t
  misc_feature (196)..(197): n is a, c, g, or t
  misc_feature (199)..(199): n is a, c, g, or t
  misc_feature (250)..(250): n is a, c, g, or t
  misc_feature (252)..(252): n is a, c, g, or t
  misc_feature (262)..(263): n is a, c, g, or t
  misc_feature (269)..(269): n is a, c, g, or t
  misc_feature (460)..(460): n is a, c, g, or t
  misc_feature (469)..(469): n is a, c, g, or t
  misc_feature (1011)..(1011): n is a, c, g, or t
  misc_feature (1985)..(1985): n is a, c, g, or t
  misc_feature (2004)..(2004): n is a, c, g, or t
  misc_feature (2012)..(2012): n is a, c, g, or t
  misc_feature (2016)..(2016): n is a, c, g, or t
  misc_feature (2018)..(2018): n is a, c, g, or t
  misc_feature (2036)..(2036): n is a, c, g, or t
  misc_feature (2059)..(2059): n is a, c, g, or t
  misc_feature (2129)..(2129): n is a, c, g, or t
  misc_feature (2237)..(2237): n is a, c, g, or t
  misc_feature (2938)..(2938): n is a, c, g, or t
  misc_feature (3011)..(3011): n is a, c, g, or t
  misc_feature (3075)..(3075): n is a, c, g, or t
  misc_feature (3206)..(3206): n is a, c, g, or t
  misc_feature (3404)..(3404): n is a, c, g, or t
  misc_feature (3413)..(3413): n is a, c, g, or t
  misc_feature (3764)..(3764): n is a, c, g, or t
  misc_feature (3899)..(3899): n is a, c, g, or t
  misc_feature (3931)..(3931): n is a, c, g, or t
  misc_feature (3933)..(3933): n is a, c, g, or t
  misc_feature (3935)..(3935): n is a, c, g, or t
  misc_feature (3999)..(3999): n is a, c, g, or t
gttgacgaaataggcctcaaactcggtgacactcagttggcgggtgtcggcgggcacgaaggcgaggtggaggttgaggtngtcggcgccttttcgctcgaggggacgggggcggaaggtgatttcgcgatcggcgggatcgncgttttcgtcggcnngggcgtnggtttcgtcgncttcgtcgccttcgtcttcnncntcgtgggcggcgagggcggctttgacgctggtgtgggtttcgccggcggcnanttgtgcgcgnnttttgngctcggcggcgtcataggggttgatttccttgctcttgcggccgggggcgggtttgcgctcgaggttgtaggcgtcggtgtctaccacaacgatttcgtggcggagggtgggcacttcaaatccgtcttcgtcggtgacgaggacgaggtctttaccttgaaatccggtgatgcggcctccgccgaccgcnttgagaaancgaactttgtctccgatgttcataaaatggggatgttttggggcaaaggtacaaaaaaatccgtgtgacacgtcgcacgggaacaaaaaatccccgtcgccacatgggcaacggggagttctatttaggatcgatcctaagatcgttctctgtcgctattattcagcgatgcagataacgacgcggttctgatcgttgacagcgaagggctgaacagtgtcaccctttgcgtctttgatgatgcggtttgcagcgatgttgcgcttaacgagctcagcgaagacagcgtttgcacgttgcttggagagacggctgttgatcactgcgttacccgttccgcggtcggcataaccggtgatggaaaccttggcgttggggttttgcttgaggtagttcaccacttcgttcaccttcacgatttcgctggggcgtacctttgcggaattgatgaggaagaatacgttgcgggtgaggctttgtacctgaacgggagcaggtgcgggagcaggagcgggagcgggtgcgggtgcgggctcaacaanttcctcttccttcacttcttctacgacaggagccacaacgggagccggagccaccacaacgggtgcagcttcgccgatgcgtccgagacggaacttcagacctgcataagcgtcgaagagccagtcggcgttgccaccgtccttggagttgaacttatcggaggtgacggtagcgagaccttcgaggttgaaggaaacgcgcttggcaagacggaagtcaaattgcacaccaccgcgaccgctgacaacgttcagcttgttcttctcccagaggagctgcatttctgcggggtgaccgagagtgtacttgtcgttgtatgcgtcctcattcttgaagccgtggatgtaacccacaccgaggataccgtaaacggtgaagaaacggttggggttgtagtggctgaagatggtgttgaggtcgagcatagcgtcgaggccgagttgaccgtagttccacttgtagtagtccatacgatcgtggttgtaatcccagccgttcttagcttcccagccgctggcgtggagacgcaagcctacgggacgcgagaaacgatagcccaccgagaaagcagcggcgggagaaatggtcttcgaccacttaaggtgctcaccgtaagtggtagccgcgccaccctgaagaccgatcgtccaataagggctgaaatcatacttggccgagctctgtgcgttggcaccgagagccactgctgcgagagcagctaccagaaaagttctgaatttcataactgtggttatattattgagttgaattatgcgatgcatagtgccgaaggtgcgaagtttcttcggttccgcgtccaaagtcctgcacttttctactattactcgttgcaaaggtaagccttttcagagagccacccaatgtttttaaggaaaaaaaggagctcagacacaatataaaagaagaagctttggataaatggcgcttttggcacgcgcattcggcacttttngggtcaaaatggctgatgnggtcgtgntatngncccaccatgaccttgtgnccgccttgaatttgcacgccggnggtgcctttcggggctttgcggccggtgagatcgaaattgtcggcggcttttgcggaaaaatcggctgtntttccggcaaatcccccttgtttttgcgtttcgtcgcccagtttcacggcttcgatgcccacgagggggttttgctcacgcgtttggtagacgcgcacccagtcgaancgcgtttcgtagcggaagttcatgtcgggacctgccgcccaactgccgtcgcccacgctctggttgaggatgagatagaagggttcggtgtaaggccactgcccgttggccaaggcatcggcgttggtgctcttcaccgcggtgccggccacttttccgtcgacgctccatgtgatttgggtcggtgtccactcgacggcgaaggtgtggtagcgcgaatagtcgatgtcgcccatcgcaaagtgcgacatcgggtcgtttttgtgcttgaggttgaacgtccaattggagtgcagggtgtgataggccttgttttcgttgttgatctgctcccaaatgtcgatttctccctcgtgcggccaaccttttttgcttttggcaggcatcatccagaaggcggggaagttgccgctgtggggggtggtgaaaatacgcgcctcggctcgaccgtagcggaaggagtagcggccttcacttcgcactccgccggtgatgaagtccttttgttcgccctttgccttgagggaatcgggcgtggccatggcgcggcacaccaattctccgttctgcacgaagaccgtgaggggcgaatcggagtggaagcgggcccaggtgggattgcggcggacggtgcgcgaccagattttggcgttgggctgcgaaccgtcgggggcatcgaactcgtcggcgaaggcgggcanatattttgcgttttggccgggcacatagtgggcgatgatgcgcacgtcgccctgcatgactgcggcgggaagngtgattcggccgtcggcggcgggggtgaactcggtttcggtccactgcggcgtgccgcccacgntggagggaccgtcgagttcgcggccgtggcgcacggcgaagcgctcgagttcataaccggcatcgggggtgacgacgcggagggcgagggcttcgtcggaagccacggtgaggggcagcgcgccgtcgggngcatagagattggcgttgcgcgtatcgagactcaggcgggactcggcgtaggctttgcccttgacttcgagccaggtgtcgacgatggcgccgcgattggtgaggatgccgtttttgcccttggcgctgttttccgatccgagtgagccggcgggatccacattgtcccagtcgactttgaaacgcaggcggtagcgnccgggcgcnaggttggcgggcaggcgaaacgcggggggattgagtgcgctgccgtaaccttggacgttgggcgcgatggtgcggccggtcatgtcctgaccttgatagtaggaataggcgaggaggtcgccgtcgctggtgaagttgccgtcactgtcgcggtctacgaagacgtatccgtgcatccacgtggcgccattgttgccgtaatcgaagcgcacctcgacgcgatcgccgggacgtgcggtgagggtttcggctgtgaggtcggtgtagggggcggggttggcaatggtgagccgacgggcgccggccgaggtggtaaaggtgacgccgcgcaaaggacggtcggcggaaacngcgggcgcattcttgtcgaagtgcaggggatagtcggattgcgccgcggctccgagcgggagcagcagggcgaaggcgaggaggtagggtttgatcatgcgatgaaagagatgataggagggagggaggttcggncggcggggacagaccgaacggagatgggccgncngngctacgcctcggggacgggcgaagggccgggcggaggaaaaacaaaaaggcatacgagataccnt

SEQ ID NO: 1010 - DNA, 4000 bp, Escherichia coli
  misc_feature (131)..(131): n is a, c, g, or t
  misc_feature (1046)..(1046): n is a, c, g, or t
  misc_feature (1822)..(1822): n is a, c, g, or t
  misc_feature (1987)..(1987): n is a, c, g, or t
  misc_feature (1992)..(1992): n is a, c, g, or t
  misc_feature (2010)..(2010): n is a, c, g, or t
  misc_feature (2665)..(2665): n is a, c, g, or t
  misc_feature (2674)..(2674): n is a, c, g, or t
  misc_feature (2758)..(2758): n is a, c, g, or t
  misc_feature (3088)..(3088): n is a, c, g, or t
  misc_feature (3301)..(3301): n is a, c, g, or t
  misc_feature (3367)..(3367): n is a, c, g, or t
  misc_feature (3376)..(3376): n is a, c, g, or t
  misc_feature (3394)..(3394): n is a, c, g, or t
  misc_feature (3412)..(3412): n is a, c, g, or t
  misc_feature (3445)..(3445): n is a, c, g, or t
  misc_feature (3451)..(3451): n is a, c, g, or t
  misc_feature (3457)..(3457): n is a, c, g, or t
  misc_feature (3478)..(3478): n is a, c, g, or t
  misc_feature (3484)..(3484): n is a, c, g, or t
  misc_feature (3487)..(3487): n is a, c, g, or t
  misc_feature (3493)..(3493): n is a, c, g, or t
  misc_feature (3499)..(3499): n is a, c, g, or t
  misc_feature (3503)..(3503): n is a, c, g, or t
  misc_feature (3505)..(3505): n is a, c, g, or t
  misc_feature (3526)..(3526): n is a, c, g, or t
  misc_feature (3529)..(3529): n is a, c, g, or t
  misc_feature (3538)..(3538): n is a, c, g, or t
  misc_feature (3541)..(3541): n is a, c, g, or t
  misc_feature (3544)..(3544): n is a, c, g, or t
  misc_feature (3550)..(3550): n is a, c, g, or t
  misc_feature (3553)..(3553): n is a, c, g, or t
  misc_feature (3556)..(3556): n is a, c, g, or t
  misc_feature (3559)..(3559): n is a, c, g, or t
  misc_feature (3576)..(3576): n is a, c, g, or t
  misc_feature (3580)..(3580): n is a, c, g, or t
  misc_feature (3595)..(3595): n is a, c, g, or t
  misc_feature (3598)..(3598): n is a, c, g, or t
  misc_feature (3601)..(3601): n is a, c, g, or t
  misc_feature (3607)..(3607): n is a, c, g, or t
  misc_feature (3610)..(3610): n is a, c, g, or t
  misc_feature (3616)..(3616): n is a, c, g, or t
  misc_feature (3618)..(3619): n is a, c, g, or t
  misc_feature (3628)..(3628): n is a, c, g, or t
  misc_feature (3637)..(3637): n is a, c, g, or t
  misc_feature (3643)..(3643): n is a, c, g, or t
  misc_feature (3646)..(3646): n is a, c, g, or t
  misc_feature (3652)..(3652): n is a, c, g, or t
  misc_feature (3655)..(3655): n is a, c, g, or t
  misc_feature (3679)..(3681): n is a, c, g, or t
  misc_feature (3694)..(3694): n is a, c, g, or t
  misc_feature (3696)..(3696): n is a, c, g, or t
  misc_feature (3709)..(3709): n is a, c, g, or t
  misc_feature (3718)..(3718): n is a, c, g, or t
  misc_feature (3726)..(3726): n is a, c, g, or t
  misc_feature (3808)..(3808): n is a, c, g, or t
taacgcccttctatcctgaaggtggtgggcaaattggggattcgggtaccttagttcagggcgatcacaccatacacctcactaccacgaaaaaagagaatggtgttattgtgcattttaccgacgatttncccgcggagttaggtggtcagtggaaggcgacagtgaatgttgccgatcgtaatgaaactgcgaaaaatcacagtgcgacccacttgatgcatgaagtgttacgcgaagttttgggcacgcacgtcgaacaaaaaggctcgctggtacgtccagattatttgcgttttgacttttctcatttccaaaaggtaagtgcggaggaattggccaccattgaaactaaggtaaacgagcgtattcaagccaattatacgctcgaagaataccgcaacattcctattgctgaggcgaaggatatgggagctatggcactcttcggcgagaagtatggcgataccgttcgcgctattaaatttggttcatctgtcgaactttgtggtggtattcacgtgcctgccacgggctctataggactctttaagtttatttctgaaggtgctgttgcagcgggtgttcgtcgtgttgaagcggtgaccggtagaggagctctagactatgtcaatgctgagctcgcaaaactgcgtgcggcggctgaggtgttgaagcatccgcaggatttggccagtgcattgcagcagttgaaggagaaggaggccgccgcgcagaaagaaattgacgcattgcgtaaagaaaaagcaatgggagcggtagcagaattagaaaacggtgcagaggcatttaatggagccagagctattgttgcacggaccacgcttgatgcaggcagtgtaaaagatttagttttcaaactcaaagcgacgccaggcactttagtcattttaggcaatgttgtcgagggcaaggttaccttgagcattggggttagtgacgaccttatcacggataaggggtggcatgcgggcaatgccgtacgcacattagcaagacacatcagtggtggtggaggcggtcancccggcttcgctacagcaggaggtaaaaatcctgatggcatagataaagtattagtagaatggaaaaacgaattctcatgatgaaaacagccttacgattattccttgtagttggcttatttcctgtagcgctgatggctcagaaaacagagcccatcgaatactacactgatagtgatattaacgacacaaagttttctttagcggctagttatgctccttctttttcgggacgccgcttggcattgtatactcccgtacaggacggaacggaattatttgccctcacgaatgaagatggtggtggtgtgctgggccaacgttatggattttctttgttttatgaactgcgcagcatgttccacattggtatcggttggtcgcaagagcacagtggttatttgaccaaaggatttgcggtgtttgatcaaaatgcgatcttccaagataccattgggacatacacggcaaaaacgtcgtacaatgcgataaacattcccattcaaatcgtcttccacacacaaatgacggatgtttgggcgttgcaggtcataccttcttatgaccttacgttttattcaggcatccaacgcgaatggatcggtgatgaggtgcccaattttccagcggatgccgctacaggagtattgggatcgttgtacgaacgcggtacagaagtgaaatacatgacgggcttcaatggatctattggctttgctatcgggaacgaatttaccatagcaaataacctcgccctcactgtgcgtggtgaattncgttacggcttgttgcctatcaataaggaggatataggtcttcgtgaagtgccctatggggtaggcgcagcggttgggttccgttattacttataagcagttccctgcagtaaaggcataaaaaaatccgggcgcatacgcgcccggatttttttgtgttcggtnatttngattattccgccgatgcngaatctgcggcctcgacagcagcttccgttgcttcttcttcactaggcgtttcgcggttttcattcaacatgttcaccatacgctcagtaatgtcaaactcatcgttcgcataaatgatttgaccgccttcttcgtagagaagaataaagtccaggttcaactcttctttgagcacttcaatggcgctgttcatgtcttcgcgcatcacgagcgtgaggtcattttggcgtttcatcatctggctttgtgcagcttgctctacttgaagatagttttgttgaacgcgacgtagatcggcttcatttgcttcgcgctgacgcgccgtcatttttggtgcctcttgctgataaagctcgagattagtctgcaattcttgttggcgacgttgcaattcaatgataattttttcttcttccgcttgcagttctccaaccaattcctggaagtagttgtactgactctgcaaagagtcaattcgtacataggctaaacgaatgcctttatctgtgttttcaactgctgccggttgctgacaacttgcgagcatgcttagaccgattgcggccaaaaagaactttttcattttaaaaatctaggttgttcaatacgtttttatctacgagcttcggtacagtcactttcaaattaggggtncgctgcatntcgcgctcaatggcgaatatagcttctttatttctagcccaagatcttctggcgatgccattattgacatcatagagcagcatnttttctaatttacgctcagcttcatcagaaccgtcaagcaacattccgaatccgccgttgatcacttcgccccatccgacgccgccgccgttgtggatgctaacccaagtcgcacctcggaagctgtcgccaatcacgttctggatggccatatctgcggtaaagctcgacccgtcgtagatgttcgaagtttcacggtacgggctgtcggttccactgacatcgtggtggtcacggcccagaacgactggcccaatctcgcctgcagcgatggctttattgaaagcgcgggcaatctcaatacgaccttcgctatcggcatagaggatncgcgcctgagaacccacgactaatttgttttccttcgcgcctttgatccaacgaatgttgtcgtccatttgctcgcgaatttctttcggtgccttggccatgagtccttccaagatttcttgtgcgatggcatcggtcttatctaaatcggccccatcgccactggcacatacccagcggaacggaccaaagccgtagtcgaaacacataggncccataatgtcctgcacgtacgaagggtagcggaataattcgccgtcttcatccatgatttctgcnccggcgcgngagctttccaataagaangcattgccgtaatcgaanaagtacatgccgttttctacgagcgcattgacngccttnacgtgncgcttcaaggtcgcttggatncgtacnttnaactcntcaggnttantngccatcatctcgttcgactcntcntagctcatnccntgngggtantanccnccngcccaagggttgtgcanggangtctggtcagaaccnagntcnacgtgnacnttgcgntnnaccatgcgntcccagagntccacnatntttccnatntaggcgatgcttcgtgcgcgtttnnntgcctggaattcnanggccatgtcgatngcctcatcngtgctggnggtaatctcgtccacccagccctgctcgtgacgtttgtaggctgcctttgggttgatttctgcggtgatgctcacgaccccngcaatgtttcctgcctttggctgcgctcctgacataccgcccaatcccgcagtgacaaatagttttccttccggtccgccgctagatttcatgcgtgcagcattcaatacggtgatggttgttccgtgtacgatcccttgtggcccgatgtacatgtaagaaccggccgtcatttgaccgtattgggtaacg

SEQ ID NO: 1011 - DNA, 4000 bp, Escherichia coli
  misc_feature (2587)..(2587): n is a, c, g, or t
  misc_feature (2601)..(2601): n is a, c, g, or t
  misc_feature (2610)..(2610): n is a, c, g, or t
  misc_feature (2612)..(2613): n is a, c, g, or t
  misc_feature (2615)..(2615): n is a, c, g, or t
  misc_feature (2621)..(2621): n is a, c, g, or t
  misc_feature (2624)..(2627): n is a, c, g, or t
  misc_feature (2629)..(2631): n is a, c, g, or t
  misc_feature (2634)..(2634): n is a, c, g, or t
  misc_feature (2640)..(2640): n is a, c, g, or t
  misc_feature (2643)..(2646): n is a, c, g, or t
  misc_feature (2648)..(2649): n is a, c, g, or t
  misc_feature (2653)..(2655): n is a, c, g, or t
  misc_feature (2660)..(2660): n is a, c, g, or t
  misc_feature (2664)..(2664): n is a, c, g, or t
  misc_feature (2666)..(2667): n is a, c, g, or t
  misc_feature (2673)..(2673): n is a, c, g, or t
  misc_feature (2679)..(2679): n is a, c, g, or t
  misc_feature (2682)..(2682): n is a, c, g, or t
  misc_feature (2685)..(2685): n is a, c, g, or t
  misc_feature (2689)..(2691): n is a, c, g, or t
  misc_feature (2694)..(2694): n is a, c, g, or t
  misc_feature (2697)..(2697): n is a, c, g, or t
  misc_feature (2706)..(2706): n is a, c, g, or t
  misc_feature (2708)..(2709): n is a, c, g, or t
  misc_feature (2712)..(2715): n is a, c, g, or t
  misc_feature (2724)..(2724): n is a, c, g, or t
  misc_feature (2727)..(2727): n is a, c, g, or t
  misc_feature (2732)..(2732): n is a, c, g, or t
  misc_feature (2736)..(2736): n is a, c, g, or t
  misc_feature (2762)..(2762): n is a, c, g, or t
  misc_feature (2766)..(2766): n is a, c, g, or t
  misc_feature (2769)..(2769): n is a, c, g, or t
  misc_feature (2778)..(2778): n is a, c, g, or t
  misc_feature (2781)..(2781): n is a, c, g, or t
  misc_feature (2783)..(2783): n is a, c, g, or t
  misc_feature (2793)..(2793): n is a, c, g, or t
  misc_feature (2799)..(2799): n is a, c, g, or t
  misc_feature (2801)..(2802): n is a, c, g, or t
  misc_feature (2815)..(2815): n is a, c, g, or t
  misc_feature (2819)..(2820): n is a, c, g, or t
  misc_feature (2823)..(2823): n is a, c, g, or t
  misc_feature (2826)..(2826): n is a, c, g, or t
  misc_feature (2828)..(2829): n is a, c, g, or t
  misc_feature (2831)..(2832): n is a, c, g, or t
  misc_feature (2834)..(2834): n is a, c, g, or t
  misc_feature (2838)..(2838): n is a, c, g, or t
  misc_feature (2840)..(2840): n is a, c, g, or t
  misc_feature (2844)..(2844): n is a, c, g, or t
  misc_feature (2850)..(2850): n is a, c, g, or t
  misc_feature (2852)..(2852): n is a, c, g, or t
  misc_feature (2859)..(2859): n is a, c, g, or t
  misc_feature (2862)..(2864): n is a, c, g, or t
  misc_feature (2883)..(2883): n is a, c, g, or t
  misc_feature (2892)..(2892): n is a, c, g, or t
  misc_feature (2895)..(2895): n is a, c, g, or t
  misc_feature (2898)..(2898): n is a, c, g, or t
  misc_feature (2902)..(2904): n is a, c, g, or t
  misc_feature (2913)..(2913): n is a, c, g, or t
  misc_feature (2919)..(2919): n is a, c, g, or t
  misc_feature (2921)..(2922): n is a, c, g, or t
  misc_feature (2925)..(2925): n is a, c, g, or t
  misc_feature (2928)..(2928): n is a, c, g, or t
  misc_feature (2934)..(2934): n is a, c, g, or t
  misc_feature (2936)..(2937): n is a, c, g, or t
  misc_feature (2943)..(2943): n is a, c, g, or t
  misc_feature (2949)..(2949): n is a, c, g, or t
  misc_feature (2958)..(2958): n is a, c, g, or t
  misc_feature (2963)..(2964): n is a, c, g, or t
  misc_feature (2966)..(2966): n is a, c, g, or t
  misc_feature (2970)..(2970): n is a, c, g, or t
  misc_feature (2973)..(2973): n is a, c, g, or t
  misc_feature (2975)..(2975): n is a, c, g, or t
  misc_feature (2979)..(2979): n is a, c, g, or t
  misc_feature (2982)..(2982): n is a, c, g, or t
  misc_feature (2991)..(2994): n is a, c, g, or t
  misc_feature (2997)..(3000): n is a, c, g, or t
  misc_feature (3003)..(3003): n is a, c, g, or t
  misc_feature (3006)..(3006): n is a, c, g, or t
  misc_feature (3008)..(3011): n is a, c, g, or t
  misc_feature (3015)..(3015): n is a, c, g, or t
  misc_feature (3021)..(3021): n is a, c, g, or t
  misc_feature (3024)..(3024): n is a, c, g, or t
  misc_feature (3026)..(3027): n is a, c, g, or t
  misc_feature (3039)..(3041): n is a, c, g, or t
  misc_feature (3043)..(3045): n is a, c, g, or t
  misc_feature (3048)..(3052): n is a, c, g, or t
  misc_feature (3054)..(3054): n is a, c, g, or t
  misc_feature (3063)..(3063): n is a, c, g, or t
  misc_feature (3066)..(3066): n is a, c, g, or t
  misc_feature (3069)..(3069): n is a, c, g, or t
  misc_feature (3075)..(3075): n is a, c, g, or t
  misc_feature (3083)..(3084): n is a, c, g, or t
  misc_feature (3086)..(3086): n is a, c, g, or t
  misc_feature (3088)..(3090): n is a, c, g, or t
  misc_feature (3093)..(3093): n is a, c, g, or t
  misc_feature (3099)..(3099): n is a, c, g, or t
  misc_feature (3102)..(3102): n is a, c, g, or t
  misc_feature (3108)..(3108): n is a, c, g, or t
  misc_feature (3117)..(3118): n is a, c, g, or t
  misc_feature (3121)..(3121): n is a, c, g, or t
  misc_feature (3123)..(3123): n is a, c, g, or t
  misc_feature (3131)..(3131): n is a, c, g, or t
  misc_feature (3133)..(3139): n is a, c, g, or t
  misc_feature (3141)..(3142): n is a, c, g, or t
  misc_feature (3144)..(3152): n is a, c, g, or t
  misc_feature (3154)..(3156): n is a, c, g, or t
  misc_feature (3158)..(3158): n is a, c, g, or t
  misc_feature (3160)..(3160): n is a, c, g, or t
  misc_feature (3162)..(3162): n is a, c, g, or t
  misc_feature (3164)..(3166): n is a, c, g, or t
  misc_feature (3170)..(3172): n is a, c, g, or t
  misc_feature (3174)..(3176): n is a, c, g, or t
  misc_feature (3178)..(3185): n is a, c, g, or t
  misc_feature (3187)..(3188): n is a, c, g, or t
  misc_feature (3190)..(3197): n is a, c, g, or t
  misc_feature (3199)..(3199): n is a, c, g, or t
  misc_feature (3202)..(3203): n is a, c, g, or t
  misc_feature (3206)..(3206): n is a, c, g, or t
  misc_feature (3208)..(3214): n is a, c, g, or t
  misc_feature (3216)..(3216): n is a, c, g, or t
  misc_feature (3220)..(3222): n is a, c, g, or t
  misc_feature (3225)..(3225): n is a, c, g, or t
  misc_feature (3228)..(3236): n is a, c, g, or t
  misc_feature (3238)..(3245): n is a, c, g, or t
  misc_feature (3247)..(3249): n is a, c, g, or t
  misc_feature (3251)..(3252): n is a, c, g, or t
  misc_feature (3254)..(3257): n is a, c, g, or t
  misc_feature (3259)..(3259): n is a, c, g, or t
  misc_feature (3262)..(3265): n is a, c, g, or t
  misc_feature (3267)..(3273): n is a, c, g, or t
  misc_feature (3275)..(3275): n is a, c, g, or t
  misc_feature (3277)..(3278): n is a, c, g, or t
  misc_feature (3280)..(3286): n is a, c, g, or t
  misc_feature (3289)..(3291): n is a, c, g, or t
  misc_feature (3293)..(3293): n is a, c, g, or t
  misc_feature (3295)..(3295): n is a, c, g, or t
  misc_feature (3298)..(3302): n is a, c, g, or t
  misc_feature (3304)..(3304): n is a, c, g, or t
  misc_feature (3306)..(3307): n is a, c, g, or t
  misc_feature (3309)..(3309): n is a, c, g, or t
  misc_feature (3311)..(3311): n is a, c, g, or t
  misc_feature (3313)..(3319): n is a, c, g, or t
  misc_feature (3321)..(3323): n is a, c, g, or t
  misc_feature (3325)..(3325): n is a, c, g, or t
  misc_feature (3327)..(3336): n is a, c, g, or t
  misc_feature (3339)..(3341): n is a, c, g, or t
  misc_feature (3344)..(3345): n is a, c, g, or t
  misc_feature (3347)..(3349): n is a, c, g, or t
  misc_feature (3351)..(3352): n is a, c, g, or t
  misc_feature (3355)..(3357): n is a, c, g, or t
  misc_feature (3359)..(3360): n is a, c, g, or t
  misc_feature (3362)..(3364): n is a, c, g, or t
  misc_feature (3366)..(3366): n is a, c, g, or t
  misc_feature (3368)..(3374): n is a, c, g, or t
  misc_feature (3376)..(3385): n is a, c, g, or t
  misc_feature (3387)..(3394): n is a, c, g, or t
  misc_feature (3396)..(3398): n is a, c, g, or t
  misc_feature (3402)..(3402): n is a, c, g, or t
  misc_feature (3405)..(3407): n is a, c, g, or t
  misc_feature (3410)..(3417): n is a, c, g, or t
  misc_feature (3419)..(3420): n is a, c, g, or t
  misc_feature (3422)..(3431): n is a, c, g, or t
  misc_feature (3433)..(3435): n is a, c, g, or t
  misc_feature (3437)..(3437): n is a, c, g, or t
  misc_feature (3439)..(3442): n is a, c, g, or t
  misc_feature (3444)..(3444): n is a, c, g, or t
  misc_feature (3446)..(3446): n is a, c, g, or t
  misc_feature (3448)..(3448): n is a, c, g, or t
  misc_feature (3450)..(3450): n is a, c, g, or t
  misc_feature (3452)..(3452): n is a, c, g, or t
  misc_feature (3454)..(3456): n is a, c, g, or t
  misc_feature (3458)..(3459): n is a, c, g, or t
  misc_feature (3461)..(3464): n is a, c, g, or t
  misc_feature (3466)..(3466): n is a, c, g, or t
  misc_feature (3468)..(3469): n is a, c, g, or t
  misc_feature (3472)..(3472): n is a, c, g, or t
  misc_feature (3474)..(3474): n is a, c, g, or t
  misc_feature (3477)..(3480): n is a, c, g, or t
  misc_feature (3482)..(3489): n is a, c, g, or t
  misc_feature (3491)..(3493): n is a, c, g, or t
  misc_feature (3495)..(3495): n is a, c, g, or t
  misc_feature (3497)..(3497): n is a, c, g, or t
  misc_feature (3499)..(3502): n is a, c, g, or t
  misc_feature (3504)..(3504): n is a, c, g, or t
  misc_feature (3506)..(3517): n is a, c, g, or t
  misc_feature (3519)..(3528): n is a, c, g, or t
  misc_feature (3530)..(3530): n is a, c, g, or t
  misc_feature (3532)..(3533): n is a, c, g, or t
  misc_feature (3535)..(3537): n is a, c, g, or t
  misc_feature (3540)..(3543): n is a, c, g, or t
  misc_feature (3545)..(3545): n is a, c, g, or t
  misc_feature (3547)..(3552): n is a, c, g, or t
  misc_feature (3555)..(3566): n is a, c, g, or t
  misc_feature (3569)..(3572): n is a, c, g, or t
tctcatctaaatcatcaaacatatccacctctttaaactgatgaatcttaactccaaacttagaagcaactaattttatctcatcatcccccccattatattgcaaatcaatccaatctactcctttaatcttaagaacggagatccaatcagctaattttaaattatctttagctgcagctcctttctgattagagcttgtccagcaaatccctatcttcaacccagcccctaatagagaaactttacttttccaatatttttctctattatcatccactttaaggtacttaatacactcaggaaaaagatcaatatttttcctgaaaatggaaggaagtgatcccagcgcgacttgataatctatttttctctttgattcaatccatgatacatcttttttacctctcactatcattgaagtagtctcaccccccattagtttttcattcagagatatcaccgttgcttcaggaaaagagcgctcaaacaacttttccaacttatattgaaccaaaatagtacagtgtctagctttttgaaccacctctgccacacatgatgcgaaagtaacggtgtctccaataccttgttcatgatacaaaagaatatgactttctgaaatatcatcctctccccaccacgccttccacttaaaacctgaatgccctccaatatcttctgttcttctatattcataatagggccatccaagatccaacctgcctaaagttaaataattatacgccaagtttttttttgccgtaacacactcttttgattcagaacaaaattgcaacgctctattatatgcctcaatcgattccaatattttccattgatcgtgcaaaaccgcccccaaatcgttataactatcataagattctccaaacaactttaggcatgttctcaatatcaactctgactgaggaaacatatcttgaatagaatagatataagcaagacgcaaataagcaacctcatacttatcatttaattctaatgattttttgaaataaaactcagcattactgtaatcttcctcctcgagatatataaacccaagattataatagatctgtgaattatcttcaattttcagcgcctgtaaaaaataatctttcgcattttctttatccccttgcttatataagctacctgcatacccattcaacgccgaaacattaagcgaattaatagacaaaactttattataaattactgtcgccttttgatattcacctactccaatccatgccgcacctaagcttacagataaagcctcatcattcggcaatattttcaaagcctcctctaaaaaatggatcgcgttctcatactctcctttctgctctaataaaacacccaacattgcagcagcatctactctataacgcccttgcgcctcattaaatacttttcttaatattttttcagcactaaaaagatcattttgctcaatcaaattatcagcttttaaaagttttcgtttaaacttattcattagactcaactcactgtattgtataaattattactcacgcataaataacataaaaaaggctcctataattggagccttttttatctatcttcctacttttacaaagtagatttactataacatactacctcaatagtgacagaacattttgtggtaattggttagcctgtgctaacattgccatacctgcctgttgaagaatttgtgaacgtgccagattcgttgtctcttctgcaaaatctgcatcttccactcgactcttcgctgctgttaggttctgtgatgtattttgcatattggaaactgttgaatctaatcgattctgataagcacccaacttagctcgttctgcattcacataacccaaagcgccatctgctgccttaatcatttcagttgcctttgcttgagtagcaacagaaccagaacccacagatgagagagtactggaattacttgccgctgtcattaaagtagtctcatttgatgcaaccgtataacttgaattactagaaaaatccaaataacctccaacacgactactatctgcagctgttgatactaatgtttggtctgcagttgctgtaccacctgacaatactccattaaactttgctgtcgctccatcagttcctgcagagtttttaaagtcagtaatcgcaatatcatcacccgacttactagtcattgtcaaacttttcttatcagtagataaaacagcagaaataccggtagatcccgagtgtgtattaatggccgataccaaggagcttaaatcatccttattatcaacaacggcactaactgaaacatccgtggtattattccccttcaaaccaaaagagatcgttccagaagcacttaaagtatgtaatgtggcttttgttgtcgctgtaacttgaacgcctgtatctgctgttttattattgattgccgttgcaatcgtctcagcagagttgtccgctgttaacgtgaccgaagccgatccctcagaaccaccaatcaccaatgtctgcgcctccactccattcgcggtaacagcagccgcattcacatcttgtgaaacagaagctgctgatcctnctgtagtggcggtnttactaccnanngnagttgnagnnnnannnccnatactnaannnnanngtannncctgnattngnnccaatntgaaanttnttngaannnaangtnccatccaanannttnnnnccattaaantcngttgngctngagatcctagtcaactcttcctgtanctgngtnacctctttntgnantgcaactcgntcactngnngtattagtatcantcgnngantgnanngnnanctcncnaacncgctgnanaatattngcnnnctcctgcatcgcaccctcngcagtctgnatnagngaannngcatcattngcattncnnatnccntgattnanncctctnatctgngcagtcatnccttnngnaatngcnantccngcngcatcatcnnnngcnnnnttnatncnnnnaccngatganagncnntccattgatgtnnntnnngannnnngngatttgtcnagnacncgaacngtgttcanngncnnnatntttgtnttnataaantgtggcatnntantnctcctaanannnnnnnanntnnnnnnnnnannntnancnannntgcnnnannntnnnnnnnncnncnnnnnnnnanggnnaangnnnnnnngncttnnnttnttnnnnnnnnntnnnnnnnnannntnntnnnnanaannnnannnnnnnananntnnnnnnncannncngnagnnnnnanannanancnnnnnnnannncnannnnnnnnnnaannnaannannnannttnnngnngnnntntnnnnnnncnnnnnnnnnngnnnnnnnngnnngttnagnnngtnnnnnnnnanncnnnnnnnnnncnnntntnnnntncnancncncnnnanngnnnntnannaananaannnntnnnnnnnngnnngntntnnnntntnnnnnnnnnnnnannnnnnnnnnangnngnnnatnnnnanannnnnnctnnnnnnnnnnnnctnnnncgcctccttgctcataatttagactggcttttaggttatcaacaatcgcgagtgccttggtgagcgactctgctttttcaactgttttttgctgatcaataaagtagagtgcttttttatagcgctcaatcgctccatttagaagcatgctgaccagtttgtgggggtcagctgtgctaatttgtgactcaacccccacctgctgatactgcccagctgcttttttgtatctactgttcatttaaaatactccaatttttattaagtttactattctgcagctgcccactctagtacttcctcttttgatgcggagcgaagattttttggaatggctatccaagattcatgtatgcctgccatcaggtcaatcacatcatccatgagtgctggctctacttgacgcattgactctaccaatctaccaa

SEQ ID NO: 1012 - DNA, 4000 bp, Escherichia coli
  misc_feature (83)..(83): n is a, c, g, or t
  misc_feature (413)..(413): n is a, c, g, or t
  misc_feature (446)..(446): n is a, c, g, or t
  misc_feature (455)..(455): n is a, c, g, or t
  misc_feature (724)..(724): n is a, c, g, or t
  misc_feature (1334)..(1334): n is a, c, g, or t
  misc_feature (1436)..(1436): n is a, c, g, or t
  misc_feature (1448)..(1448): n is a, c, g, or t
  misc_feature (1794)..(1794): n is a, c, g, or t
  misc_feature (1821)..(1821): n is a, c, g, or t
  misc_feature (1960)..(1960): n is a, c, g, or t
  misc_feature (1982)..(1982): n is a, c, g, or t
  misc_feature (1992)..(1992): n is a, c, g, or t
  misc_feature (2184)..(2184): n is a, c, g, or t
  misc_feature (2241)..(2241): n is a, c, g, or t
  misc_feature (2505)..(2505): n is a, c, g, or t
  misc_feature (2592)..(2592): n is a, c, g, or t
  misc_feature (2605)..(2605): n is a, c, g, or t
  misc_feature (2670)..(2670): n is a, c, g, or t
  misc_feature (2680)..(2681): n is a, c, g, or t
  misc_feature (2697)..(2697): n is a, c, g, or t
  misc_feature (2720)..(2722): n is a, c, g, or t
  misc_feature (2724)..(2724): n is a, c, g, or t
  misc_feature (2727)..(2727): n is a, c, g, or t
  misc_feature (2735)..(2735): n is a, c, g, or t
  misc_feature (2793)..(2793): n is a, c, g, or t
  misc_feature (3096)..(3096): n is a, c, g, or t
  misc_feature (3167)..(3167): n is a, c, g, or t
  misc_feature (3179)..(3179): n is a, c, g, or t
  misc_feature (3444)..(3444): n is a, c, g, or t
  misc_feature (3472)..(3472): n is a, c, g, or t
  misc_feature (3483)..(3484): n is a, c, g, or t
  misc_feature (3704)..(3704): n is a, c, g, or t
  misc_feature (3736)..(3736): n is a, c, g, or t
  misc_feature (3738)..(3740): n is a, c, g, or t
  misc_feature (3742)..(3748): n is a, c, g, or t
  misc_feature (3750)..(3750): n is a, c, g, or t
  misc_feature (3752)..(3758): n is a, c, g, or t
  misc_feature (3762)..(3762): n is a, c, g, or t
  misc_feature (3764)..(3768): n is a, c, g, or t
  misc_feature (3770)..(3777): n is a, c, g, or t
  misc_feature (3779)..(3779): n is a, c, g, or t
  misc_feature (3782)..(3784): n is a, c, g, or t
  misc_feature (3787)..(3788): n is a, c, g, or t
  misc_feature (3792)..(3792): n is a, c, g, or t
  misc_feature (3797)..(3800): n is a, c, g, or t
  misc_feature (3802)..(3803): n is a, c, g, or t
  misc_feature (3807)..(3811): n is a, c, g, or t
  misc_feature (3813)..(3814): n is a, c, g, or t
  misc_feature (3816)..(3816): n is a, c, g, or t
  misc_feature (3818)..(3824): n is a, c, g, or t
  misc_feature (3828)..(3831): n is a, c, g, or t
  misc_feature (3839)..(3839): n is a, c, g, or t
  misc_feature (3841)..(3847): n is a, c, g, or t
  misc_feature (3852)..(3854): n is a, c, g, or t
  misc_feature (3857)..(3862): n is a, c, g, or t
  misc_feature (3866)..(3866): n is a, c, g, or t
  misc_feature (3869)..(3870): n is a, c, g, or t
  misc_feature (3872)..(3875): n is a, c, g, or t
  misc_feature (3877)..(3877): n is a, c, g, or t
  misc_feature (3882)..(3883): n is a, c, g, or t
  misc_feature (3885)..(3889): n is a, c, g, or t
  misc_feature (3891)..(3900): n is a, c, g, or t
  misc_feature (3902)..(3902): n is a, c, g, or t
  misc_feature (3904)..(3909): n is a, c, g, or t
  misc_feature (3911)..(3912): n is a, c, g, or t
  misc_feature (3914)..(3924): n is a, c, g, or t
  misc_feature (3927)..(3936): n is a, c, g, or t
  misc_feature (3939)..(3939): n is a, c, g, or t
  misc_feature (3941)..(3944): n is a, c, g, or t
  misc_feature (3951)..(3952): n is a, c, g, or t
  misc_feature (3954)..(3955): n is a, c, g, or t
  misc_feature (3957)..(3957): n is a, c, g, or t
  misc_feature (3960)..(3965): n is a, c, g, or t
  misc_feature (3972)..(3977): n is a, c, g, or t
  misc_feature (3980)..(3982): n is a, c, g, or t
  misc_feature (3985)..(3987): n is a, c, g, or t
  misc_feature (3990)..(3990): n is a, c, g, or t
  misc_feature (3994)..(3995): n is a, c, g, or t
  misc_feature (3997)..(3998): n is a, c, g, or t
aataacggtaggtttaacaaaaaggcctgcatataacagtgtgcctacgattgcccaaggcaaaattcctataatagtgagtntaaccttttgtatcgcggttttctcgtttacagcagcgttcataactcccccaaaaaaatattcagacatggcatctaaatgaagccattctcatcaaaaacgaatttttattttattattttattgttgttctttgctttaaaaaaattccggaaggaactgttagtatttgtatactaacaatcccttcacggaatggtctagattaatattaacgtgctaactgaataagagttttcagtgttacgtcttcttcttgcactgagtcagggttagctttcatgttagaagaccaagttgttgagaactcagctttccaatcaatgatntgaccaacaactggcatcaatgcttggtaaccntcatcaccntaatcgatacgattttggaagatgaaagttttccagaatttaccgtttttatcgtatgcttcacccagataaggtcttgggtaatccatttccatataaacgattttcttgctgtaaggatgctcgtcaggaggagttccctcaataacgtacacttcacgtggttcccattgaacttgttcgttagggaagaagtgaggtggtgtatccatgtctacagctgggaattccttaatagtatttttaaaagcaaggtcaacagtaactantggagcatgagcaatagcccagatccaacgcttaccagttaacttaacttctttatacttagtaggaactgcatcccaaatatcccagtcatcgtacaactgaactgttccaccaattggatccatccatgcgttaccagaaagacgacgtgcacgacgtacagacttcaagtatgcataaacatcatcaggcttctgagatgttggatcattgtagcgaacagaaaagattccgatgcctttaatatcttgtgggtaaattgctacaagtacagttttttgtagaatgtcgcctttaccttcagatactgggccaccatctaaacggccttccatatagtaacgacgtgcccaccaacgctgaatacgctccatacctgatgtggcatctaggaatacccaggagatgtgacgtagatccattgttgcaccataagtaggtgaacgtaggttccagattagtttacaacctgcatccggatcatccatgcttactttttgtgggtcaaagaacataccagctgtccagttactaacaacaccacagttactaccgttagcaggtgctccgtatacaacattaggagctccatctatagtagcttgcatntatttagggtccatttcaatgaactctgaatgacgagtattaatcatcaatgctttgttacggatcatccactcaacgttttcagtaatcatacttccaacngtttttccttcnaaacaaagattagttactgcatctaagtttgaattctggataactgttccagcttccatagcatcaccagtacaaccgccttctgcttcaataggagaaggaccgccatcccagcgaccagctgcgggtggatcaccgtaaaataatgggtttggtttagttccatcagcagtttttgctacatagcctttaggcttactagcatcatccgcccaatctgctttagcaaaggcttgagagcctcctaaaagcagtcctagcgatactaccgaggtagtaattagcttcatatacataattataactccaagttttattttagtgctgtctgcacaactcatacatngtactcattgtgcagacatactcaaangtactactttcttagaactgtctagttattttaactacaatttggttatcgccgccaaaatagtccataaagccagcgctgttttctctcttacctagagcgaagtcaccgcctgcaactggtgtagcagtaccattancaccctgtccaccgatgtagcntgaaccattnagagctccacaactattggaaccgtcggttgtataaccattaaacgaacctttacaggttttcttcgtatcaccgtcattgaaccaaagatctgcttcaattttcagacgccaatcatcaccataaacaaactctactgcaggaatagcgaaaccgccacctttagtaaggtcagtaccagccacgaatgangggttaatggtatcacgatggaagttcatcaacgtaaagatagtcaagtaggcagtntgctctttcttttgtgaaccaaaagaagcaaattctactatttcgtctttatcgtcgtgagacaatatccaagtgtcaaataactgaacacttgacagtgaaggacggtgcgtacctagtgaatccatccacttaaattccttatcgatacggaacatcatattgatagtatctttttcgataacaccgttccaaccaggtagatctgaataaatagatccgtagttgtaaggcttgttaggaataaaagcaatctcagcactnaatgttgcatccataggcgaattgaatccggtcatagtaaaaccaaagatatcaatttcaggatacatccagtcacctaataggttnccttgtgtagccncttcgctgccgtaagtttcagttgcacccataatgccatagtaagcatagtagccaccattagcnccaactaggnnagaatcagcaacagcnttagcaacgtctggacgatttgnnncngtngcacctanagcatgtggattcacaacaggagctggattgaaggttttcatataagcgaatgaatancctatagaaccccactctccgttccaacgaataccataagtcatatcactccagtctcctgaagaatgacctgtattatatgaatctgtgaattgtgtgaagtcaacaccacgatatgggtgtggaatccaacgtccaccttcgatgttatagttactacccatgtcctctttgcggtcccaacctggacggatgtaccagttcaagctaccaccgagttcatagaaatccaacctaaagttgaataacattaaaggcttacgccactcttcattgttttcataaaataaacgaccacgatantcataaccgtgaacaacgtccatagcctggaagaaatcactttcaccccatactaattgttgacgtccaanacgaaccattantctgtcatcgaaaaggtttacgtcaaagtatatctcacgtaaccagtcgaaaacttcatcagtagtttcgtattgatccatatagtcgccatctctacctctactaacaccgtcagtaaagttaccgctttggataccaaatcctgtagcgatgctttcagatcgagcttctagatcatctaaataatctgtctgcgcttctttatcaaaacgtgtgatcactttccagttcaaaggaccagttttaatatcgaagtccaagttnagagttacctctgcttggttcatgcganacttatcatcnnctgtagtttcatcattatcttccagcatgacgcctacagtagttcttacgtagccgttccagttaaggttatagaaaggttcactatcacccccgtagccatacgcagagaaagcattactgctccctaagagaagacctccaaatcccagcagaaggccgccgacctttaatatgctggtggttttattactcaccatcttattctcccacttatattnctttatataattaaattgccgtgattatagancnnngnnnnnnncnannnnnnncccntnnnnnannnnnnnnanccnnnttnntttnaaaannnnannaaannnnnannantnnnnnnnaaannnntttttttnannnnnnnaaaannnttnnnnnnaaanttnntnnnntnaaaannannnnntnnnnnnnnnnangnnnnnnannannnnnnnnnnnaannnnnnnnnnttnannnnaaaaaanntnnanttnnnnnnaaaaaannnnnnaannnggnnnaantttnnannaa

SEQ ID NO: 1013 - DNA, 4000 bp, Escherichia coli
  misc_feature (144)..(144): n is a, c, g, or t
  misc_feature (1985)..(1985): n is a, c, g, or t
  misc_feature (1988)..(1988): n is a, c, g, or t
  misc_feature (1997)..(1997): n is a, c, g, or t
  misc_feature (3878)..(3878): n is a, c, g, or t
  misc_feature (3887)..(3887): n is a, c, g, or t
  misc_feature (3908)..(3908): n is a, c, g, or t
  misc_feature (3920)..(3920): n is a, c, g, or t
  misc_feature (4000)..(4000): n is a, c, g, or t
agaacacaagaaatccaaagacttataggaagatccttaagacaggcagttaatttaaagtacattaaaggaaaaactattaatattgactgtgatgtaattcaagcagatggtggaacaaggactgcctcgataacaggtggntgtgtcgcattatttctagctcttcaaaaccatcatgatgaccatagagcgatcaagtcacatgttgctgcagtttctcttggagttctggatggtcaggttgctcttgatttggactataaagaggatagcagtgctgaagttgatttaaatttagttatgactgacaactctgaaataattgaaattcaaggaactggtgaagaagctccatttaatagagagcagctagatgatatgcttaatattggaagcgctgctattgcagatattattcagaaacaaaaggcctgcttaaaataagtgaaaaattaccagaaaatatttttaaatcttgcattagatgcaaaagcattagaattcggtagtttcactctcaaatctggcagaacaagcccctacttttttaatgcagctaagatgctgtcaggtaatctctcagagttagctaattgctatgttcaagcaattaatgaaactgaaatggaatatgattgtatttatggccctgcatataaaggtatttttttagggtctatggttgctgtactattgagtcaaaatggtaataactaccctctttcatttgatagaaaagaggttaaagatcatggggaaggtgggaatattattggaaataatcctgttggtaatgtaatgataattgatgatgtgctttctgcaggaacggctgcaagacagtcgattgagcttattagcaaaactggtgctattccaaaaatatttattgtaggtcttgatagacaagaaaaaggttctgctgatatatctgcatccaaagaacttcaaaatgattttggtataactgttaaatctatagttaatcttgatacgcttatatcatttactgaaaacaattcagactataccgctcatctaggggagctgaaggcttatagagacaattggggagcataaaatgttttcaggtattgtttcagtcaaaagcaaagttgccaaaataaaaaaatatgaagactacctgtctttagaaataactaccccaaaaggttttgataagaatttgaagagaggtgcgagtatttctgtaaatggagtctgtcttacctcaaaagatagtggctctaaaacattaaaatttgatgtaatagaagaaactattagcaagaccaatttaaagaatattaataaaggggatatagtcaacctcgaaaggtctataaaagcttcaactgaaatcggaggtcatttgatgtcaggtcatattcacttcactgctaaagttatcaaaactgttaatagaaaaaatactaaagatatacaaatatcattaataaaaaaatatttagattacgttatggaaaagggctatataggtataaatggttgcagcttaacaattggcaaggtaaataaaacaaacttttatattcatttgatacctgaaactctagatataactaatttagacaaactttcagaaggcgatcaggttaatatcgaaatagatcaaaatacaatcacagtagtaaatactgttaagaaaaccctagctgctcagatatctagctaatacagccattcttatagcaacgccgtttgcaacctgatttcttattaccgaattatctgactgataaacgctttcagatatttcaatataattaaccgggcctgggtgcatgactatcacatcacctcttgcctgctgcactctttctgatgttaattcatatgcatgcttgtaatcatcaagatcaagatttagctcttcttcaaatctttcatgctgaattcttaatgtaataatcacatctgcatcttgaacagctaaatcaaggtctggttcatatcttccnagngcaggatcnaaatactttgaacacatgcttggatgcccgcagaatgttaatgagttaaaagaaaaattagagataccttctatgaaggacgatgtaacgcgtgagtgatcaagatcaccaacaataacgatatttaaatcatctatagagcctttactatcaataatagtcattaaatcaattaaggcttgagttggatgagatatcgacccttctccaccattgataaaaaccatttcaggcatatattcatctagctcacgaataactgaatcaggatgcctgagaacgcaaagatctacccccattaagcctagcgcatcaatagtttcgtatattgattcccctttttctattgatgagcttgaggcatcaaaaccaatcacactgcaccctaaatttttagcggcaatttcaaatgatgattttgtccttgtgctcggttcacaaaaaacatttgcaactgttttatctggaaaaagagtttctttcttaaaagaaccatcatcatttttaaagtttctggcaaattctataagatcaagtatttcttgtttagataaatcattaatagataggagacttttattcatctatatttactattgcatccatttctacatttactccaagcggaagtgctgaaacttctatagttgcccttgctggataaggagattcaaaatgactctccatggcttgattcacaatagaaaaatcattcatatctgtaatgtaaatagttaatttaacaatatcggacagaccagcatttgcggctttacatattgcagttagatttttaattacttgttcggcctgctcttctattgaagagttcttaagatcaccagagacaggacacaaggctacctgacccgaaacaaataaaaaactacctgatttaacagcctgagagtatggaccaatagcttttggagcgtcttcagtaaaaattatttctttagccataatgtcgttctcttttaagttagttgatgttgttaaaaagtgaattgtacataataaaaaatggtttcgttctattatttatcattaatgattcttgaacagctagctgtgaatttttttgatcttaccttggacataattcttttgagctcatcaaggctttcaatatttgcttccaatgtgaactcagaaaatttttgatcgactgccttggtatttacttgctcaatattaattcctgcctttgcaaatatagaaacaatatctgataaaacacctattttattttcagtagtaattttgagcattgctagatataaatgagattttttagaggcatcccaataagcagagaagtatcttggatctttattgatatatggagacacttgtttacacctttgatgatgaaccacaatacctctttctgtatctgagtgtgcaatgactggatcgccttggatgggatgacagcatttagcaaatactactgaaacaccttcaatatgattatcgataataggaacagtcctatcttctatgatttctttttcttttctaatctgcagtcctgaataaaatctttcagcaacaatatttccagttctctttcctgatcctaaatcgattagtagtttatttagagtagtgactccaattgaatcgagaactcttttcaaagtgctccccctataatcctcaagtgattttcctgatctttttaactctgattcaagcattaactttcctgctttcctagcagaagaatttttttgatttcttaatctagacctaataccacttcttgctttgctagttacaacaaagtttaaccatgcagggtctgcatctactggatagtcagatgttattatttctaccgtttggccactctcaagctcaacattaagaggtgcntctcttctnttgaccttacatcctacaatnctatttccaagncctgtatgaacctcataagcaaaatcaataggagttgcgccagttttaatggaatacacatgaccctttggtgaaaatan

SEQ ID NO: 1014 - DNA, 4000 bp, Escherichia coli
  misc_feature (16)..(16): n is a, c, g, or t
  misc_feature (29)..(29): n is a, c, g, or t
  misc_feature (31)..(31): n is a, c, g, or t
  misc_feature (33)..(33): n is a, c, g, or t
  misc_feature (53)..(53): n is a, c, g, or t
  misc_feature (57)..(57): n is a, c, g, or t
  misc_feature (100)..(100): n is a, c, g, or t
  misc_feature (105)..(105): n is a, c, g, or t
  misc_feature (216)..(216): n is a, c, g, or t
  misc_feature (222)..(222): n is a, c, g, or t
  misc_feature (225)..(225): n is a, c, g, or t
  misc_feature (228)..(228): n is a, c, g, or t
  misc_feature (267)..(267): n is a, c, g, or t
  misc_feature (346)..(346): n is a, c, g, or t
  misc_feature (378)..(378): n is a, c, g, or t
  misc_feature (780)..(780): n is a, c, g, or t
  misc_feature (789)..(789): n is a, c, g, or t
  misc_feature (825)..(825): n is a, c, g, or t
  misc_feature (1221)..(1221): n is a, c, g, or t
  misc_feature (1361)..(1361): n is a, c, g, or t
  misc_feature (1433)..(1433): n is a, c, g, or t
ctagatacttatttgnttaatgggctgantncnatgcatcaaattctttctgnaatncgtgttttagagctggggcagttaattgcaggaccctttgccnccaanaccttggctgattttggggcggagattatcaaggtggaatcccctcaagatggtgatcccttgaggaagtggcgcatgcttcatgagggcacttcggtatggtggcaggcncaatcncgnaanaaacaatccatctgcattgatttgcgagtgaaagagggncaagacatcgttcgtcgcttggccaaagaagccgatgtgctgattgagaactttcgaccgggcaccatggagaagtggnggatgggctgggatgagctgcatgcgctcaancctaagttgatcatgttgcgtgtctccgggtatggccaagatggaccacggcgggatgagcctggctttgcagcaattgcggaggcaactgcaggcctgcgctatctcacaggtcatccgggcgatgtaccagcgcgcgccggcttatcacttggcgatacgatcgctggtttacatggtgcccttggagtattgctagccctctatgagcgtgatgctaggggtggcaaaggccaaatgattgatgtggctttatacgaggctgtgtttaatttaaccgagagcctattacctgaataccatgtgtttggagcggtacgtcaaccggctggaggcgcattaccagggattgccccatccaatgcttacccttgcgcagatggacaatacatcttgattgcngccaatggngattctttatttaagcgcctcatgggattcattggncgatcagatttagccaatgatcctgacttagccagaaatgatgggcgagcaaaacgtgccgaagagattgatcagatcatcgggcagtggacacaaacccaatccattgatcaggtcttaaacgcattgcaagagatcgcagtaccggcagggcgtatttatacggcaaaggatattgcagaggatccacactatcgtgcccgtggtgtgattgaaacgattgaaagtgcagatggcctaaaagtggagatgcccggaatcattccgaagttatccaataatccaggcgccattcgtcatcgcgcgcccacattgggagagcatacgcagaagattcttcaatcgattggcttaagtgaagagcaaattaaagccctaaaagagactggcgtcctnaattaatggaagcagcgattcaaaccctgttgcattggtttggaatgcccacagtgggtctgcccgctgtatttatcgtagcaactgtatcagcaaccttaatcccgatgggttccgagcccgtgttatttgcttatgtnagtcttaatccgcaagactactggttagcaattgcagttgccacactaggtaatacgatcgggggaatgatnaattggtggctgggactcttggcacgcaatacctacgaatctctaaagggaaagacaaattctcgggcacaagtctggctggagaagcggggaccacccatgttgttattgtcttggttacccgcgataggcgaccctttgtgtctagttgccggttggctccgctttaattggctgaaatgcttgatttacatggcaattggaaaactactgcgctacatcaccctgacatggttgctgacagaaataccaaaagaattttgggaggagattggaagagccttgggttttctgtaaatctagaccgaacaatatttctgctgaatctcatcattattaagaagtgcttttgcagagtcttcaaaaacaattttgccttgatcaagaatatatgctctatctgatataccaagagccttttgaacattttgctccaccaataagatggtcattcctgcttgcttcattttagtaaacagtgtgaacatctcttctactaaaactggcatgattccctcagagggctcatctaaaagaattatcttaggcttcgctaccatcgctctcgcaatcgccaacatctgttgctcgccccctgacattgaggtaccgtcttgatgaagtcgctccgttaatcttggaaaggtttctgcaacttcatcaagcatcgactgaatattacccttggatttttgtgcgatcatgccaagctctaaattttctttaaccgttaagcctggaacgatacgcctatcttctggcacataagcaatacctagatgaaaacgctcataggcaggtagccctaaaaactcttttccattgatacttgcatgcccctttcgttttgataagagccccatcaaggttcgaagcgtggttgttttaccggccccattacgacccattaaggtaacaatctcccctgcgtttacggttaatgagatgccttggataacgtgactttggtcataccaggcttgtaggttctcaattcttagcatcgctacccttgacccaaataaacacgacgtacttcggcgttattttgaatttcatcagggctaccttctgcaagaaactcgccatgatgcaagacaataatacgattgcatagccccataatgagcttcattttgtgctcaacaagtatgaccgttcgctctgtagctaatgttcgaattagatccatcatgacaagggtttcttctggagacattccagcagtaggctcatcgagcaataaaagacttggcttgcaagctaatgccattgcaatttctaaggctcgttgctgaccatgggctaagtctcctgattttttgtgacgcagatgatgaagaccaacgcgctcgagaagttcatctgcgctaattatggtatccgatagggaatgggcatcttttaagaagttaaagcgcgaaacctgcatctgggcggcaacacgaacgttttcgtggacactgagttgtttaaatacattggtaatctggaagctctttgaaataccaattcgagcaaattcgtatggtttttgatgagtaatatcgacaccattaaaaagaatttgtccgtcagagggcggaaaggcgccacttagaacattaaaaaaagtacttttaccagcgccattaggtccaatgatggccgtaagactgcctgtagcaaaactggtagacacatcacttaaggccttgaactttccaaattgcatggatacgtggcgagcctcgagaataggggtggtgccaaacttattcattttgatgcacctttttgactaccaagacgctcaagaatgcttccccaaattcccttcggaaaaaatagcacgaaaaacataaaaataagtccaaccacagccatccagtgttttgtgaagctagtcacgacatcctcgagatatagcatcaccgtagcaccaacaaaggggccaaagaaagtccccatcccacccaagatactcatcatcaccgcttgaccagactgcaagtaatgcaaggaatcaattggcacaatagataaatgaagggcgcgtagtgagccagctaaaccacagatggctgctgacaagatgaagactaacaatttagtttgggcaacgttatagccgcatgccaagacccttttttcattctcacgaatagcctccataacggagcctaaaggtgattttaagattctggaaactagccaaatggcaatcaccacaaagaaaagaataatgtagtacttcaccaatggatttaagaagtcgactttaaaaccaaggatattaaatggatccactttcacacccctcaggccattttcaccaccggtcaacttctcggctttataaaatccgtagtacacaatttgacctaatgccagggttaccattgaaaaataaatacctcgagtacggattgctaaaaatccaataacaagaccaccaaaagcagccgcaatcacaccaaataaaattgctgcaccccaaggcattccgtagctcacaatgctgataccggttatgtaactacccattcctaagaaagcagcgtgtccaaacgagaggaggcccatgt

SEQ ID NO: 1015 - DNA, 4000 bp, Escherichia coli
  misc_feature (94)..(94): n is a, c, g, or t
  misc_feature (109)..(109): n is a, c, g, or t
  misc_feature (121)..(121): n is a, c, g, or t
  misc_feature (424)..(424): n is a, c, g, or t
  misc_feature (443)..(443): n is a, c, g, or t
  misc_feature (875)..(875): n is a, c, g, or t
  misc_feature (2712)..(2712): n is a, c, g, or t
  misc_feature (2718)..(2718): n is a, c, g, or t
  misc_feature (2801)..(2801): n is a, c, g, or t
  misc_feature (2854)..(2854): n is a, c, g, or t
  misc_feature (2871)..(2871): n is a, c, g, or t
  misc_feature (2883)..(2883): n is a, c, g, or t
  misc_feature (2887)..(2887): n is a, c, g, or t
  misc_feature (2890)..(2891): n is a, c, g, or t
  misc_feature (2893)..(2895): n is a, c, g, or t
  misc_feature (2897)..(2898): n is a, c, g, or t
  misc_feature (2901)..(2901): n is a, c, g, or t
  misc_feature (2903)..(2909): n is a, c, g, or t
  misc_feature (2911)..(2913): n is a, c, g, or t
  misc_feature (2916)..(2920): n is a, c, g, or t
  misc_feature (2923)..(2925): n is a, c, g, or t
  misc_feature (2927)..(2936): n is a, c, g, or t
  misc_feature (2938)..(2939): n is a, c, g, or t
  misc_feature (2941)..(2942): n is a, c, g, or t
  misc_feature (2950)..(2951): n is a, c, g, or t
  misc_feature (2953)..(2957): n is a, c, g, or t
  misc_feature (2965)..(2965): n is a, c, g, or t
  misc_feature (2970)..(2972): n is a, c, g, or t
  misc_feature (2974)..(2975): n is a, c, g, or t
  misc_feature (2977)..(2979): n is a, c, g, or t
  misc_feature (2984)..(2986): n is a, c, g, or t
  misc_feature (2988)..(2992): n is a, c, g, or t
  misc_feature (2996)..(2997): n is a, c, g, or t
  misc_feature (2999)..(3002): n is a, c, g, or t
  misc_feature (3004)..(3004): n is a, c, g, or t
  misc_feature (3006)..(3009): n is a, c, g, or t
  misc_feature (3011)..(3014): n is a, c, g, or t
  misc_feature (3016)..(3018): n is a, c, g, or t
  misc_feature (3020)..(3021): n is a, c, g, or t
  misc_feature (3024)..(3024): n is a, c, g, or t
  misc_feature (3027)..(3027): n is a, c, g, or t
  misc_feature (3029)..(3029): n is a, c, g, or t
  misc_feature (3032)..(3035): n is a, c, g, or t
  misc_feature (3039)..(3040): n is a, c, g, or t
  misc_feature (3042)..(3044): n is a, c, g, or t
  misc_feature (3046)..(3046): n is a, c, g, or t
  misc_feature (3052)..(3052): n is a, c, g, or t
  misc_feature (3054)..(3057): n is a, c, g, or t
  misc_feature (3061)..(3061): n is a, c, g, or t
  misc_feature (3067)..(3068): n is a, c, g, or t
  misc_feature (3071)..(3071): n is a, c, g, or t
  misc_feature (3079)..(3081): n is a, c, g, or t
  misc_feature (3083)..(3084): n is a, c, g, or t
  misc_feature (3086)..(3088): n is a, c, g, or t
  misc_feature (3090)..(3092): n is a, c, g, or t
  misc_feature (3097)..(3097): n is a, c, g, or t
  misc_feature (3099)..(3099): n is a, c, g, or t
  misc_feature (3101)..(3101): n is a, c, g, or t
  misc_feature (3105)..(3105): n is a, c, g, or t
  misc_feature (3107)..(3108): n is a, c, g, or t
  misc_feature (3116)..(3118): n is a, c, g, or t
  misc_feature (3120)..(3120): n is a, c, g, or t
  misc_feature (3123)..(3124): n is a, c, g, or t
  misc_feature (3126)..(3126): n is a, c, g, or t
  misc_feature (3129)..(3130): n is a, c, g, or t
  misc_feature (3132)..(3134): n is a, c, g, or t
  misc_feature (3136)..(3138): n is a, c, g, or t
  misc_feature (3140)..(3143): n is a, c, g, or t
  misc_feature (3146)..(3147): n is a, c, g, or t
  misc_feature (3149)..(3151): n is a, c, g, or t
  misc_feature (3156)..(3156): n is a, c, g, or t
  misc_feature (3161)..(3161): n is a, c, g, or t
  misc_feature (3168)..(3168): n is a, c, g, or t
  misc_feature (3171)..(3171): n is a, c, g, or t
  misc_feature (3178)..(3179): n is a, c, g, or t
  misc_feature (3182)..(3182): n is a, c, g, or t
  misc_feature (3187)..(3187): n is a, c, g, or t
  misc_feature (3189)..(3189): n is a, c, g, or t
  misc_feature (3197)..(3197): n is a, c, g, or t
  misc_feature (3199)..(3199): n is a, c, g, or t
  misc_feature (3202)..(3202): n is a, c, g, or t
  misc_feature (3205)..(3205): n is a, c, g, or t
  misc_feature (3207)..(3207): n is a, c, g, or t
  misc_feature (3212)..(3212): n is a, c, g, or t
  misc_feature (3215)..(3215): n is a, c, g, or t
  misc_feature (3231)..(3232): n is a, c, g, or t
  misc_feature (3238)..(3239): n is a, c, g, or t
  misc_feature (3241)..(3241): n is a, c, g, or t
  misc_feature (3253)..(3253): n is a, c, g, or t
  misc_feature (3255)..(3256): n is a, c, g, or t
  misc_feature (3258)..(3259): n is a, c, g, or t
  misc_feature (3261)..(3261): n is a, c, g, or t
  misc_feature (3265)..(3267): n is a, c, g, or t
  misc_feature (3272)..(3272): n is a, c, g, or t
  misc_feature (3277)..(3277): n is a, c, g, or t
  misc_feature (3295)..(3296): n is a, c, g, or t
  misc_feature (3301)..(3301): n is a, c, g, or t
  misc_feature (3303)..(3305): n is a, c, g, or t
  misc_feature (3307)..(3307): n is a, c, g, or t
  misc_feature (3309)..(3309): n is a, c, g, or t
  misc_feature (3317)..(3317): n is a, c, g, or t
  misc_feature (3320)..(3320): n is a, c, g, or t
  misc_feature (3328)..(3328): n is a, c, g, or t
  misc_feature (3332)..(3335): n is a, c, g, or t
  misc_feature (3340)..(3340): n is a, c, g, or t
  misc_feature (3345)..(3345): n is a, c, g, or t
  misc_feature (3348)..(3348): n is a, c, g, or t
  misc_feature (3358)..(3358): n is a, c, g, or t
  misc_feature (3369)..(3369): n is a, c, g, or t
  misc_feature (3371)..(3371): n is a, c, g, or t
  misc_feature (3378)..(3378): n is a, c, g, or t
  misc_feature (3381)..(3381): n is a, c, g, or t
  misc_feature (3383)..(3384): n is a, c, g, or t
  misc_feature (3393)..(3393): n is a, c, g, or t
  misc_feature (3406)..(3406): n is a, c, g, or t
  misc_feature (3416)..(3416): n is a, c, g, or t
  misc_feature (3423)..(3423): n is a, c, g, or t
  misc_feature (3437)..(3437): n is a, c, g, or t
  misc_feature (3439)..(3439): n is a, c, g, or t
  misc_feature (3449)..(3449): n is a, c, g, or t
  misc_feature (3452)..(3453): n is a, c, g, or t
  misc_feature (3457)..(3457): n is a, c, g, or t
  misc_feature (3479)..(3480): n is a, c, g, or t
  misc_feature (3483)..(3484): n is a, c, g, or t
  misc_feature (3486)..(3488): n is a, c, g, or t
  misc_feature (3493)..(3494): n is a, c, g, or t
  misc_feature (3497)..(3497): n is a, c, g, or t
  misc_feature (3500)..(3500): n is a, c, g, or t
  misc_feature (3502)..(3503): n is a, c, g, or t
  misc_feature (3505)..(3505): n is a, c, g, or t
  misc_feature (3507)..(3507): n is a, c, g, or t
  misc_feature (3510)..(3510): n is a, c, g, or t
  misc_feature (3513)..(3513): n is a, c, g, or t
  misc_feature (3516)..(3516): n is a, c, g, or t
  misc_feature (3518)..(3518): n is a, c, g, or t
  misc_feature (3520)..(3520): n is a, c, g, or t
  misc_feature (3528)..(3530): n is a, c, g, or t
  misc_feature (3533)..(3533): n is a, c, g, or t
  misc_feature (3535)..(3535): n is a, c, g, or t
  misc_feature (3539)..(3539): n is a, c, g, or t
  misc_feature (3542)..(3544): n is a, c, g, or t
  misc_feature (3547)..(3548): n is a, c, g, or t
  misc_feature (3552)..(3552): n is a, c, g, or t
  misc_feature (3554)..(3555): n is a, c, g, or t
  misc_feature (3557)..(3557): n is a, c, g, or t
  misc_feature (3559)..(3560): n is a, c, g, or t
  misc_feature (3562)..(3562): n is a, c, g, or t
  misc_feature (3566)..(3568): n is a, c, g, or t
  misc_feature (3570)..(3570): n is a, c, g, or t
  misc_feature (3572)..(3572): n is a, c, g, or t
  misc_feature (3576)..(3576): n is a, c, g, or t
  misc_feature (3578)..(3579): n is a, c, g, or t
  misc_feature (3583)..(3583): n is a, c, g, or t
  misc_feature (3585)..(3587): n is a, c, g, or t
  misc_feature (3592)..(3593): n is a, c, g, or t
  misc_feature (3595)..(3598): n is a, c, g, or t
  misc_feature (3603)..(3603): n is a, c, g, or t
  misc_feature (3607)..(3607): n is a, c, g, or t
  misc_feature (3609)..(3609): n is a, c, g, or t
  misc_feature (3611)..(3611): n is a, c, g, or t
  misc_feature (3613)..(3614): n is a, c, g, or t
  misc_feature (3620)..(3620): n is a, c, g, or t
  misc_feature (3622)..(3623): n is a, c, g, or t
  misc_feature (3625)..(3628): n is a, c, g, or t
  misc_feature (3631)..(3631): n is a, c, g, or t
  misc_feature (3635)..(3635): n is a, c, g, or t
  misc_feature (3637)..(3639): n is a, c, g, or t
  misc_feature (3642)..(3642): n is a, c, g, or t
  misc_feature (3644)..(3645): n is a, c, g, or t
  misc_feature (3647)..(3647): n is a, c, g, or t
  misc_feature (3649)..(3651): n is a, c, g, or t
  misc_feature (3654)..(3654): n is a, c, g, or t
  misc_feature (3657)..(3658): n is a, c, g, or t
  misc_feature (3663)..(3664): n is a, c, g, or t
  misc_feature (3671)..(3673): n is a, c, g, or t
  misc_feature (3677)..(3677): n is a, c, g, or t
  misc_feature (3680)..(3680): n is a, c, g, or t
  misc_feature (3683)..(3683): n is a, c, g, or t
  misc_feature (3687)..(3689): n is a, c, g, or t
  misc_feature (3692)..(3692): n is a, c, g, or t
  misc_feature (3694)..(3694): n is a, c, g, or t
  misc_feature (3696)..(3697): n is a, c, g, or t
  misc_feature (3701)..(3703): n is a, c, g, or t
  misc_feature (3705)..(3705): n is a, c, g, or t
  misc_feature (3708)..(3711): n is a, c, g, or t
  misc_feature (3713)..(3714): n is a, c, g, or t
  misc_feature (3716)..(3716): n is a, c, g, or t
  misc_feature (3719)..(3719): n is a, c, g, or t
  misc_feature (3722)..(3722): n is a, c, g, or t
  misc_feature (3724)..(3726): n is a, c, g, or t
  misc_feature (3730)..(3730): n is a, c, g, or t
  misc_feature (3733)..(3733): n is a, c, g, or t
  misc_feature (3735)..(3735): n is a, c, g, or t
  misc_feature (3737)..(3739): n is a, c, g, or t
  misc_feature (3745)..(3745): n is a, c, g, or t
  misc_feature (3747)..(3748): n is a, c, g, or t
  misc_feature (3751)..(3753): n is a, c, g, or t
  misc_feature (3755)..(3756): n is a, c, g, or t
  misc_feature (3760)..(3760): n is a, c, g, or t
  misc_feature (3763)..(3763): n is a, c, g, or t
  misc_feature (3769)..(3769): n is a, c, g, or t
  misc_feature (3771)..(3773): n is a, c, g, or t
  misc_feature (3775)..(3775): n is a, c, g, or t
  misc_feature (3788)..(3789): n is a, c, g, or t
  misc_feature (3804)..(3804): n is a, c, g, or t
  misc_feature (3808)..(3808): n is a, c, g, or t
  misc_feature (3811)..(3812): n is a, c, g, or t
  misc_feature (3818)..(3818): n is a, c, g, or t
  misc_feature (3820)..(3821): n is a, c, g, or t
  misc_feature (3831)..(3831): n is a, c, g, or t
  misc_feature (3834)..(3834): n is a, c, g, or t
  misc_feature (3837)..(3837): n is a, c, g, or t
  misc_feature (3841)..(3841): n is a, c, g, or t
  misc_feature (3845)..(3846): n is a, c, g, or t
  misc_feature (3848)..(3848): n is a, c, g, or t
  misc_feature (3852)..(3852): n is a, c, g, or t
  misc_feature (3859)..(3860): n is a, c, g, or t
  misc_feature (3864)..(3865): n is a, c, g, or t
  misc_feature (3869)..(3869): n is a, c, g, or t
  misc_feature (3873)..(3873): n is a, c, g, or t
  misc_feature (3876)..(3876): n is a, c, g, or t
  misc_feature (3898)..(3898): n is a, c, g, or t
  misc_feature (3900)..(3900): n is a, c, g, or t
  misc_feature (3902)..(3902): n is a, c, g, or t
  misc_feature (3904)..(3905): n is a, c, g, or t
  misc_feature (3908)..(3908): n is a, c, g, or t
  misc_feature (3910)..(3910): n is a, c, g, or t
  misc_feature (3913)..(3914): n is a, c, g, or t
  misc_feature (3917)..(3917): n is a, c, g, or t
  misc_feature (3925)..(3925): n is a, c, g, or t
  misc_feature (3934)..(3936): n is a, c, g, or t
  misc_feature (3938)..(3939): n is a, c, g, or t
  misc_feature (3956)..(3958): n is a, c, g, or t
  misc_feature (3960)..(3960): n is a, c, g, or t
  misc_feature (3963)..(3963): n is a, c, g, or t
  misc_feature (3965)..(3965): n is a, c, g, or t
  misc_feature (3970)..(3970): n is a, c, g, or t
  misc_feature (3972)..(3972): n is a, c, g, or t
  misc_feature (3974)..(3976): n is a, c, g, or t
  misc_feature (3982)..(3982): n is a, c, g, or t
  misc_feature (3986)..(3986): n is a, c, g, or t
  misc_feature (3992)..(3992): n is a, c, g, or t
  misc_feature (3996)..(3997): n is a, c, g, or t
  misc_feature (4000)..(4000): n is a, c, g, or t
gaaacagcagctccagaacattgaagacaatattgcctggttgcagcgttcggagttggaaattggacatattaatgaaatattgggacaaatncgcacacttgctatntcacaggccggnagtgattcaaacgaagaaacgaggcaaatggtggctcgagagtttgctgtggcccggaaaactttatttgacacaggaaatgcgcgtgaaggaaaactttatttgttttcgggcataaaaagtctttctcctgctttgaaaaaaaatggtatatttcaaccggcaaaagttgagaaaagcggagttgcgcagaaagacatcagggaattgctggatgtgaaacaatttagagcgcaatttgagggtttttctactaataattatcgaatcaaagtcacaaaaggcggaatttggggacaagcnaggataaagatttcagacnatggtggacgaacctggagtaaagaacagacattacgtccggtgattcacgtatttaaccaggatggaaaacttaacgaccaggttttgctcaaattttctgaccaggaaggtcgtttgggcaacattctgccaaaacaatttgattttaattcagagaaatcggcaaaatttgacttggatgcacttggtgttttgtttccggaaggaattgagtttgtgtatcagccaaacccggaagtatcatataatggatcaatacataaaaaagaatctttgatttcaaatggactttcaattccggtaaatattactgctcaggaactgctgcttggagaaggtgaggatggcgtggatacgttttctttacttgcggcaatggagagagctcttctcgaaaatgatggcattgcgattgcaaaacgtatagatnagcttaacttggcacaaaatcaggttttgaagcagcaggcagacgttggaaatattgttcgcgaactctattcaactcagtccaggctggaagatcagcagtttgaaaaggagagacaactttctgatatccaggatttagatgttgcggaagcaactgtggaccttaaagtcgcagaggctaacaacatactttcgctgaataccggagcccgcttgatccaaccgtcactgtcggattttctccgttaatttaacctgtgaatgataatcacaggttttgtataatttggaattaattatcaagaagacagatcattatgctcatactgacaaggaagtcgggagaaagtataaccattggggatgatgtaaaaatcacggtggttgaggtcaagggcaaacaagttcgaattggaattgatgcaccccgaagttatataatccacagagaagaagtatatataagcattcaggaagaaaacaggcgtgcggcagaagagtcaccactttcgttagccggaatcaaacacctttttggtaaactctaatcaataaaacattaatgcttgttcaaacctcacgcttcggtgagatcgaagttaaagacgatcaaataattagctttccttcaggattgataggtttttcggaagaccatcgttttgtgatccgggaagatgaagcagcagcaccttttcgctggctccagtccattgatagtgaagatcttgcttttgtgatgattgaaccgcatgtctctatttcaaattatgagcttgagttaacaaatgatcacctgaaaaaacttcatgcagaaaaaactgaagatctgtcagtctatagcctggtcaccatggccaaaaaaatggaagatgtgactataaatttacagggccccctgctttttaatcttgaaaagcgccttggaattcagatcattgttcaagatggtagatactctacccgtcattcactgtttgctgaaaaattaaaaaagagtactcctgagtcttcatctcaggaagagccggagaacagcagcaagtctttagaacaagccgggtgatcctgcatcagcccgtaatcggcaatgaaactgaagttctcatgctgacaaaattccttcctgcaaacactcaataatgagtgaaatacaaaaaccccttaaatctattgaagtcagacaaatctgtttagagaatgatttggagatttcagattcccaatggcagctgctggaaaagtgggctgttatgttgctggatgtcaaccagaaagtaaatttaatttcccgcaaagaaacagatttattgtgggaaaaacaaatattgccctgtctttcattactggttttacgtaaaattgaaaaaggtgcagatgtttgtgattttggtacaggaggaggattgccgggaatgatactggccatagtacgtcctgatttgcggcttactttgttggattcacgtcagaaaaaaattgtggtccttcaacaaatgattgatgcattaaagctcaaaaatgttcagactgtccctgggcgaggggaagagttaggcaaacaacgtccctggcgtcatagattcccgtttgtgacagcacgtgcagttgcacctttgatcgatttagtacgctggacctctgatttgagaaaaccggattcagtactgcatatttttaagggtggagaaatcaggaatgaagtaacggcactgactaaagtagtttccggaatcaaagtcaagaagtctctgatggtactaaaaggatatccacattttgcagagaatcaaaaatatttaatatctttagaattttcctcaaaataactcgtnagtcangagttctcgtaagataatgatattgttgtttacggtttgtcatctcgaccgaagagagggatctgataaaatacttatatcgngcaagattcttcacatactttcgggatgacatgacaaaactagtgtttgtccngtaaataaatacacaanttttccctaatntttnatnngnnnannatntnnnnnnntnnnaannnnnttnnntnnnnnnnnnnanngnntttttttnnannnnnacacacanaaaannnanntnnngtttnnntnnnnnaaannannnntnannnngnnnnannnannganatnangcnnnntccnncnnntntaaagngnnnntttntatttnntgnaaaaaaannntnntnnngnnntgggntntntttncnnaaaaaacnnnancgnntncannannntnnngnnnngtnngnnntgganaaagngggccgnttnattcagnnagnttttngnaaattgantnttntcncnctttntcnaccctccggaagcagnngagatnntnggcaaaattttnannannangtgnnngattntttanataaatggcttttggaanntaaantnnncngnagggaaantanaatctgcngagnnnngaatnttgcncanaaggagattnatttgaaaaantngagaaanaancnnaaaaattcngggtttttacccnaagaacgtgngtggatnacaaaaatattttntnaacttggttntgnngatntattccggacacttaatcctgnnccnnannnatatnnctngtngnnanancgnggnagngngngggataannntgntngttngannntannttancnngntnncnctcnnngnantggngnnaaancnnntaaanngnnnntttanaaanancngnntttttnanntnnnnccncacngnnnatngnntntnnntanagnntttanncacattnnntttntanaanagannntcncncnnctannntnttnnnntnnanatnccngnnnaaanacncngnnnaaaaantnnggnnncnnctcnccntttaangnnntnatttttgtgccgnncggtttaaaaaagantagngtnncccggntnncgttgtgatnttntgnaaancagnntncttntttgganntcannttancaancangaaacgtattttccctttatantncngnnggngnganntgnccacccgnttgagtgcnnngnnggaaggtcaaccggggnnntnaancnggacnancnnnttttcncccntgccgnttgnngan

SEQ ID NO: 1016 - DNA, 4000 bp, Escherichia coli
  misc_feature (1284)..(1284): n is a, c, g, or t
  misc_feature (1401)..(1401): n is a, c, g, or t
  misc_feature (1978)..(1978): n is a, c, g, or t
  misc_feature (1981)..(1981): n is a, c, g, or t
  misc_feature (1984)..(1984): n is a, c, g, or t
  misc_feature (1990)..(1990): n is a, c, g, or t
  misc_feature (2837)..(2837): n is a, c, g, or t
  misc_feature (2855)..(2855): n is a, c, g, or t
atggatactgcacttactgctgtttcagtcttatttatagccgtaagctgggcccctttgcttccttcttctcattggttagtaagagtgtgggaatttccgcgactacaaatagcagctatcatttctttgttaattgctgggcatatttttgaatcaacctattacgcacagatagatagcctagcagtaattattgtcgctggattaacagttagccttatttatcaggttatctggatcattccttatacccctctgtataaaagagaagttaggcacgtcgaggttgagagtgcgagccaaaagctaagtgttttatcaagcaatgtgtatatgcctaatgacgattttcgcaagctcattgaacatgtacgtaataagcaacctgattttctcgtaacgttggaatctaatgagaagtggcagaaaggcatcagtgaaattgaatctgaatacccgtatcgtaaattttgcccactcgaaaacctctacggtatgcatctttatagtaagcttccctttgaagaggtctcattgcgatttctaatagaagaagatgtgccgtctatgaaagttaaaatcaatcaccacggacaagatgtcacgctatattttcttcatccaaaaccaccaagcccaacagaaaacacgtatgcaaagcccagagacgtagaacttactgttgtgggggaagaaatagctgaaacagagggccctattgtcgtcgctggcgatcttaacgatgtggcttggtcacctactaccagaaagttcaagaaaataagcggacttttagacccacgagaggggcgcggttttttcaatacatttcacgcgaaatatcctttagtgaaatggccgttagaccacgtatttcactcggaacattttgcattggtcaatatagagaagcttgaaagcataggctcagaccactacccgctttataccgaactagcgctaatcacggacaaggagtaatactcaagactgtaaatctaatgagagctacggtgtttgacacaccacatgaggctatcacacgcctcttcacgctttttaaaatgggctagccctattagcttgttatcccgaggccaaaccgcttggtttagcacctcttgatcttctgccgatagttgttcgctatctaacacaatctcaaccgcttttttgttgggttttattaatgtggggttagcttctttgaccagagcagagttcacacaaatatactctctcttaacagggtctctcaccacgccgatgtagttgttgtcncaaattatagctggccagccttccgttattctgctctgtccaaacattacgagtgtaaaagcaacaagaacgaaaagtgttaaaccgataaattgagcgctcaaatctggtgctacncttacaataacgccgacaacagctgcgaaaaatatccagccgccaaatactctgcgcatagcatttggtgagataccagatataacatcaaccacctttaatgattgtttgtcatagtgtcgaataaatacagacgattgtgattccacagcctttgtccaccagaaaaaatacgaaattcagaaattaatacgttacaagtaaggctgaagatttacctacactctgagtgagtaaaaaccaataatatgagattagttctactcgaaagaaaacgtgttaagcaatatttgtaggaatatttaaactattgaattgtaatgtttaacctactaaccaagcatatcaaaatatgtgggaacggcaaagcaattacgcgctagatgcacagtaaaacaagacttatgaaaagaagcgtcatgttaatctgcaaattagaacagaccaccaaaaattaacataaaaaactgctgttggcctccatacattcgtttgtaaatttttctctcactttgcacctcttgcttgccttggcgctcaaccattgctgcaaatactcaaaaacagaacttgaaantanacnttttancaaaaaatcaataatttacaaaacaggaacactctttgcttctacgaaagtataacgttcaacgtttcatgtcgtcgttattacaggttcaacaaattagaaagggaggaagagtatgcgttcaccaataagtgcagtaactattgttaagagcagaactgagaaactggccaatttgattactcagttagagcaatgctctccaacgccagatgagctagtcattgtttggatggcacctccttctgatttgtcactcgtacgcagtgacaaattcgacattgttcacaagtttgtgactcaagatgctcttccgatagcgaaagcgcgcaacaagggtatgtcagcggccaagcacgcgaatttagtttacctaaacgtagacgcagttattgccccatcgctttttagagatggcttgcttgcgcttcgtgacaacaccgtagtgttcacatcagtggtgtttttacccaacgagcgctgttgtaagccctaccgacaaatttcaaaagatgaaaaagaaatcggttatttagcaagtaatgacgacacgttacccgaagacgacaataacgaaataccttcaagagatcaggaaattaatcatggaaagtttagtgacgatagtatttgttctacagtgttttttattcgtaaggcagactttcagaaaaccggcggcttcgatgaaggctacgcgggtttcggactaaacgacgaagatttcttcactaactgtagggcattagggttttcgttagagcaattgcccacgcgaacatttgcaccacaccggcctaattatcaatgcccgataaatcaccttttagactttgttcataatgcncagcgttttcactcgaantggggattttacccatgtgtcaatgtattgaacgcgtatgcagaccaaggttttattaatgctgacttcaagcaaaacggcattaagatcaagcacctcccccagcaggtagaggaagacaaggcggacgcgccggttgagcaattaacggtaaccaacgcccaaaacaatgttgaatttacgtcttttcattcgccggagaaaggctctgaccttttaagcacgaccgcataaaacgctttcagggagatatggaatgtctttattgaaaccgaatctaaccgagcgctttttgtcgtttgtaggggaagccgatttcccctgcgtcggagccaaaacagccctcaataaaagccaaattcatgtgaatcaatacgacgatattcgctgtcctctcaatgagacagatatgttggcgtcaattcaccaatttgtagagtcgtttgatcttgaacgggacatgtactcctctttggtcgcaacttttgagcttccagatacgataagcgaaactgaatttgatcgggttttatgggaaaaattgcagcgtttacacgagattgacgcctgtttaaaaccttgggatagtaaagtatcaagtgaccctcataacgctcagtttagcttgagtttaggcggaaagggtttctttgtagttggactgcatccaaatgcatcaagaaaaagccgtcgatttccctaccctgccatcgtgtttaatttacacgagcaatttgacatgttgagaaagcagaagcgttttgaagcattcaaagaccacattcgtaaacgagataccgcgtactgcggaagtaaaaatgagctactcgcaaaccatggtgatagctcagaggtatatcaatatagtggtgtaaaacattccgaaaactgggaatgcccgttcaagcggattaagcactaaacctaaataaaagggacaagtcacataatgttacaaactatacagccaagaagcggcactgcatttactatgaaaaaaggggaaagacttaaagttattgatccagaaggtgaacaagtggccgacctctatgcgttcaatgaacacgataaaaatgagtttatctcttcaggacgaagtttagattacaatgaaagcatccaattcaaaaaaggcagcttgc

SEQ ID NO: 1017 - DNA, 4000 bp, Escherichia coli
  misc_feature (1577)..(1579): n is a, c, g, or t
  misc_feature (1985)..(1985): n is a, c, g, or t
  misc_feature (3242)..(3246): n is a, c, g, or t
  misc_feature (3248)..(3249): n is a, c, g, or t
  misc_feature (3252)..(3253): n is a, c, g, or t
  misc_feature (3255)..(3258): n is a, c, g, or t
  misc_feature (3260)..(3262): n is a, c, g, or t
  misc_feature (3264)..(3264): n is a, c, g, or t
  misc_feature (3267)..(3268): n is a, c, g, or t
  misc_feature (3270)..(3278): n is a, c, g, or t
  misc_feature (3283)..(3291): n is a, c, g, or t
  misc_feature (3294)..(3294): n is a, c, g, or t
  misc_feature (3296)..(3299): n is a, c, g, or t
  misc_feature (3302)..(3305): n is a, c, g, or t
  misc_feature (3308)..(3308): n is a, c, g, or t
  misc_feature (3311)..(3311): n is a, c, g, or t
  misc_feature (3313)..(3319): n is a, c, g, or t
  misc_feature (3322)..(3322): n is a, c, g, or t
  misc_feature (3324)..(3325): n is a, c, g, or t
  misc_feature (3327)..(3331): n is a, c, g, or t
  misc_feature (3335)..(3335): n is a, c, g, or t
  misc_feature (3337)..(3340): n is a, c, g, or t
  misc_feature (3344)..(3345): n is a, c, g, or t
  misc_feature (3347)..(3351): n is a, c, g, or t
  misc_feature (3354)..(3355): n is a, c, g, or t
  misc_feature (3357)..(3361): n is a, c, g, or t
  misc_feature (3363)..(3366): n is a, c, g, or t
  misc_feature (3368)..(3368): n is a, c, g, or t
  misc_feature (3373)..(3384): n is a, c, g, or t
  misc_feature (3386)..(3386): n is a, c, g, or t
  misc_feature (3389)..(3390): n is a, c, g, or t
  misc_feature (3392)..(3396): n is a, c, g, or t
  misc_feature (3398)..(3404): n is a, c, g, or t
  misc_feature (3407)..(3411): n is a, c, g, or t
  misc_feature (3413)..(3419): n is a, c, g, or t
  misc_feature (3421)..(3428): n is a, c, g, or t
  misc_feature (3431)..(3433): n is a, c, g, or t
  misc_feature (3435)..(3441): n is a, c, g, or t
  misc_feature (3444)..(3448): n is a, c, g, or t
  misc_feature (3450)..(3456): n is a, c, g, or t
  misc_feature (3458)..(3458): n is a, c, g, or t
  misc_feature (3461)..(3467): n is a, c, g, or t
  misc_feature (3469)..(3469): n is a, c, g, or t
  misc_feature (3472)..(3472): n is a, c, g, or t
  misc_feature (3475)..(3476): n is a, c, g, or t
  misc_feature (3478)..(3480): n is a, c, g, or t
  misc_feature (3482)..(3484): n is a, c, g, or t
  misc_feature (3486)..(3486): n is a, c, g, or t
  misc_feature (3488)..(3496): n is a, c, g, or t
  misc_feature (3498)..(3505): n is a, c, g, or t
  misc_feature (3507)..(3517): n is a, c, g, or t
  misc_feature (3519)..(3520): n is a, c, g, or t
  misc_feature (3522)..(3526): n is a, c, g, or t
  misc_feature (3528)..(3528): n is a, c, g, or t
  misc_feature (3534)..(3543): n is a, c, g, or t
  misc_feature (3545)..(3546): n is a, c, g, or t
  misc_feature (3550)..(3550): n is a, c, g, or t
  misc_feature (3554)..(3556): n is a, c, g, or t
  misc_feature (3558)..(3561): n is a, c, g, or t
  misc_feature (3564)..(3573): n is a, c, g, or t
  misc_feature (3575)..(3575): n is a, c, g, or t
  misc_feature (3578)..(3581): n is a, c, g, or t
  misc_feature (3583)..(3597): n is a, c, g, or t
  misc_feature (3599)..(3605): n is a, c, g, or t
  misc_feature (3607)..(3607): n is a, c, g, or t
  misc_feature (3609)..(3611): n is a, c, g, or t
  misc_feature (3615)..(3616): n is a, c, g, or t
  misc_feature (3618)..(3618): n is a, c, g, or t
  misc_feature (3620)..(3621): n is a, c, g, or t
  misc_feature (3623)..(3626): n is a, c, g, or t
  misc_feature (3628)..(3636): n is a, c, g, or t
  misc_feature (3638)..(3643): n is a, c, g, or t
  misc_feature (3645)..(3652): n is a, c, g, or t
  misc_feature (3654)..(3661): n is a, c, g, or t
  misc_feature (3663)..(3665): n is a, c, g, or t
  misc_feature (3667)..(3668): n is a, c, g, or t
  misc_feature (3672)..(3676): n is a, c, g, or t
  misc_feature (3678)..(3684): n is a, c, g, or t
  misc_feature (3686)..(3688): n is a, c, g, or t
  misc_feature (3691)..(3695): n is a, c, g, or t
  misc_feature (3700)..(3701): n is a, c, g, or t
  misc_feature (3703)..(3710): n is a, c, g, or t
  misc_feature (3712)..(3712): n is a, c, g, or t
  misc_feature (3716)..(3716): n is a, c, g, or t
  misc_feature (3718)..(3722): n is a, c, g, or t
  misc_feature (3724)..(3732): n is a, c, g, or t
  misc_feature (3734)..(3736): n is a, c, g, or t
  misc_feature (3739)..(3739): n is a, c, g, or t
  misc_feature (3741)..(3743): n is a, c, g, or t
  misc_feature (3746)..(3762): n is a, c, g, or t
  misc_feature (3765)..(3769): n is a, c, g, or t
  misc_feature (3772)..(3778): n is a, c, g, or t
  misc_feature (3781)..(3781): n is a, c, g, or t
  misc_feature (3783)..(3801): n is a, c, g, or t
  misc_feature (3803)..(3803): n is a, c, g, or t
  misc_feature (3806)..(3811): n is a, c, g, or t
  misc_feature (3813)..(3815): n is a, c, g, or t
  misc_feature (3817)..(3819): n is a, c, g, or t
  misc_feature (3822)..(3822): n is a, c, g, or t
  misc_feature (3824)..(3824): n is a, c, g, or t
  misc_feature (3826)..(3827): n is a, c, g, or t
  misc_feature (3830)..(3831): n is a, c, g, or t
  misc_feature (3836)..(3843): n is a, c, g, or t
  misc_feature (3846)..(3846): n is a, c, g, or t
  misc_feature (3848)..(3848): n is a, c, g, or t
  misc_feature (3850)..(3851): n is a, c, g, or t
  misc_feature (3853)..(3861): n is a, c, g, or t
  misc_feature (3863)..(3873): n is a, c, g, or t
  misc_feature (3877)..(3885): n is a, c, g, or t
  misc_feature (3888)..(3891): n is a, c, g, or t
  misc_feature (3893)..(3893): n is a, c, g, or t
  misc_feature (3895)..(3897): n is a, c, g, or t
  misc_feature (3899)..(3899): n is a, c, g, or t
  misc_feature (3901)..(3905): n is a, c, g, or t
  misc_feature (3907)..(3908): n is a, c, g, or t
  misc_feature (3910)..(3912): n is a, c, g, or t
  misc_feature (3915)..(3925): n is a, c, g, or t
  misc_feature (3927)..(3936): n is a, c, g, or t
  misc_feature (3938)..(3940): n is a, c, g, or t
  misc_feature (3943)..(3943): n is a, c, g, or t
  misc_feature (3945)..(3950): n is a, c, g, or t
  misc_feature (3952)..(3957): n is a, c, g, or t
  misc_feature (3960)..(3960): n is a, c, g, or t
  misc_feature (3963)..(3968): n is a, c, g, or t
  misc_feature (3970)..(3974): n is a, c, g, or t
  misc_feature (3976)..(3977): n is a, c, g, or t
  misc_feature (3979)..(3981): n is a, c, g, or t
  misc_feature (3983)..(3990): n is a, c, g, or t
  misc_feature (3993)..(3993): n is a, c, g, or t
  misc_feature (3995)..(4000): n is a, c, g, or t
ttcctcacgacgtccggccgtggcgcataaacgtgctgttggacgaagagggattcaaagatgagtgtcgccgatgggacgtcaacgagcttgtttttggcgatatttggaaaatttaccaaccgctgatgcgcgcagattttcacttgtttgacaaatacgatcacgtacacgatgggaaggagaactttacatggcctctgaccgtgtttcacggcgagagcgatcggatgatcacgcgcgagatgtgtcaaggctgggaaacgcacacgacgggcgagttcgagctgctcgcgatccccggtcatcacttgttcccgcttcaaaaagatcaaaaggcgatgtggcttcgaaaaatcgccgaaagacttcagaacgtcgtcgcgcgcaccgcggcgtaatcactcgggtgcattcgagtcgcgaacggttgtcattgatgatgttttgtgttcacatcgctattctctatcgattctaccgactacgcgcctcccgcagctttgcgtttccgctcgagatacctcgctcgcgcgtcgctcacgtcggcttctgtgttcctcctcgcattcgagtcaacttttaccggtggcggcgtctcgacggcgatggctcccgctgctttcgttggcctctccaccagcgtcacgtcggacgggatcggaggtatcgccggcgtctccgccgcccgcgcgatgagttcacgatcgcgatcggccgcgctcgtgagcttaggcgccgtcgtcgcgtttgatggcttcgttgcatcgggttcgggcgcggctcgccgcgtgtctctcgctgcatcgccgcccatggctgaattcctatgcatgaggttggagtaaaacgaagtcatcgcaccggcgccacgctttgtgacatcttcctcttcctccactgcatcgcgcgccttgtcttccgccaaccacttcgcgtcttcctgtagcttggctctatacgccgccgtcacaaacttgtccttatccgcatacaagtgatcctccttcaatctttccttcaacagtcgtctctcgtacgacgcgtcgtcctccttcttcctcgcctccgccttggctatcaaatctcctatatacctcgactgtcgctccacgcgttcgctcgccagctccttcgccttcgcacctcgtgactttgcgatatcatcgaacaccgcgtcgtactcaaacgcgttcgcgtcttccttcaacgcctcgctcgtcgtcgtcgccgctctcgccgcgtctcgtctcgccttgagcgccatcgcctcttgttgtcgcttcacctccgcgttcgcccgctcccgcgccttgacgggatcgtcatcatcaccttcatcgctgtcggaatcgcacgcgaacgccgccaacgccggtctcggcgcgggtttcccgcccgacgtccctcgcggtttcttctttggaagatttaacccgtacgccagcgtcgcgtgcgacgacgcgtcgtcgcgcgcgttcgacatcgagatcttccttccttcctgccaccttccgcgtcgtcgtcgccgtcgcctcgcgatcgtcgccgtcgccgtcgtcgcctcgcggtcgtcnnngtcgccgccgtcgtggtgtggggacgtcgcgacgggtccgaacgaagccaacgccgacggggtcgagatggcgtcgtcgcgcgaggacgacgacggacgagcgacgcgatgggagacgcgacgggagacgattttcttcggacttcgggcttcggacttcgccgtcggcgtcgaccgcgcgcgcgcgcgtcgcgcgtctcgcgaacgacgatcgcgtcttcaacgactcgaaacgtcattcgttcgttcgttcgttcgttcgttcgttcgttcgttcgttcgcgcgcgcgcgcgtttccgcgacgtcgcggacgcgcgccatcggcgacgtcgcggacgcgcgccgtcgtcgtcgatcgcggtcggtcgcggatgcgcgtcgacgtcgtcgcccgtcgacgacggncgcgtcctagggttgtgcgcccggtaccgggcgcgacgccccgcggcgtttcgcgtggaggtcgggaggtcagtcgacgacgcgcggtggcggcgcgacggtggactcgagacgaatcgaacgtcgaacgaacgacgcgcatcgaatcgacccgacgcgacgtcgcgcgcgacgaggcgagacgcggccgacgccgccgacgccgccgacgacgaatcgcattcgcggagattgtgaatcgcggagattgtgaatcgcgtggcgcgagacgaacgatatgggtgcgtgtgcgtcgatgctgtgcgatgcaccgccggagggaggagaagtgtcgcgattggcggatacactcgtgcgtctgggggcggagcggaggacggtgaacggtgcgctgcggttattctggcgcgctgataaagacgggagcgggacgctcgggttgaaggaattcgcagagacgtttgcgttgcgcacgcggaacgcgtttttaccgcgtatgatatcgcttttcgacgtcggaggcgacggggacatcggggcgttggagtttgtcatgtgcatggcgcagtttcacgaaagaagcgcgtcggcgcacatatatttcgcttggcgactgttcgaccaagacgactcgggttcgatgacgatggaggagtttgaaaccatcataaacaactcgatgagctacacgggatcgaatgaaggtttcagcggtggatcacatgatcatatgggggaccgcatcgttagagctggccgcaacggggcacgagtgcgggtgaaaggcatgagacaaatcatcaaacaagccgacttggacaacaacggcgtgatcacaatcgacgagtttaaggttctttgcgcgaatagctcgcatatcgccgcgccggctttcgagctgtggagtgcagtcgaggcacaatcgaaaccttgttggaaactgaaggaagagctcaaggcgaaaggcaagcttgaagcagtactagagatgctcagcccagcggcgagaaaagcgttgggagtgaaacgcaaaacggacgtggatcgcaaagataggcgtcacggtgcagcacgccggacgatggggaacaacagaagaaagccagaacgaaagatacccggtgacctcgcgttcatggactccgtgaaaataaaaaatgaagacgacgctgcgcgcggtgagcggcagtcgggcgagcggcgcgcgggcgcgcgagaacatcgagatcaccgcgaacgcagtcatcgacatcaccnnnnncnnagnnannnncnnnancanngnnnnnnnnncgatnnnnnnnnncgngnnnntcnnnntgntcncnnnnnnnatnanncnnnnngtcncnnnnatcnncnnnnnganngnnnnnannnncnaccgnnnnnnnnnnnntncgnncnnnnncnnnnnnncgnnnnngnnnnnnncnnnnnnnncgnnngnnnnnnnggnnnnnannnnnnncngtnnnnnnnanacnaanngnnncnnncncnnnnnnnnnannnnnnnngnnnnnnnnnnngnnannnnngnggcggnnnnnnnnnncnnccgngcgnnngnnnnccnnnnnnnnnngncgnnnncnnnnnnnnnnnnnnngnnnnnnncnannncganntntnngnnnngnnnnnnnnngnnnnnnannnnnnnngnnnnnnnntnnntnntatnnnnngnnnnnnnannnttnnnnncatcnntnnnnnnnntnttcncnnnnncnnnnnnnnngnnnttngnnntcnnnnnnnnnnnnnnnnntgnnnnnaannnnnnngcncnnnnnnnnnnnnnnnnnnngncgnnnnnncnnncnnngcncncnncgnngcgcnnnnnnnngcncncnncnnnnnnnnntnnnnnnnnnnngacnnnnnnnnnttnnnncncnnngncnnnnnanncnnncgnnnnnnnnnnngnnnnnnnnnncnnnggngnnnnnngnnnnnncgncannnnnncnnnnngnnannncnnnnnnnntangnnnnnn

SEQ ID NO: 1018 - DNA, 4000 bp, Escherichia coli
  misc_feature (23)..(23): n is a, c, g, or t
  misc_feature (201)..(202): n is a, c, g, or t
  misc_feature (207)..(208): n is a, c, g, or t
  misc_feature (563)..(563): n is a, c, g, or t
  misc_feature (565)..(565): n is a, c, g, or t
  misc_feature (587)..(587): n is a, c, g, or t
  misc_feature (608)..(608): n is a, c, g, or t
  misc_feature (1978)..(1978): n is a, c, g, or t
  misc_feature (1981)..(1981): n is a, c, g, or t
  misc_feature (1988)..(1988): n is a, c, g, or t
  misc_feature (2163)..(2163): n is a, c, g, or t
  misc_feature (2168)..(2168): n is a, c, g, or t
  misc_feature (2170)..(2170): n is a, c, g, or t
  misc_feature (2177)..(2177): n is a, c, g, or t
  misc_feature (3805)..(3805): n is a, c, g, or t
ctcctttttcaggttcagatcantctccaccttcagcggcggcttcaccgccgccttcaaacttcaaagcttcatacattgttttttgaacgggcggcagatagttcatcaagtcgttttcaataaaatccggacgctgtccgccctcaatgtaaagcacgccgtcacggatcatttccatcaaaactttttcctcacccnnatagnnttcaagcttctttttggctggagcaaaaatagtattcgcaaaaagggatccataaaaggtggtaatcaaagccacagccattgcagggccaatagcggaaggatcatcaaggttctggagaagaagtaccagtccaaccagcgttccaagcattccccaggcagggcagagagaagccattgttccaaccacagcaatttcattatccttgccggacattgtatattttacttcgtgagccatcatgttcactattgcctcccggtcagcacggtccaccaccagtcttaatcctccgcgcaggaaaaggttttcgacgctgggcagtgcgtcttcaattgccagaatatttttncnggcaattttagaaacgtcaatnatcaaggtcagcgtttctacnagttgaaccgaattcggcttccatgacttaccgatatatcccaaaaaacccttcgcatctcccatcgggtgagaaataaaggtcgaggcgattgttcctccaaaaacgatcattaatgaaggtgtgtccaagaaatatattacgtttccggcattgactgagagagtggcaaaatcaaaagtcatggcaaacaacaacataaaccatgctaaaatagtcccaattagcgtaccctgttccataaaaagttttctacagatgtttatgaaatgaggttttaaagcctcaaaaattaattatttaaatagttatttttgtaacacgctttaggattagcaataactgtgaaaattcaaacagttgatctgaattaattgtggaacattatatgatcaccaccgaaaaatcctggtttaacaaaaagtggaaaaatttttctgcatctttgcatgccagttaagaaatcaataaacgcaaataaattttcaattattatagacgcagattgttgtttttacaggattttatttaatattatggaaggattatcgatacaggactttattaagaatgcagcaccattcactcatcaaagttaaacaagcgctgtgcgtttgctgtggtttgttgtgctaattcctccagggaaatttttctcaacttagcaataaaaccggcaatggcgggaatgtgtgccggtttgttgggttttccacgaaagggaattggggcaagaaagggtgagtctgtttccagaagtaaatgctcaagtggaagccaacgcaccacttctcgtaaatcttcggcattcttaaaagttactattccattaatgcccagataccatcccatatccacaagtatttttgccatttcaattgaactggtgaaactgtgtgccacaccaagagatggtaccggaaactcctgcagaatactcagggtatcggtttctgcttcccggctgtgcaggataactgggagattgagctcaactgccagttgaagctgttttcggaacgcctgttgctggatctcagcaggactgttcatataatgataatcaagtccagtttcgccaattgcaatcagtttatgctgttcttcggcaagttgccgaattttttgtaatagcgactttgtaagttttgaagcatcatgcggatgaaaaccaacacttccgtaaactgcaggaaattcctgtactgtacttgagacgaaatccagagatggctcatctacagcaatagtaaccatccgttgaacacctgcctgttttgcttcaataattgcttcttccggagttgattccaggatgtcaaggtggcagtgagtatcaataaaacttgtcatagagtgtgtaaatgggntanatttgtngtgataataattttaagaatttgcttgctgtttgtaatgtcgaagccgtcagttttgactctgaactcacagcagaaatccgtctgctgctctgcaacctttcaaaattttggcaaatgatcaacttaaaattcagctttaatcctgcgtccatcttatcattgctgattgcttncgtantntcggttntgctttccggctgttataccgtacgtgtttatcacgatacagacatgctgcgtgaaaagcacgatggggaaatttccagcgtcagtatgctattcacagacagccaaatcggcggcccggcaaaaattagttcagcctgtcccggaggtgcttcacttatcgaaatagagcaaactgtttcagacggtctggtgcattatctgagccttggattctacagtccgcaaaccattcgcgtctggtgcaaacgaagaaaaaggtaaaatgatgaaacaagaatggatccgcttatgtcaacgtgttgattatcaattcaaaaaaccggaaattctccgccaagcactgacgcataaatcttatctgccagtggatttagatgaaaaatttagtaataacgaaaggattgagtttcttggtgatgcagtcctggacctggtgatcagtgaaatgctgatggaagggtttccggaactcgatgagggaggactctcaaaattccgggcaagcctggtcagtgaatccggactcagcaaacaggccgtgaccctggaattaggcgaatgtttgttacttggcaggggtgaagaaatgacaggagggcgaaagaaaaaatctttgctggctgacacctttgaagcagttatggcagctatctaccttgacagccgtgaagaacacggactctcccaaatcaccagagtaattcgcaaaatttttcttccacatttgccgcaagatgcagagggttatattacacgagattataagtcagaactgcaggaacacgtacagaaaataatgggaattccctcgacatatgaactggttgaagaatctggtcctgatcatgaaaaggaatttacgatggcagtttatgtcaaagaaaaagaatacggacgagggcgcggtgccagcaaaaaactagccagtcagcttgctgcagaaaaagctttattgaggatacaagaggacacttcttttcttcaaacagaaggtaccagctgatgcaaaattttcattcagcagagcctgtacggatccaaaaagttattgcccaggccggaattgcgtcaagacgtgctgcagaaaaattaattttggccggcgaagtgaggctgaatggtgaaactgtcctgaagatgggacagaaaatgctcgttggaaaagaccacttgagcgtggaaggacggcgggtaaaattaccgcagcgtcaaaaaacgcaggtatatgctctttacaagcctaaaaattgcatcacgaccctcaacgatcctgagggacgcaccacaatcagtgacttttttcctcgaacttcagccaggctttttcctgtaggacggcttgattatgatgcagaaggcttgattttactgaccaacgacggtgaattggcccagcagctgatgcatccccggcacaaggtttggaaaggttattttgttaaggtacgtggtatcgttgagaatgcagctctgtcaactttgcggaaaggaccggtgattgaaaaacgcaggcaccagcctgtacgggtaaaaattctgcatactgtaaacgataaaacatggcttgaggtctttctcagggaaggaacaaaccggcaaatcaaaaaaatgctccaagacttaggntatccggtgcaaaaaattaagcgcttccaggttggaacggtttctttaggtgacttgcagtccggcgaaagcagagctttgagtccggaggaaatgaaacaattaatgaattaagtccgaaagtcaacaccaccctccactcaagacccaacattctacactcaaacaatggccaaggctgaattatataaaatt

SEQ ID NO: 1019 - DNA, 4000 bp, Escherichia coli
  misc_feature (1229)..(1229): n is a, c, g, or t
  misc_feature (1283)..(1283): n is a, c, g, or t
  misc_feature (1534)..(1534): n is a, c, g, or t
  misc_feature (1970)..(1985): n is a, c, g, or t
  misc_feature (1987)..(1999): n is a, c, g, or t
  misc_feature (2047)..(2076): n is a, c, g, or t
  misc_feature (2124)..(2126): n is a, c, g, or t
  misc_feature (2128)..(2135): n is a, c, g, or t
  misc_feature (2137)..(2137): n is a, c, g, or t
  misc_feature (2139)..(2139): n is a, c, g, or t
  misc_feature (2141)..(2143): n is a, c, g, or t
  misc_feature (2146)..(2153): n is a, c, g, or t
  misc_feature (2155)..(2155): n is a, c, g, or t
  misc_feature (2201)..(2201): n is a, c, g, or t
  misc_feature (2204)..(2204): n is a, c, g, or t
  misc_feature (2206)..(2207): n is a, c, g, or t
  misc_feature (2210)..(2211): n is a, c, g, or t
  misc_feature (2214)..(2234): n is a, c, g, or t
  misc_feature (2237)..(2237): n is a, c, g, or t
  misc_feature (2239)..(2239): n is a, c, g, or t
  misc_feature (2241)..(2242): n is a, c, g, or t
  misc_feature (2244)..(2247): n is a, c, g, or t
  misc_feature (2250)..(2256): n is a, c, g, or t
  misc_feature (2258)..(2258): n is a, c, g, or t
  misc_feature (2261)..(2262): n is a, c, g, or t
  misc_feature (2265)..(2267): n is a, c, g, or t
  misc_feature (2270)..(2274): n is a, c, g, or t
  misc_feature (2276)..(2276): n is a, c, g, or t
  misc_feature (2278)..(2295): n is a, c, g, or t
  misc_feature (2297)..(2301): n is a, c, g, or t
  misc_feature (2303)..(2305): n is a, c, g, or t
  misc_feature (2307)..(2309): n is a, c, g, or t
  misc_feature (2311)..(2311): n is a, c, g, or t
  misc_feature (2314)..(2314): n is a, c, g, or t
  misc_feature (2316)..(2316): n is a, c, g, or t
  misc_feature (2318)..(2319): n is a, c, g, or t
  misc_feature (2321)..(2324): n is a, c, g, or t
  misc_feature (2328)..(2328): n is a, c, g, or t
  misc_feature (2330)..(2333): n is a, c, g, or t
  misc_feature (2335)..(2335): n is a, c, g, or t
  misc_feature (2338)..(2338): n is a, c, g, or t
  misc_feature (2342)..(2344): n is a, c, g, or t
  misc_feature (2347)..(2348): n is a, c, g, or t
  misc_feature (2351)..(2351): n is a, c, g, or t
  misc_feature (2353)..(2366): n is a, c, g, or t
  misc_feature (2368)..(2387): n is a, c, g, or t
  misc_feature (2392)..(2395): n is a, c, g, or t
  misc_feature (2397)..(2400): n is a, c, g, or t
  misc_feature (2405)..(2409): n is a, c, g, or t
  misc_feature (2411)..(2411): n is a, c, g, or t
  misc_feature (2414)..(2415): n is a, c, g, or t
  misc_feature (2419)..(2419): n is a, c, g, or t
  misc_feature (2421)..(2421): n is a, c, g, or t
  misc_feature (2423)..(2426): n is a, c, g, or t
  misc_feature (2429)..(2449): n is a, c, g, or t
  misc_feature (2451)..(2455): n is a, c, g, or t
  misc_feature (2457)..(2463): n is a, c, g, or t
  misc_feature (2467)..(2477): n is a, c, g, or t
  misc_feature (2481)..(2487): n is a, c, g, or t
  misc_feature (2491)..(2491): n is a, c, g, or t
  misc_feature (2494)..(2495): n is a, c, g, or t
  misc_feature (2498)..(2498): n is a, c, g, or t
  misc_feature (2500)..(2503): n is a, c, g, or t
  misc_feature (2506)..(2524): n is a, c, g, or t
  misc_feature (2526)..(2534): n is a, c, g, or t
  misc_feature (2536)..(2541): n is a, c, g, or t
  misc_feature (2543)..(2553): n is a, c, g, or t
  misc_feature (2555)..(2556): n is a, c, g, or t
  misc_feature (2558)..(2565): n is a, c, g, or t
  misc_feature (2567)..(2568): n is a, c, g, or t
  misc_feature (2570)..(2572): n is a, c, g, or t
  misc_feature (2576)..(2579): n is a, c, g, or t
  misc_feature (2581)..(2608): n is a, c, g, or t
  misc_feature (2610)..(2628): n is a, c, g, or t
  misc_feature (2631)..(2632): n is a, c, g, or t
  misc_feature (2634)..(2649): n is a, c, g, or t
  misc_feature (2652)..(2653): n is a, c, g, or t
  misc_feature (2655)..(2674): n is a, c, g, or t
  misc_feature (2676)..(2697): n is a, c, g, or t
  misc_feature (2699)..(2705): n is a, c, g, or t
  misc_feature (2707)..(2709): n is a, c, g, or t
  misc_feature (2711)..(2714): n is a, c, g, or t
  misc_feature (2718)..(2721): n is a, c, g, or t
  misc_feature (2723)..(2726): n is a, c, g, or t
  misc_feature (2729)..(2730): n is a, c, g, or t
  misc_feature (2732)..(2751): n is a, c, g, or t
  misc_feature (2753)..(2781): n is a, c, g, or t
  misc_feature (2784)..(2792): n is a, c, g, or t
  misc_feature (2795)..(2806): n is a, c, g, or t
  misc_feature (2808)..(2838): n is a, c, g, or t
  misc_feature (2840)..(2850): n is a, c, g, or t
  misc_feature (2852)..(2854): n is a, c, g, or t
  misc_feature (2857)..(2862): n is a, c, g, or t
  misc_feature (2864)..(2877): n is a, c, g, or t
  misc_feature (2879)..(2881): n is a, c, g, or t
  misc_feature (2883)..(2883): n is a, c, g, or t
  misc_feature (2885)..(2917): n is a, c, g, or t
  misc_feature (2919)..(2929): n is a, c, g, or t
  misc_feature (2932)..(2954): n is a, c, g, or t
  misc_feature (2956)..(2958): n is a, c, g, or t
  misc_feature (2960)..(2961): n is a, c, g, or t
  misc_feature (2963)..(2978): n is a, c, g, or t
  misc_feature (2980)..(2981): n is a, c, g, or t
  misc_feature (2983)..(2989): n is a, c, g, or t
  misc_feature (2991)..(2994): n is a, c, g, or t
  misc_feature (2996)..(3011): n is a, c, g, or t
  misc_feature (3013)..(3018): n is a, c, g, or t
  misc_feature (3020)..(3040): n is a, c, g, or t
  misc_feature (3043)..(3117): n is a, c, g, or t
  misc_feature (3119)..(3132): n is a, c, g, or t
  misc_feature (3134)..(3145): n is a, c, g, or t
  misc_feature (3147)..(3170): n is a, c, g, or t
  misc_feature (3172)..(3172): n is a, c, g, or t
  misc_feature (3174)..(3184): n is a, c, g, or t
  misc_feature (3186)..(3195): n is a, c, g, or t
  misc_feature (3197)..(3203): n is a, c, g, or t
  misc_feature (3205)..(3207): n is a, c, g, or t
  misc_feature (3209)..(3209): n is a, c, g, or t
  misc_feature (3211)..(3229): n is a, c, g, or t
  misc_feature (3231)..(3240): n is a, c, g, or t
  misc_feature (3242)..(3242): n is a, c, g, or t
  misc_feature (3244)..(3244): n is a, c, g, or t
  misc_feature (3246)..(3248): n is a, c, g, or t
  misc_feature (3250)..(3250): n is a, c, g, or t
  misc_feature (3252)..(3252): n is a, c, g, or t
  misc_feature (3254)..(3254): n is a, c, g, or t
  misc_feature (3256)..(3256): n is a, c, g, or t
  misc_feature (3258)..(3280): n is a, c, g, or t
  misc_feature (3282)..(3282): n is a, c, g, or t
  misc_feature (3285)..(3285): n is a, c, g, or t
  misc_feature (3288)..(3293): n is a, c, g, or t
  misc_feature (3295)..(3296): n is a, c, g, or t
  misc_feature (3298)..(3299): n is a, c, g, or t
  misc_feature (3301)..(3312): n is a, c, g, or t
  misc_feature (3315)..(3321): n is a, c, g, or t
  misc_feature (3324)..(3328): n is a, c, g, or t
  misc_feature (3330)..(3330): n is a, c, g, or t
  misc_feature (3333)..(3333): n is a, c, g, or t
  misc_feature (3336)..(3336): n is a, c, g, or t
  misc_feature (3338)..(3340): n is a, c, g, or t
  misc_feature (3342)..(3344): n is a, c, g, or t
  misc_feature (3346)..(3350): n is a, c, g, or t
  misc_feature (3352)..(3354): n is a, c, g, or t
  misc_feature (3356)..(3357): n is a, c, g, or t
  misc_feature (3359)..(3360): n is a, c, g, or t
  misc_feature (3362)..(3362): n is a, c, g, or t
  misc_feature (3364)..(3376): n is a, c, g, or t
  misc_feature (3379)..(3387): n is a, c, g, or t
  misc_feature (3389)..(3389): n is a, c, g, or t
  misc_feature (3391)..(3392): n is a, c, g, or t
  misc_feature (3396)..(3397): n is a, c, g, or t
  misc_feature (3399)..(3403): n is a, c, g, or t
  misc_feature (3405)..(3408): n is a, c, g, or t
  misc_feature (3411)..(3411): n is a, c, g, or t
  misc_feature (3413)..(3417): n is a, c, g, or t
  misc_feature (3419)..(3426): n is a, c, g, or t
  misc_feature (3428)..(3435): n is a, c, g, or t
  misc_feature (3439)..(3448): n is a, c, g, or t
  misc_feature (3450)..(3451): n is a, c, g, or t
  misc_feature (3453)..(3454): n is a, c, g, or t
  misc_feature (3456)..(3457): n is a, c, g, or t
  misc_feature (3459)..(3459): n is a, c, g, or t
  misc_feature (3461)..(3470): n is a, c, g, or t
  misc_feature (3472)..(3474): n is a, c, g, or t
  misc_feature (3476)..(3477): n is a, c, g, or t
  misc_feature (3479)..(3480): n is a, c, g, or t
  misc_feature (3482)..(3484): n is a, c, g, or t
  misc_feature (3486)..(3490): n is a, c, g, or t
  misc_feature (3492)..(3492): n is a, c, g, or t
  misc_feature (3496)..(3496): n is a, c, g, or t
  misc_feature (3498)..(3498): n is a, c, g, or t
  misc_feature (3501)..(3509): n is a, c, g, or t
  misc_feature (3511)..(3511): n is a, c, g, or t
  misc_feature (3513)..(3514): n is a, c, g, or t
  misc_feature (3516)..(3520): n is a, c, g, or t
  misc_feature (3522)..(3523): n is a, c, g, or t
  misc_feature (3525)..(3527): n is a, c, g, or t
  misc_feature (3529)..(3536): n is a, c, g, or t
  misc_feature (3538)..(3539): n is a, c, g, or t
  misc_feature (3541)..(3581): n is a, c, g, or t
  misc_feature (3583)..(3585): n is a, c, g, or t
  misc_feature (3587)..(3589): n is a, c, g, or t
  misc_feature (3591)..(3600): n is a, c, g, or t
  misc_feature (3602)..(3603): n is a, c, g, or t
  misc_feature (3605)..(3616): n is a, c, g, or t
  misc_feature (3618)..(3620): n is a, c, g, or t
  misc_feature (3622)..(3624): n is a, c, g, or t
  misc_feature (3627)..(3631): n is a, c, g, or t
  misc_feature (3633)..(3650): n is a, c, g, or t
  misc_feature (3652)..(3679): n is a, c, g, or t
  misc_feature (3681)..(3700): n is a, c, g, or t
  misc_feature (3702)..(3703): n is a, c, g, or t
  misc_feature (3705)..(3705): n is a, c, g, or t
  misc_feature (3707)..(3713): n is a, c, g, or t
  misc_feature (3715)..(3756): n is a, c, g, or t
  misc_feature (3758)..(3771): n is a, c, g, or t
  misc_feature (3773)..(3776): n is a, c, g, or t
  misc_feature (3778)..(3779): n is a, c, g, or t
  misc_feature (3782)..(3794): n is a, c, g, or t
  misc_feature (3796)..(3799): n is a, c, g, or t
  misc_feature (3801)..(3802): n is a, c, g, or t
  misc_feature (3804)..(3814): n is a, c, g, or t
  misc_feature (3816)..(3841): n is a, c, g, or t
  misc_feature (3843)..(3867): n is a, c, g, or t
  misc_feature (3869)..(3872): n is a, c, g, or t
  misc_feature (3874)..(3883): n is a, c, g, or t
  misc_feature (3885)..(3916): n is a, c, g, or t
  misc_feature (3919)..(3921): n is a, c, g, or t
  misc_feature (3923)..(3935): n is a, c, g, or t
  misc_feature (3937)..(3937): n is a, c, g, or t
  misc_feature (3939)..(3944): n is a, c, g, or t
  misc_feature (3946)..(3947): n is a, c, g, or t
  misc_feature (3949)..(3951): n is a, c, g, or t
  misc_feature (3953)..(3964): n is a, c, g, or t
  misc_feature (3966)..(3968): n is a, c, g, or t
  misc_feature (3970)..(3973): n is a, c, g, or t
  misc_feature (3975)..(3977): n is a, c, g, or t
  misc_feature (3979)..(3987): n is a, c, g, or t
  misc_feature (3989)..(3992): n is a, c, g, or t
  misc_feature (3994)..(4000): n is a, c, g, or t
aaaaggaaccaacctgttctttgctatctatgaaacagaagagattgataaggatacgaaaaaagtaatccgtaaaagaagttatagcacgattcccttaaatgtagtgatcgaacgccaaaagcagggactttcctcggctcctgaagatgagaatggtaatctacctaaatatatactctctcctaatgatctggtatatgtaccgacacaggaggagattaataagggggaagtcgtaatgccgatagatagggatcgaatatacaaaatggttgactcaagtggcattaccgctaatttcatcccagcttcaacagccaatttgatttttgctttacctaaagctactgcagaaatctattgtaatggtgaaaattgcattcagaatgaatatggtattggtagtcctcaatctaaaaatcaaaaagctataacaggtgaaatggttaaagaaatatgttttcccattaaagttgatagattaggaaatataattcaagtaggttcatgtatactaactaattagattttatcctatgattaagaaaacattttattttggtaatcctgcttacctgtcacttcgtaaccagcaattagttattaagttaccggagatagtaaagaatgatactgtgcccgaaagcttcaaacgacaatcagaaattactaaaccaattgaagatattgcagtgatagttcttgacaacaaacaaattactattacccagggtgtattggaagcattactagagaataattgcgcagttattacatgtgatggacgaagtatgccagtaggcctcatgcttccgctttatggaaacacgacacaaaatgagcgctttcgagatcaattagacgcttccttacctttaaagaaacaactttggcaacagactattcaagcgaaaatcaacaatcaagcatcagtattatgctcttgtaaaaacgaagaaataaaatgtatgcgaatatgggccaatgatgtacgtagtggagatcctgacaatttggaaggacgtgcagctgcttattattggaagtatctgttcggacacatagaaggttttacaagagatcgggaaggtatacctcctaataatttattaaattatggttatgctatccttcgtgctattgttgcacgtggactagtcacaagtggtatgttacccacattgggtattcatcaccataaccgatataatgcttattgtttagcngatgacatcatggaaccttatagaccttatgttgatgagcttgtatttggtttnataagaacaaagggtatatcacccgaaatattaacaaaagaatggaaagcatcacttctttctattcctacattagaagttaagattggaggtaaacgaagtccgttaatgatcgctgtcgctcaaacaacagcctctctttacaaatgtttcagtggagagcaacgaagaatcgtgtatccagaacggtaataatcatggatcgatttagcgaatatcgtattatgtgggtgttggtattatttgacttncctacggaaacaaaaaaagaaaagaaagcttatagtgatttccgtaagaatctgcagcgtgatggctttaccatgtttcagttctctatttatgtgcgacattgcgccagccaagaaaatgcagaagtacacataaaacgagtaaaatcatttttaccagaacacgggcaaataggaataatgtgcattacagacaaacaatttgggaatattgagttgttctatgggaaaaaagtacaacctcctaatacacccggccaacaattagagcttttctagaaataataaatcccgtcataaaacgggatttattacattggaaacttttcttttttattttctaaccattctatcatctagttgatatacagcatataatacagattaagctgtttccaatggatcaaagatactaatttgaaagcaaatcacaacnnnnnnnnnnnnnnnntnnnnnnnnnnnnngctgtttccaatggatcaaagatactaatttgaaagcaaatcacaacnnnnnnnnnnnnnnnnnnnnnnnnnnnnnngctgtttccaatggatcaaagatactaatttgaaagcaaatcacaacnnntnnnnnnnnantncnnnaannnnnnnngntgtttccaatggatcaaagatactaatttgaaagcaaatcacaacntgntnntanngannnnnnnnnnnnnnnnnnnnnttncnanngnnnnaannnnnnnanttnnaannnaannnnnancnnnnnnnnnnnnnnnnnncnnnnnannngnnntnttncnanngnnnnaaanannnnanttnaaannnaanncanannnnnnnnnnnnnngnnnnnnnnnnnnnnnnnnnntttcnnnngnnnnaaaannnnnanttnnaaananannnnaannnnnnnnnnnnnnnnnnnnntnnnnnannnnnnntttnnnnnnnnnnnaaannnnnnntttnaannaanannnnacnnnnnnnnnnnnnnnnnnnannnnnnnnnannnnnntnnnnnnnnnnnannannnnnnnntnnannnaaannnnannnnnnnnnnnnnnnnnnnnnnnnnnnnannnnnnnnnnnnnnnnnnnaannannnnnnnnnnnnnnnnaannannnnnnnnnnnnnnnnnnnnannnnnnnnnnnnnnnnnnnnnnannnnnnnannnannnnaaannnnannnnaannannnnnnnnnnnnnnnnnnnnannnnnnnnnnnnnnnnnnnnnnnnnnnnnaannnnnnnnnaannnnnnnnnnnnannnnnnnnnnnnnnnnnnnnnnnnnnnnnnnannnnnnnnnnntnnnggnnnnnnannnnnnnnnnnnnnannnanannnnnnnnnnnnnnnnnnnnnnnnnnnnnnnnntnnnnnnnnnnnttnnnnnnnnnnnnnnnnnnnnnnnannnanncnnnnnnnnnnnnnnnnannannnnnnnannnnannnnnnnnnnnnnnnntnnnnnnannnnnnnnnnnnnnnnnnnnnttnnnnnnnnnnnnnnnnnnnnnnnnnnnnnnnnnnnnnnnnnnnnnnnnnnnnnnnnnnnnnnnnnnnnnnnnnnntnnnnnnnnnnnnnnannnnnnnnnnnnannnnnnnnnnnnnnnnnnnnnnnnantnnnnnnnnnnncnnnnnnnnnnannnnnnnannnanannnnnnnnnnnnnnnnnnngnnnnnnnnnntntncnnntntncngncnnnnnnnnnnnnnnnnnnnnnnnanaanaannnnnntnnannannnnnnnnnnnnacnnnnnnntannnnntnccnccncnnncnnnannnnncnnncnnannanannnnnnnnnnnnnctnnnnnnnnncncnntatnntnnnnntnnnnccncnnnnnannnnnnnnannnnnnnnaaannnnnnnnnnanncnncnngnannnnnnnnnnannnanncnntnnncnnnnntnccgnanggnnnnnnnnnanannannnnnanntnnntnnnnnnnngnncnnnnnnnnnnnnnnnnnnnnnnnnnnnnnnnnnnnnnnnnngnnnannnannnnnnnnnnanntnnnnnnnnnnnncnnngnnntannnnntnnnnnnnnnnnnnnnnnngnnnnnnnnnnnnnnnnnnnnnnnnnnnntnnnnnnnnnnnnnnnnnnnntnnantnnnnnnncnnnnnnnnnnnnnnnnnnnnnnnnnnnnnnnnnnnnnnnnnntnnnnnnnnnnnnnnannnntnnagnnnnnnnnnnnnncnnnngnntnnnnnnnnnnnannnnnnnnnnnnnnnnnnnnnnnnnnannnnnnnnnnnnnnnnnnnnnnnnngnnnntnnnnnnnnnngnnnnnnnnnnnnnnnnnnnnnnnnnnnnnnnngannnannnnnnnnnnnnntncnnnnnnanncnnngnnnnnnnnnnnngnnngnnnncnnngnnnnnnnnncnnnngnnnnnnn

SEQ ID NO: 1020 - DNA, 4000 bp, Escherichia coli
  misc_feature (1)..(2): n is a, c, g, or t
  misc_feature (4)..(10): n is a, c, g, or t
  misc_feature (14)..(14): n is a, c, g, or t
  misc_feature (16)..(17): n is a, c, g, or t
  misc_feature (20)..(24): n is a, c, g, or t
  misc_feature (27)..(27): n is a, c, g, or t
  misc_feature (29)..(38): n is a, c, g, or t
  misc_feature (40)..(40): n is a, c, g, or t
  misc_feature (42)..(43): n is a, c, g, or t
  misc_feature (47)..(48): n is a, c, g, or t
  misc_feature (50)..(50): n is a, c, g, or t
  misc_feature (52)..(53): n is a, c, g, or t
  misc_feature (55)..(64): n is a, c, g, or t
  misc_feature (67)..(72): n is a, c, g, or t
  misc_feature (76)..(77): n is a, c, g, or t
  misc_feature (79)..(80): n is a, c, g, or t
  misc_feature (82)..(83): n is a, c, g, or t
  misc_feature (85)..(88): n is a, c, g, or t
  misc_feature (90)..(90): n is a, c, g, or t
  misc_feature (94)..(96): n is a, c, g, or t
  misc_feature (99)..(100): n is a, c, g, or t
  misc_feature (104)..(107): n is a, c, g, or t
  misc_feature (109)..(110): n is a, c, g, or t
  misc_feature (112)..(112): n is a, c, g, or t
  misc_feature (115)..(115): n is a, c, g, or t
  misc_feature (117)..(117): n is a, c, g, or t
  misc_feature (120)..(122): n is a, c, g, or t
  misc_feature (124)..(130): n is a, c, g, or t
  misc_feature (132)..(138): n is a, c, g, or t
  misc_feature (140)..(155): n is a, c, g, or t
  misc_feature (157)..(157): n is a, c, g, or t
  misc_feature (160)..(167): n is a, c, g, or t
  misc_feature (169)..(173): n is a, c, g, or t
  misc_feature (175)..(177): n is a, c, g, or t
  misc_feature (179)..(179): n is a, c, g, or t
  misc_feature (183)..(183): n is a, c, g, or t
  misc_feature (185)..(188): n is a, c, g, or t
  misc_feature (191)..(191): n is a, c, g, or t
  misc_feature (193)..(198): n is a, c, g, or t
  misc_feature (200)..(200): n is a, c, g, or t
  misc_feature (203)..(205): n is a, c, g, or t
  misc_feature (208)..(210): n is a, c, g, or t
  misc_feature (213)..(219): n is a, c, g, or t
  misc_feature (224)..(224): n is a, c, g, or t
  misc_feature (227)..(227): n is a, c, g, or t
  misc_feature (229)..(232): n is a, c, g, or t
  misc_feature (245)..(245): n is a, c, g, or t
  misc_feature (247)..(247): n is a, c, g, or t
  misc_feature (250)..(256): n is a, c, g, or t
  misc_feature (258)..(266): n is a, c, g, or t
  misc_feature (269)..(270): n is a, c, g, or t
  misc_feature (275)..(279): n is a, c, g, or t
  misc_feature (281)..(281): n is a, c, g, or t
  misc_feature (284)..(284): n is a, c, g, or t
  misc_feature (286)..(287): n is a, c, g, or t
  misc_feature (289)..(289): n is a, c, g, or t
  misc_feature (1963)..(1963): n is a, c, g, or t
  misc_feature (1965)..(1965): n is a, c, g, or t
  misc_feature (1980)..(1980): n is a, c, g, or t
  misc_feature (1984)..(1984): n is a, c, g, or t
  misc_feature (1987)..(1987): n is a, c, g, or t
  misc_feature (1991)..(1992): n is a, c, g, or t
  misc_feature (1996)..(1996): n is a, c, g, or t
  misc_feature (2013)..(2013): n is a, c, g, or t
  misc_feature (2016)..(2016): n is a, c, g, or t
  misc_feature (2024)..(2025): n is a, c, g, or t
  misc_feature (2116)..(2116): n is a, c, g, or t
  misc_feature (2130)..(2130): n is a, c, g, or t
  misc_feature (2132)..(2133): n is a, c, g, or t
  misc_feature (2147)..(2147): n is a, c, g, or t
  misc_feature (2197)..(2197): n is a, c, g, or t
  misc_feature (2246)..(2247): n is a, c, g, or t
  misc_feature (2258)..(2258): n is a, c, g, or t
  misc_feature (2336)..(2336): n is a, c, g, or t
  misc_feature (2340)..(2340): n is a, c, g, or t
  misc_feature (2343)..(2343): n is a, c, g, or t
  misc_feature (3069)..(3069): n is a, c, g, or t
  misc_feature (3115)..(3124): n is a, c, g, or t
  misc_feature (3128)..(3130): n is a, c, g, or t
  misc_feature (3462)..(4000): n is a, c, g, or t
nngnnnnnnncgcngnngannnnngangnnnnnnnnnngngnngagnngncnncnnnnnnnnnncgnnnnnngcgnngnngnngnnnncngcgnnncgnngcgnnnngnngnggngnggnnntnnnnnnngnnnnnnngnnnnnnnnnnnnnnnngnggnnnnnnnnannnnngnnntntttntnnnntcntnnnnnnangannngannngannnnnnngcggnggngnnnnacgacgacgacgncntcnnnnnnnannnnnnnnngtnntaatnnnnnanttnanntnaaataaaaagtcagtcactcgcgagagacttctagtagttatagggaattaacagcgcgtggtggacgcgcggcgcgcgaatgatcggcgacgcgcggcgctcattggcccgcgcgctcgtcgcgagcggcggcttcttcagccttcatcttggcgatcttcctcgacatgccgagagttttgacgagcgccggcggggcgttgaccggagcgccgttgttgtcgtcgcagtccttgcagtagcagagcaagatggtgtcgataccgagttcgacgatggacatgaagacgttcgcgatgatgaaggcgaacaagatgacgacgacgacgatgaagagcggggaagaaaccttttcgtcaccgtagttgaacgtgtcggcgtcgagcatcaagaaggcgatcgtaccagagcccaaggcgacgaccagcttgccgaggacgagcatgatgtcgccgacgatgttgactgtggcgacggccgcgacgttcttcaccatgagcgccaaggcgttccaggcagagttgcagaaggacgtgccttcgatggcggtcatgatgtacgcgttgcggttcaaccactcgatcgtcttttgcaagtaccacaagcagtattccacgtagtacccgacgtacttgataatcttgctgtccttggacaactttttcatgcggtgcacgatgaagcgcacgatgagtcgaatgaactgcaacaaggcgacgaagaaagaaccgacggcggcggtaccggtgtggtaccacatcatccttttggtcgaggtgataatcggtttgttcttaaggccgttgtagttaccgcccttgaagtagtactgcacaaagacgcacgcgatgatcaagtagcacatggcgacgatccactgcgagccccagaggaagccaaagacgtagtacgcgagagcgccttgcaagttgcggtcccagacggtcgcgtaaccgcagtggcagtcatcagtcggcgtcgtcgaaggagtggcgcagtacatgtacggcggttcgcccgccgccaaggtgcaatcttgttgcttgacttcacccgccgcgaacaagtagacgaaggtgatgagccagtagacgaagagcaacaccatggcaaaggcgggcaagatcgggaacagagtcaactgcggcatctttccgagagcacccgtggcaaccttgatgacgccgacggcaaccttgacgcgacggagcatcaacaaggtgaagaggaaaatgacgcaggtgagcgccgtcgagatgtacgcgaaaatcttgagcgtgtcttgaccgctctcagccggatcggcgtagttggtgatagaagccgacgcactatcggaaaccttgctcacgtacgcgttgacttgatcggaaccgatgacaccggccttgaggtacaagtaaatggtgaccacgacggcgagcgcgttcaccgagaagagcgtggtgtacgcgaagacgctggtgaagtatcggaggaagaacaagaaggcgatgctcaaaacgatcggacaggcgccaccggcgacgacgacaaccttccaaccagtggtgaagtcatcgatgtagcgttccaccgtggcgagcggaccagagagcgccttgtcgatttcgtcgccgagcaacttggtgtaagtccccaaagtgccggagctgtaaccggtgccgaaaggntngacgtacggagccgnaccnacngtcnngggntcctcgcgttccgcctncgnttctccgnncgaatcgccgtcaccaaagagttggcaagtgtagaacgtgttgacgctctcgtagagcacggggtagcacggccccttccactcgagcgangacgttttttgggngnnatccaagtactggnagtagtcgtagttgtccgtcacccattgattcttgtcgtagttcggttgnaacgtgatagtgacgtcttcggggtaatcgcacacaaacgcaaccgagnnggccgtcattntcggctgcgggcaatccttcaagcaaatgctcttcgcgtcgcgcaagttgtacttacgcgtcgcgctcgccgattgancggngtncacacccgccgcccaagcgagttcgcccgggttcatgaaataccgcgtcttgaacccatcgttcttcccttgatcgcaaacttcgccgcggtaatcggtgccgaagagcaaaatcttcggtttccccgtgccgacgccgtaaaagcccagcacgagcatcgcgatccaaaacgcgatgaaaacgatcagaaacaaaatatccgtgcattttcgcggtcctttcatgtgttgatccaactcatccttatcgctgtgcgtcgaatcgtcgcgcgcgttcgcgtcgtcagtcgcgcgttcgtcgccacctggcgccgcgtctcctcccccctccctccattctcacccatcgcgcgcgtccgcgtccgcgcctcgtccgcgcgcgatcgcgtctccatcgtcctcgcgcgcgtctccatcgccgcgcgtccgatccgcgccgcccgcgcgtccgcgcgcgcgactccccggacgattcgattcacgaatttcgcgacgattctcaacgatcgtcgcctctcgcgcgcctctcgcgcgcctctcgcgcgttcgcgcgcgcgttcgcgcgcatcgcgcgagcgcgcgtcaccgcccgcgccgcacgcgtcgcgcgcacctcatgacgaccgtctcgcgcgtcgcgcgcgtgtgcgggcgcgcgcgacgacgcgcgtcgcccgcggccccgcgcgtgcgcgcgatcacgcattcgagcgccgaaaacgcccntgtaaaacgacgaggcgcgcgcgaacataaacggtcggtcgccgtnnnnnnnnnncgannncgcgcgacgccgaacgcgcatattcgagcgcgaaaaacgcccatgtaaaagtgtaaaacgacgaggcgcgcgtcggcgtcgcgtcggcactcggcgacgcgcgacgacgacggcgcgcgcgatgggcgacggcgacgcgcgcgcgagcgacggcgcgatggacgacgcggtgcgcggcgcgcgcgcgcgatcggtggtgcggtgcgtgcgcgacgcgacgacgacgacgacgacgacgacgacgacgaggcgacgacgacgacgacgatgacgatgcgacgatgatgcgggaattcagccgccgcatttgtcaattgacgatgatgaatcgnnnnnnnnnnnnnnnnnnnnnnnnnnnnnnnnnnnnnnnnnnnnnnnnnnnnnnnnnnnnnnnnnnnnnnnnnnnnnnnnnnnnnnnnnnnnnnnnnnnnnnnnnnnnnnnnnnnnnnnnnnnnnnnnnnnnnnnnnnnnnnnnnnnnnnnnnnnnnnnnnnnnnnnnnnnnnnnnnnnnnnnnnnnnnnnnnnnnnnnnnnnnnnnnnnnnnnnnnnnnnnnnnnnnnnnnnnnnnnnnnnnnnnnnnnnnnnnnnnnnnnnnnnnnnnnnnnnnnnnnnnnnnnnnnnnnnnnnnnnnnnnnnnnnnnnnnnnnnnnnnnnnnnnnnnnnnnnnnnnnnnnnnnnnnnnnnnnnnnnnnnnnnnnnnnnnnnnnnnnnnnnnnnnnnnnnnnnnnnnnnnnnnnnnnnnnnnnnnnnnnnnnnnnnnnnnnnnnnnnnnnnnnnnnnnnnnnnnnnnnnnnnnnnnnnnnnnnnnnnnnnnnnnnnnnnnnnnnnnnnnnnnnnnnnnnnnnnnnnnnnnnnnnnnnnnnnnnnnnn

SEQ ID NO: 1021 - DNA, 4000 bp, Escherichia coli
  misc_feature (22)..(22): n is a, c, g, or t
  misc_feature (79)..(79): n is a, c, g, or t
  misc_feature (121)..(121): n is a, c, g, or t
  misc_feature (181)..(181): n is a, c, g, or t
  misc_feature (208)..(208): n is a, c, g, or t
  misc_feature (352)..(353): n is a, c, g, or t
  misc_feature (424)..(424): n is a, c, g, or t
  misc_feature (559)..(559): n is a, c, g, or t
  misc_feature (562)..(562): n is a, c, g, or t
  misc_feature (646)..(646): n is a, c, g, or t
  misc_feature (704)..(704): n is a, c, g, or t
  misc_feature (855)..(855): n is a, c, g, or t
  misc_feature (921)..(921): n is a, c, g, or t
  misc_feature (1145)..(1145): n is a, c, g, or t
  misc_feature (1712)..(1712): n is a, c, g, or t
  misc_feature (1728)..(1728): n is a, c, g, or t
  misc_feature (2192)..(2192): n is a, c, g, or t
  misc_feature (2600)..(2600): n is a, c, g, or t
  misc_feature (2660)..(2660): n is a, c, g, or t
  misc_feature (2673)..(2673): n is a, c, g, or t
  misc_feature (2747)..(2747): n is a, c, g, or t
  misc_feature (2921)..(2921): n is a, c, g, or t
  misc_feature (2999)..(2999): n is a, c, g, or t
  misc_feature (3015)..(3015): n is a, c, g, or t
  misc_feature (3212)..(3212): n is a, c, g, or t
  misc_feature (3251)..(3251): n is a, c, g, or t
  misc_feature (3260)..(3260): n is a, c, g, or t
  misc_feature (3275)..(3275): n is a, c, g, or t
  misc_feature (3329)..(3329): n is a, c, g, or t
  misc_feature (3395)..(3395): n is a, c, g, or t
  misc_feature (3473)..(3473): n is a, c, g, or t
  misc_feature (3500)..(3500): n is a, c, g, or t
  misc_feature (3587)..(3587): n is a, c, g, or t
  misc_feature (3605)..(3605): n is a, c, g, or t
  misc_feature (3638)..(3639): n is a, c, g, or t
  misc_feature (3644)..(3644): n is a, c, g, or t
  misc_feature (3662)..(3662): n is a, c, g, or t
  misc_feature (3677)..(3677): n is a, c, g, or t
  misc_feature (3702)..(3702): n is a, c, g, or t
  misc_feature (3719)..(3719): n is a, c, g, or t
  misc_feature (3827)..(3827): n is a, c, g, or t
  misc_feature (3830)..(3830): n is a, c, g, or t
  misc_feature (3836)..(3836): n is a, c, g, or t
  misc_feature (3838)..(3839): n is a, c, g, or t
  misc_feature (3842)..(3842): n is a, c, g, or t
  misc_feature (3863)..(3863): n is a, c, g, or t
  misc_feature (3875)..(3875): n is a, c, g, or t
  misc_feature (3908)..(3908): n is a, c, g, or t
  misc_feature (3923)..(3923): n is a, c, g, or t
  misc_feature (3995)..(3995): n is a, c, g, or t
gacccagccgtcattttgagcntattttttaaagaaattatttatatcatttttgcctatcttttcatatctattttcngcagcaaacaaggtatttggatctgaggcgtagtaggagtgnctgtgatcgatctcttttgtatctacgtaaagatcgggactatttgtgattattgctttntggtttagctcttctcttgctatttgnttgtgatttatgacatttgtgctgataaactgcctaagatcaactctagccgtgacgtcacttaaatttgctattttttcatttccgtctttgtcgtatcctcttacttttagcttgtcaaagagcatatctttttgatctagnntgccgtcattattgctatcaaagctaaaaagtgcgctgttgttttctagctttccaacgcctagctcatcnttatcgccataaatgtctaaaaagacttccacttcgccataatttgtctttagagtgtttgagtaggcgtagtcgtttaaatttttaaattttgtattttctaagtagccactttttaagacaggtagcatggcngcntcatctgtggcatttatatttttaaagtaggcgtttttgctaaagccattagaaagttcgtctgagtaaattttgttgttgctntttattaaattttgcgagtaatcttttaaaatttcttctgctttttgtattgctagangtttgttgtattctttgatatcagcctcagttatgtagatggtatctgttttatttgcttcataaagctcgttaaactggcttaaatttacttttgagctattttgatcgccatgatttgaaaatcttttggagagattttgcaaatcatntaaatttataaaatcatacttttgcggtgcaacattcatctaaaatccttttaaagatgttgcaantaatatcggctaaatttataaaatgtttaagcttataatggtgcccgaggtcggactcgaaccgacacaaggttgcccttatcagattttgagtctgacgcgtctaccagtttcaccactcgggctaagttaagattgaaattttagatttgtgagaagaaagaaaaaggggagacttgctccccgaaaaagaaaattatttctttttaccttttttagcagcnccagcagcaactgcttctttaagttttttgccaactttgaatttgactgctttgctagcaggaacgtcgatcactttcttagttccaggaactctagctttccttgcagctctgtcagcagtaccgaaagtaccaaagcctataaagctaattgtatcgcctttttcaagaaccgcttggattgtctccaaagtagcatcaacaacttttagagtatctttttttgaaagaccagccttgtcggcaaccgcttgaataaattcagcttttttcatgaaccatccttttaagaagttatgcggcaattctacactcttttaaaaaaaaatacaatactttttccctaaatttagctctttttttgcatttttttagtaaaaaagaccaaaatttgaactttcactcacaaatttcaaacgtaagctcgttttttagccctatctttttcatatctacaagctttaaattttcaaaatttaaacccattagctcatctttgtttgtcactttagcatttgcgatctggcgcaaaacctcacctctataagcttttgcatggtggcttantatctttttgtttttnaaaaagcaaaatgtcgtaaattctttttttaccacataaaatttctcataaaatttagctctaagatctaaaatttcatcattttctaaaaagctatcgactgccttgctaaaattttgctcataaaatttacaaatatcaaagccagctagcttttcgccttgctttagtttgtactcagctatctcatcttttgctaaaattggcccaaataaatttgaaaatatcaaaacattattatctatatatttttgagcctcatcgcttagtccgcggtagtttaggtgcttataggcaacgccgtcatatcttaagatagcttttatgctaccttttttagatagactttctcgcagttgctcgctatcctcaagctcttttagtccaaaaagcttttttatctcgtctaaatttgcactttttaaaaactcatcatatctttttaaaatttcagcccttttgcnaaaaagctcagaaaatatcaaatttttaccatcaaatttatcatttgtatttagagaaattttgctttcgcttggtgagaagaggatttttaacgccattttctttcctattttatatatgtaaattttggcagattatacaataaaacttttttgcactaaaaaaaatcaaattttcaccgatatatcacaaagcggaattattcttgcttagagtgaataaaaatttagggaaaaattatgagaattacaaatcaactacgttttagtcagactttgcacgactatcaaaaaaatatggttggcgtaaataaaagctaccagcagctctcaaacggacttaaaatccaagatccatacgacggtgctgcggtttataacgatgcgatgaggcttgattatgaagcnaccactctcactcaagtggcagatgctaccggtaagtcagtaaattttgcaaaaaacacngacaatgcgctgnaagaatttgaaaaacagcttgaaaattttaaaacaaaagtcgttcaagcagccagcgacgtgcatagcacaacntctcttgaagctttggcaaacgaccttcagggcatcaaaaaccaccttgtaaatatcgcaaatacctctataaatgggcagtttttattctcaggaagtgctgtggatactaagccgatcgatggctcaggtaaatatcaaggcaaccgcgactatatgaaaacttcagccggngcgcaggttgagctaccttacaatatcccaggatttgatctatttttaggaaaagatggcgactacaacaaaattttnacaacaaacgtgatgntagctgatcaaactagaactgacatctcttatgcgccaaaatatcttgatgaaaatagcaagataaaaaatatgatcggtctaaactacgcaagcgactcagttgtgggcagtgatggctcttataaaggcacgatcgagcctgattttgactttttggatacttcaaatgtaaatttccctgacacatactttttnatgcagggcaaaaagccagacggcacgacatttacgagnaaatttaanatgagtgctgatacntcaatggctggtttgatggagaagatcggtatggaatttggcaacacaaagacnacaaaagttgtcgatgtgagcataaataacgacggacaatttaatataaaagaccttactaaaggnaatcaaacgatagactttcacatggttgcagctacttctgtggcggcaaatcgtggtgcgatagctccaaacaatacncttgatacggtaaattcgctacaaagncttgaaaatatggcaaatgctgtgccaaaaacggttcatataactgaatttacaaagagcaaataccttgataaagatggaaatttnacaaacgcatttgactangacaaggttagatttgagcgaaaagacaatganntaatngcaaatttacctcaagtngctagaagaacgggngagtttgcaactgatcagacaaagntaagcgaggtttctggnacaaaagagagctacaatagaaatttatacccaaaagatgtcgatgctagaaagagagagctttacaatatagataatcaagagataggtcttcaagtaaaatcaatnacnggcacnanntangacatcaaagtaaaaatgggngaagcaggtggngtaaataccccagtgcagtttcaaataacatcnacaactgctgctggngtggtatctccaactagaaatttgaccgtctataactcagatgaatttggcagttacagaacctatgcaagngactt

SEQ ID NO: 1022 - DNA, 4000 bp, Escherichia coli
  misc_feature (1)..(4): n is a, c, g, or t
  misc_feature (6)..(14): n is a, c, g, or t
  misc_feature (17)..(28): n is a, c, g, or t
  misc_feature (30)..(30): n is a, c, g, or t
  misc_feature (32)..(38): n is a, c, g, or t
  misc_feature (40)..(40): n is a, c, g, or t
  misc_feature (42)..(43): n is a, c, g, or t
  misc_feature (46)..(71): n is a, c, g, or t
  misc_feature (73)..(78): n is a, c, g, or t
  misc_feature (80)..(87): n is a, c, g, or t
  misc_feature (90)..(91): n is a, c, g, or t
  misc_feature (93)..(94): n is a, c, g, or t
  misc_feature (96)..(97): n is a, c, g, or t
  misc_feature (99)..(111): n is a, c, g, or t
  misc_feature (113)..(113): n is a, c, g, or t
  misc_feature (115)..(134): n is a, c, g, or t
  misc_feature (136)..(141): n is a, c, g, or t
  misc_feature (143)..(146): n is a, c, g, or t
  misc_feature (148)..(174): n is a, c, g, or t
  misc_feature (176)..(182): n is a, c, g, or t
  misc_feature (184)..(192): n is a, c, g, or t
  misc_feature (194)..(202): n is a, c, g, or t
  misc_feature (204)..(212): n is a, c, g, or t
  misc_feature (214)..(221): n is a, c, g, or t
  misc_feature (223)..(233): n is a, c, g, or t
  misc_feature (235)..(269): n is a, c, g, or t
  misc_feature (271)..(276): n is a, c, g, or t
  misc_feature (279)..(280): n is a, c, g, or t
  misc_feature (282)..(294): n is a, c, g, or t
  misc_feature (296)..(300): n is a, c, g, or t
  misc_feature (302)..(304): n is a, c, g, or t
  misc_feature (306)..(315): n is a, c, g, or t
  misc_feature (317)..(318): n is a, c, g, or t
  misc_feature (320)..(330): n is a, c, g, or t
  misc_feature (332)..(333): n is a, c, g, or t
  misc_feature (335)..(348): n is a, c, g, or t
  misc_feature (350)..(375): n is a, c, g, or t
  misc_feature (377)..(389): n is a, c, g, or t
  misc_feature (391)..(396): n is a, c, g, or t
  misc_feature (398)..(410): n is a, c, g, or t
  misc_feature (413)..(414): n is a, c, g, or t
  misc_feature (416)..(416): n is a, c, g, or t
  misc_feature (418)..(425): n is a, c, g, or t
  misc_feature (427)..(431): n is a, c, g, or t
  misc_feature (433)..(434): n is a, c, g, or t
  misc_feature (437)..(441): n is a, c, g, or t
  misc_feature (443)..(446): n is a, c, g, or t
  misc_feature (450)..(450): n is a, c, g, or t
  misc_feature (452)..(465): n is a, c, g, or t
  misc_feature (468)..(471): n is a, c, g, or t
  misc_feature (474)..(478): n is a, c, g, or t
  misc_feature (480)..(502): n is a, c, g, or t
  misc_feature (504)..(514): n is a, c, g, or t
  misc_feature (519)..(521): n is a, c, g, or t
  misc_feature (525)..(529): n is a, c, g, or t
  misc_feature (531)..(534): n is a, c, g, or t
  misc_feature (536)..(537): n is a, c, g, or t
  misc_feature (539)..(542): n is a, c, g, or t
  misc_feature (544)..(551): n is a, c, g, or t
  misc_feature (553)..(558): n is a, c, g, or t
  misc_feature (560)..(560): n is a, c, g, or t
  misc_feature (563)..(567): n is a, c, g, or t
  misc_feature (569)..(569): n is a, c, g, or t
  misc_feature (571)..(575): n is a, c, g, or t
  misc_feature (578)..(582): n is a, c, g, or t
  misc_feature (585)..(585): n is a, c, g, or t
  misc_feature (587)..(587): n is a, c, g, or t
  misc_feature (590)..(594): n is a, c, g, or t
  misc_feature (596)..(599): n is a, c, g, or t
  misc_feature (601)..(601): n is a, c, g, or t
  misc_feature (603)..(612): n is a, c, g, or t
  misc_feature (614)..(618): n is a, c, g, or t
  misc_feature (620)..(628): n is a, c, g, or t
  misc_feature (630)..(640): n is a, c, g, or t
  misc_feature (642)..(642): n is a, c, g, or t
  misc_feature (644)..(648): n is a, c, g, or t
  misc_feature (651)..(651): n is a, c, g, or t
  misc_feature (654)..(666): n is a, c, g, or t
  misc_feature (668)..(679): n is a, c, g, or t
  misc_feature (683)..(689): n is a, c, g, or t
  misc_feature (692)..(701): n is a, c, g, or t
  misc_feature (704)..(706): n is a, c, g, or t
  misc_feature (708)..(710): n is a, c, g, or t
  misc_feature (712)..(721): n is a, c, g, or t
  misc_feature (723)..(728): n is a, c, g, or t
  misc_feature (730)..(732): n is a, c, g, or t
  misc_feature (734)..(741): n is a, c, g, or t
  misc_feature (743)..(747): n is a, c, g, or t
  misc_feature (751)..(752): n is a, c, g, or t
  misc_feature (754)..(759): n is a, c, g, or t
  misc_feature (761)..(779): n is a, c, g, or t
  misc_feature (781)..(795): n is a, c, g, or t
  misc_feature (797)..(797): n is a, c, g, or t
  misc_feature (799)..(815): n is a, c, g, or t
  misc_feature (818)..(824): n is a, c, g, or t
  misc_feature (828)..(832): n is a, c, g, or t
  misc_feature (834)..(834): n is a, c, g, or t
  misc_feature (839)..(840): n is a, c, g, or t
  misc_feature (846)..(846): n is a, c, g, or t
  misc_feature (848)..(848): n is a, c, g, or t
  misc_feature (851)..(865): n is a, c, g, or t
  misc_feature (867)..(867): n is a, c, g, or t
  misc_feature (869)..(887): n is a, c, g, or t
  misc_feature (889)..(894): n is a, c, g, or t
  misc_feature (897)..(902): n is a, c, g, or t
  misc_feature (904)..(905): n is a, c, g, or t
  misc_feature (907)..(912): n is a, c, g, or t
  misc_feature (914)..(917): n is a, c, g, or t
  misc_feature (922)..(926): n is a, c, g, or t
  misc_feature (929)..(938): n is a, c, g, or t
  misc_feature (941)..(941): n is a, c, g, or t
  misc_feature (944)..(947): n is a, c, g, or t
  misc_feature (949)..(960): n is a, c, g, or t
  misc_feature (962)..(962): n is a, c, g, or t
  misc_feature (965)..(965): n is a, c, g, or t
  misc_feature (968)..(971): n is a, c, g, or t
  misc_feature (974)..(988): n is a, c, g, or t
  misc_feature (990)..(990): n is a, c, g, or t
  misc_feature (992)..(994): n is a, c, g, or t
  misc_feature (996)..(998): n is a, c, g, or t
  misc_feature (1001)..(1002): n is a, c, g, or t
  misc_feature (1004)..(1017): n is a, c, g, or t
  misc_feature (1019)..(1033): n is a, c, g, or t
  misc_feature (1035)..(1053): n is a, c, g, or t
  misc_feature (1055)..(1057): n is a, c, g, or t
  misc_feature (1059)..(1078): n is a, c, g, or t
  misc_feature (1082)..(1091): n is a, c, g, or t
  misc_feature (1093)..(1094): n is a, c, g, or t
  misc_feature (1096)..(1107): n is a, c, g, or t
  misc_feature (1109)..(1109): n is a, c, g, or t
  misc_feature (1111)..(1112): n is a, c, g, or t
  misc_feature (1114)..(1116): n is a, c, g, or t
  misc_feature (1118)..(1125): n is a, c, g, or t
  misc_feature (1127)..(1128): n is a, c, g, or t
  misc_feature (1130)..(1134): n is a, c, g, or t
  misc_feature (1136)..(1137): n is a, c, g, or t
  misc_feature (1139)..(1145): n is a, c, g, or t
  misc_feature (1147)..(1151): n is a, c, g, or t
  misc_feature (1153)..(1156): n is a, c, g, or t
  misc_feature (1160)..(1160): n is a, c, g, or t
  misc_feature (1163)..(1163): n is a, c, g, or t
  misc_feature (1166)..(1167): n is a, c, g, or t
  misc_feature (1169)..(1173): n is a, c, g, or t
  misc_feature (1175)..(1185): n is a, c, g, or t
  misc_feature (1187)..(1189): n is a, c, g, or t
  misc_feature (1192)..(1198): n is a, c, g, or t
  misc_feature (1200)..(1200): n is a, c, g, or t
  misc_feature (1203)..(1206): n is a, c, g, or t
  misc_feature (1208)..(1210): n is a, c, g, or t
  misc_feature (1213)..(1223): n is a, c, g, or t
  misc_feature (1225)..(1227): n is a, c, g, or t
  misc_feature (1230)..(1236): n is a, c, g, or t
  misc_feature (1238)..(1242): n is a, c, g, or t
  misc_feature (1244)..(1256): n is a, c, g, or t
  misc_feature (1259)..(1259): n is a, c, g, or t
  misc_feature (1261)..(1261): n is a, c, g, or t
  misc_feature (1265)..(1265): n is a, c, g, or t
  misc_feature (1271)..(1273): n is a, c, g, or t
  misc_feature (1277)..(1278): n is a, c, g, or t
  misc_feature (1280)..(1281): n is a, c, g, or t
  misc_feature (1283)..(1283): n is a, c, g, or t
  misc_feature (1285)..(1285): n is a, c, g, or t
  misc_feature (1294)..(1296): n is a, c, g, or t
  misc_feature (1299)..(1302): n is a, c, g, or t
  misc_feature (1306)..(1306): n is a, c, g, or t
  misc_feature (1308)..(1312): n is a, c, g, or t
  misc_feature (1315)..(1316): n is a, c, g, or t
  misc_feature (1319)..(1320): n is a, c, g, or t
  misc_feature (1322)..(1323): n is a, c, g, or t
  misc_feature (1325)..(1325): n is a, c, g, or t
  misc_feature (1327)..(1329): n is a, c, g, or t
  misc_feature (1331)..(1342): n is a, c, g, or t
  misc_feature (1344)..(1347): n is a, c, g, or t
  misc_feature (1349)..(1351): n is a, c, g, or t
  misc_feature (1353)..(1353): n is a, c, g, or t
  misc_feature (1356)..(1363): n is a, c, g, or t
  misc_feature (1365)..(1366): n is a, c, g, or t
  misc_feature (1368)..(1369): n is a, c, g, or t
  misc_feature (1371)..(1372): n is a, c, g, or t
  misc_feature (1374)..(1374): n is a, c, g, or t
  misc_feature (1376)..(1376): n is a, c, g, or t
  misc_feature (1378)..(1378): n is a, c, g, or t
  misc_feature (1380)..(1386): n is a, c, g, or t
  misc_feature (1388)..(1392): n is a, c, g, or t
  misc_feature (1394)..(1402): n is a, c, g, or t
  misc_feature (1404)..(1411): n is a, c, g, or t
  misc_feature (1414)..(1415): n is a, c, g, or t
  misc_feature (1417)..(1418): n is a, c, g, or t
  misc_feature (1420)..(1428): n is a, c, g, or t
  misc_feature (1430)..(1445): n is a, c, g, or t
  misc_feature (1450)..(1454): n is a, c, g, or t
  misc_feature (1459)..(1460): n is a, c, g, or t
  misc_feature (1463)..(1463): n is a, c, g, or t
  misc_feature (1468)..(1468): n is a, c, g, or t
  misc_feature (1480)..(1480): n is a, c, g, or t
  misc_feature (1484)..(1491): n is a, c, g, or t
  misc_feature (1495)..(1496): n is a, c, g, or t
  misc_feature (1499)..(1505): n is a, c, g, or t
  misc_feature (1511)..(1512): n is a, c, g, or t
  misc_feature (1515)..(1515): n is a, c, g, or t
  misc_feature (1520)..(1524): n is a, c, g, or t
  misc_feature (1991)..(1991): n is a, c, g, or t
  misc_feature (2424)..(2429): n is a, c, g, or t
  misc_feature (2433)..(2435): n is a, c, g, or t
  misc_feature (2439)..(2440): n is a, c, g, or t
  misc_feature (2445)..(2447): n is a, c, g, or t
  misc_feature (2449)..(2451): n is a, c, g, or t
  misc_feature (2453)..(2463): n is a, c, g, or t
  misc_feature (2465)..(2465): n is a, c, g, or t
  misc_feature (2467)..(2467): n is a, c, g, or t
  misc_feature (2469)..(2471): n is a, c, g, or t
  misc_feature (2473)..(2474): n is a, c, g, or t
  misc_feature (2476)..(2476): n is a, c, g, or t
  misc_feature (2483)..(2485): n is a, c, g, or t
  misc_feature (2489)..(2489): n is a, c, g, or t
  misc_feature (2491)..(2491): n is a, c, g, or t
  misc_feature (2493)..(2496): n is a, c, g, or t
  misc_feature (2500)..(2500): n is a, c, g, or t
  misc_feature (2502)..(2504): n is a, c, g, or t
  misc_feature (2509)..(2511): n is a, c, g, or t
  misc_feature (2513)..(2513): n is a, c, g, or t
  misc_feature (2516)..(2517): n is a, c, g, or t
  misc_feature (2526)..(2527): n is a, c, g, or t
  misc_feature (2530)..(2531): n is a, c, g, or t
  misc_feature (2533)..(2533): n is a, c, g, or t
  misc_feature (2535)..(2535): n is a, c, g, or t
  misc_feature (2537)..(2537): n is a, c, g, or t
  misc_feature (2540)..(2540): n is a, c, g, or t
  misc_feature (2544)..(2546): n is a, c, g, or t
  misc_feature (2548)..(2548): n is a, c, g, or t
  misc_feature (2550)..(2552): n is a, c, g, or t
  misc_feature (2554)..(2554): n is a, c, g, or t
  misc_feature (2556)..(2556): n is a, c, g, or t
  misc_feature (2559)..(2560): n is a, c, g, or t
  misc_feature (2562)..(2562): n is a, c, g, or t
  misc_feature (2564)..(2564): n is a, c, g, or t
  misc_feature (2566)..(2567): n is a, c, g, or t
  misc_feature (2574)..(2585): n is a, c, g, or t
  misc_feature (2592)..(2594): n is a, c, g, or t
  misc_feature (2600)..(2601): n is a, c, g, or t
  misc_feature (2603)..(2603): n is a, c, g, or t
  misc_feature (2606)..(2606): n is a, c, g, or t
  misc_feature (2609)..(2620): n is a, c, g, or t
  misc_feature (2622)..(2622): n is a, c, g, or t
  misc_feature (2624)..(2624): n is a, c, g, or t
  misc_feature (2626)..(2627): n is a, c, g, or t
  misc_feature (2630)..(2630): n is a, c, g, or t
  misc_feature (2633)..(2634): n is a, c, g, or t
  misc_feature (2642)..(2643): n is a, c, g, or t
  misc_feature (2651)..(2655): n is a, c, g, or t
  misc_feature (2658)..(2658): n is a, c, g, or t
  misc_feature (2660)..(2661): n is a, c, g, or t
  misc_feature (2663)..(2663): n is a, c, g, or t
  misc_feature (2665)..(2666): n is a, c, g, or t
  misc_feature (2668)..(2668): n is a, c, g, or t
  misc_feature (2670)..(2670): n is a, c, g, or t
  misc_feature (2672)..(2672): n is a, c, g, or t
  misc_feature (2675)..(2675): n is a, c, g, or t
  misc_feature (2677)..(2677): n is a, c, g, or t
  misc_feature (2679)..(2683): n is a, c, g, or t
  misc_feature (2685)..(2685): n is a, c, g, or t
  misc_feature (2687)..(2688): n is a, c, g, or t
  misc_feature (2690)..(2694): n is a, c, g, or t
  misc_feature (2696)..(2696): n is a, c, g, or t
  misc_feature (2698)..(2701): n is a, c, g, or t
  misc_feature (2704)..(2708): n is a, c, g, or t
  misc_feature (2710)..(2713): n is a, c, g, or t
  misc_feature (2715)..(2718): n is a, c, g, or t
  misc_feature (2721)..(2722): n is a, c, g, or t
  misc_feature (2724)..(2725): n is a, c, g, or t
  misc_feature (2729)..(2729): n is a, c, g, or t
  misc_feature (2731)..(2731): n is a, c, g, or t
  misc_feature (2733)..(2736): n is a, c, g, or t
  misc_feature (2738)..(2738): n is a, c, g, or t
  misc_feature (2740)..(2740): n is a, c, g, or t
  misc_feature (2742)..(2751): n is a, c, g, or t
  misc_feature (2753)..(2753): n is a, c, g, or t
  misc_feature (2755)..(2755): n is a, c, g, or t
  misc_feature (2757)..(2761): n is a, c, g, or t
  misc_feature (2763)..(2764): n is a, c, g, or t
  misc_feature (2766)..(2766): n is a, c, g, or t
  misc_feature (2768)..(2768): n is a, c, g, or t
  misc_feature (2772)..(2774): n is a, c, g, or t
  misc_feature (2776)..(2776): n is a, c, g, or t
  misc_feature (2778)..(2778): n is a, c, g, or t
  misc_feature (2781)..(2782): n is a, c, g, or t
  misc_feature (2784)..(2784): n is a, c, g, or t
  misc_feature (2786)..(2790): n is a, c, g, or t
  misc_feature (2792)..(2792): n is a, c, g, or t
  misc_feature (2797)..(2797): n is a, c, g, or t
  misc_feature (2799)..(2805): n is a, c, g, or t
  misc_feature (2807)..(2807): n is a, c, g, or t
  misc_feature (2809)..(2810): n is a, c, g, or t
  misc_feature (2812)..(2812): n is a, c, g, or t
  misc_feature (2815)..(2825): n is a, c, g, or t
  misc_feature (2832)..(2832): n is a, c, g, or t
  misc_feature (2834)..(2835): n is a, c, g, or t
  misc_feature (2837)..(2846): n is a, c, g, or t
  misc_feature (2848)..(2848): n is a, c, g, or t
  misc_feature (2851)..(2851): n is a, c, g, or t
  misc_feature (2853)..(2853): n is a, c, g, or t
  misc_feature (2855)..(2856): n is a, c, g, or t
  misc_feature (2863)..(2867): n is a, c, g, or t
  misc_feature (2869)..(2872): n is a, c, g, or t
  misc_feature (2875)..(2875): n is a, c, g, or t
  misc_feature (2877)..(2878): n is a, c, g, or t
  misc_feature (2883)..(2886): n is a, c, g, or t
  misc_feature (2889)..(2889): n is a, c, g, or t
  misc_feature (2891)..(2891): n is a, c, g, or t
  misc_feature (2893)..(2893): n is a, c, g, or t
  misc_feature (2895)..(2896): n is a, c, g, or t
  misc_feature (2898)..(2898): n is a, c, g, or t
  misc_feature (2900)..(2907): n is a, c, g, or t
  misc_feature (2909)..(2912): n is a, c, g, or t
  misc_feature (2914)..(2917): n is a, c, g, or t
  misc_feature (2930)..(2932): n is a, c, g, or t
  misc_feature (2934)..(2934): n is a, c, g, or t
  misc_feature (2937)..(2937): n is a, c, g, or t
  misc_feature (2940)..(2940): n is a, c, g, or t
  misc_feature (2942)..(2942): n is a, c, g, or t
  misc_feature (2944)..(2944): n is a, c, g, or t
  misc_feature (2950)..(2952): n is a, c, g, or t
  misc_feature (2956)..(2958): n is a, c, g, or t
  misc_feature (2960)..(2960): n is a, c, g, or t
  misc_feature (2962)..(2962): n is a, c, g, or t
  misc_feature (2964)..(2970): n is a, c, g, or t
  misc_feature (2972)..(2972): n is a, c, g, or t
  misc_feature (2977)..(2977): n is a, c, g, or t
  misc_feature (2980)..(2980): n is a, c, g, or t
  misc_feature (2982)..(2984): n is a, c, g, or t
  misc_feature (2986)..(2986): n is a, c, g, or t
  misc_feature (2988)..(2989): n is a, c, g, or t
  misc_feature (2991)..(2991): n is a, c, g, or t
  misc_feature (2993)..(2994): n is a, c, g, or t
  misc_feature (2996)..(2996): n is a, c, g, or t
  misc_feature (3000)..(3000): n is a, c, g, or t
  misc_feature (3002)..(3004): n is a, c, g, or t
  misc_feature (3006)..(3006): n is a, c, g, or t
  misc_feature (3008)..(3010): n is a, c, g, or t
  misc_feature (3012)..(3014): n is a, c, g, or t
  misc_feature (3016)..(3016): n is a, c, g, or t
  misc_feature (3018)..(3019): n is a, c, g, or t
  misc_feature (3021)..(3026): n is a, c, g, or t
  misc_feature (3028)..(3028): n is a, c, g, or t
  misc_feature (3030)..(3031): n is a, c, g, or t
  misc_feature (3033)..(3034): n is a, c, g, or t
  misc_feature (3036)..(3036): n is a, c, g, or t
  misc_feature (3038)..(3047): n is a, c, g, or t
  misc_feature (3049)..(3049): n is a, c, g, or t
  misc_feature (3051)..(3051): n is a, c, g, or t
  misc_feature (3053)..(3053): n is a, c, g, or t
  misc_feature (3057)..(3057): n is a, c, g, or t
  misc_feature (3060)..(3062): n is a, c, g, or t
  misc_feature (3065)..(3065): n is a, c, g, or t
  misc_feature (3067)..(3067): n is a, c, g, or t
  misc_feature (3069)..(3069): n is a, c, g, or t
  misc_feature (3071)..(3073): n is a, c, g, or t
  misc_feature (3075)..(3076): n is a, c, g, or t
  misc_feature (3078)..(3078): n is a, c, g, or t
  misc_feature (3082)..(3085): n is a, c, g, or t
  misc_feature (3087)..(3091): n is a, c, g, or t
  misc_feature (3094)..(3094): n is a, c, g, or t
  misc_feature (3096)..(3097): n is a, c, g, or t
  misc_feature (3099)..(3099): n is a, c, g, or t
  misc_feature (3101)..(3123): n is a, c, g, or t
  misc_feature (3126)..(3126): n is a, c, g, or t
  misc_feature (3128)..(3128): n is a, c, g, or t
  misc_feature (3130)..(3130): n is a, c, g, or t
  misc_feature (3132)..(3137): n is a, c, g, or t
  misc_feature (3141)..(3143): n is a, c, g, or t
  misc_feature (3153)..(3153): n is a, c, g, or t
  misc_feature (3155)..(3156): n is a, c, g, or t
  misc_feature (3162)..(3165): n is a, c, g, or t
  misc_feature (3167)..(3167): n is a, c, g, or t
  misc_feature (3169)..(3170): n is a, c, g, or t
  misc_feature (3173)..(3173): n is a, c, g, or t
  misc_feature (3175)..(3175): n is a, c, g, or t
  misc_feature (3177)..(3178): n is a, c, g, or t
  misc_feature (3180)..(3180): n is a, c, g, or t
  misc_feature (3182)..(3183): n is a, c, g, or t
  misc_feature (3185)..(3185): n is a, c, g, or t
  misc_feature (3187)..(3198): n is a, c, g, or t
  misc_feature (3201)..(3201): n is a, c, g, or t
  misc_feature (3207)..(3208): n is a, c, g, or t
  misc_feature (3210)..(3210): n is a, c, g, or t
  misc_feature (3213)..(3213): n is a, c, g, or t
  misc_feature (3220)..(3226): n is a, c, g, or t
  misc_feature (3228)..(3232): n is a, c, g, or t
  misc_feature (3234)..(3235): n is a, c, g, or t
  misc_feature (3237)..(3243): n is a, c, g, or t
  misc_feature (3248)..(3249): n is a, c, g, or t
  misc_feature (3251)..(3251): n is a, c, g, or t
  misc_feature (3253)..(3253): n is a, c, g, or t
  misc_feature (3255)..(3255): n is a, c, g, or t
  misc_feature (3257)..(3264): n is a, c, g, or t
  misc_feature (3266)..(3266): n is a, c, g, or t
  misc_feature (3270)..(3270): n is a, c, g, or t
  misc_feature (3276)..(3276): n is a, c, g, or t
  misc_feature (3279)..(3279): n is a, c, g, or t
  misc_feature (3281)..(3281): n is a, c, g, or t
  misc_feature (3283)..(3283): n is a, c, g, or t
  misc_feature (3287)..(3288): n is a, c, g, or t
  misc_feature (3290)..(3290): n is a, c, g, or t
  misc_feature (3293)..(3293): n is a, c, g, or t
  misc_feature (3295)..(3295): n is a, c, g, or t
  misc_feature (3297)..(3298): n is a, c, g, or t
  misc_feature (3300)..(3300): n is a, c, g, or t
  misc_feature (3302)..(3306): n is a, c, g, or t
  misc_feature (3310)..(3310): n is a, c, g, or t
  misc_feature (3312)..(3312): n is a, c, g, or t
  misc_feature (3314)..(3317): n is a, c, g, or t
  misc_feature (3319)..(3320): n is a, c, g, or t
  misc_feature (3324)..(3329): n is a, c, g, or t
  misc_feature (3331)..(3332): n is a, c, g, or t
  misc_feature (3334)..(3334): n is a, c, g, or t
  misc_feature (3336)..(3340): n is a, c, g, or t
  misc_feature (3343)..(3343): n is a, c, g, or t
  misc_feature (3345)..(3349): n is a, c, g, or t
  misc_feature (3351)..(3351): n is a, c, g, or t
  misc_feature (3353)..(3357): n is a, c, g, or t
  misc_feature (3359)..(3359): n is a, c, g, or t
  misc_feature (3361)..(3361): n is a, c, g, or t
  misc_feature (3366)..(3366): n is a, c, g, or t
  misc_feature (3371)..(3377): n is a, c, g, or t
  misc_feature (3379)..(3379): n is a, c, g, or t
  misc_feature (3381)..(3383): n is a, c, g, or t
  misc_feature (3385)..(3385): n is a, c, g, or t
  misc_feature (3388)..(3388): n is a, c, g, or t
  misc_feature (3390)..(3390): n is a, c, g, or t
  misc_feature (3392)..(3392): n is a, c, g, or t
  misc_feature (3394)..(3396): n is a, c, g, or t
  misc_feature (3398)..(3398): n is a, c, g, or t
  misc_feature (3401)..(3401): n is a, c, g, or t
  misc_feature (3403)..(3403): n is a, c, g, or t
  misc_feature (3406)..(3406): n is a, c, g, or t
  misc_feature (3408)..(3409): n is a, c, g, or t
  misc_feature (3411)..(3411): n is a, c, g, or t
  misc_feature (3415)..(3417): n is a, c, g, or t
  misc_feature (3419)..(3421): n is a, c, g, or t
  misc_feature (3425)..(3425): n is a, c, g, or t
  misc_feature (3427)..(3427): n is a, c, g, or t
  misc_feature (3429)..(3429): n is a, c, g, or t
  misc_feature (3434)..(3434): n is a, c, g, or t
  misc_feature (3436)..(3436): n is a, c, g, or t
  misc_feature (3440)..(3440): n is a, c, g, or t
  misc_feature (3446)..(3446): n is a, c, g, or t
  misc_feature (3448)..(3450): n is a, c, g, or t
  misc_feature (3452)..(3452): n is a, c, g, or t
  misc_feature (3467)..(3468): n is a, c, g, or t
  misc_feature (3470)..(3470): n is a, c, g, or t
  misc_feature (3472)..(3472): n is a, c, g, or t
  misc_feature (3474)..(3475): n is a, c, g, or t
  misc_feature (3477)..(3483): n is a, c, g, or t
  misc_feature (3485)..(3485): n is a, c, g, or t
  misc_feature (3487)..(3489): n is a, c, g, or t
  misc_feature (3491)..(3491): n is a, c, g, or t
  misc_feature (3493)..(3493): n is a, c, g, or t
  misc_feature (3495)..(3499): n is a, c, g, or t
  misc_feature (3501)..(3502): n is a, c, g, or t
  misc_feature (3504)..(3504): n is a, c, g, or t
  misc_feature (3508)..(3508): n is a, c, g, or t
  misc_feature (3510)..(3510): n is a, c, g, or t
  misc_feature (3512)..(3512): n is a, c, g, or t
  misc_feature (3514)..(3516): n is a, c, g, or t
  misc_feature (3518)..(3519): n is a, c, g, or t
  misc_feature (3521)..(3521): n is a, c, g, or t
  misc_feature (3523)..(3524): n is a, c, g, or t
  misc_feature (3526)..(3526): n is a, c, g, or t
  misc_feature (3534)..(3534): n is a, c, g, or t
  misc_feature (3537)..(3538): n is a, c, g, or t
  misc_feature (3540)..(3540): n is a, c, g, or t
  misc_feature (3543)..(3550): n is a, c, g, or t
  misc_feature (3552)..(3553): n is a, c, g, or t
  misc_feature (3555)..(3555): n is a, c, g, or t
  misc_feature (3557)..(3571): n is a, c, g, or t
  misc_feature (3573)..(3577): n is a, c, g, or t
  misc_feature (3579)..(3583): n is a, c, g, or t
  misc_feature (3587)..(3593): n is a, c, g, or t
  misc_feature (3595)..(3596): n is a, c, g, or t
  misc_feature (3600)..(3605): n is a, c, g, or t
  misc_feature (3609)..(3620): n is a, c, g, or t
  misc_feature (3622)..(3623): n is a, c, g, or t
  misc_feature (3625)..(3625): n is a, c, g, or t
  misc_feature (3627)..(3629): n is a, c, g, or t
  misc_feature (3638)..(3639): n is a, c, g, or t
  misc_feature (3641)..(3641): n is a, c, g, or t
  misc_feature (3644)..(3644): n is a, c, g, or t
  misc_feature (3649)..(3649): n is a, c, g, or t
  misc_feature (3654)..(3655): n is a, c, g, or t
  misc_feature (3659)..(3663): n is a, c, g, or t
  misc_feature (3665)..(3665): n is a, c, g, or t
  misc_feature (3669)..(3669): n is a, c, g, or t
  misc_feature (3671)..(3671): n is a, c, g, or t
  misc_feature (3673)..(3677): n is a, c, g, or t
  misc_feature (3681)..(3681): n is a, c, g, or t
  misc_feature (3683)..(3683): n is a, c, g, or t
  misc_feature (3685)..(3690): n is a, c, g, or t
  misc_feature (3692)..(3692): n is a, c, g, or t
  misc_feature (3694)..(3697): n is a, c, g, or t
  misc_feature (3701)..(3701): n is a, c, g, or t
  misc_feature (3704)..(3704): n is a, c, g, or t
  misc_feature (3706)..(3706): n is a, c, g, or t
  misc_feature (3708)..(3708): n is a, c, g, or t
  misc_feature (3710)..(3713): n is a, c, g, or t
  misc_feature (3715)..(3715): n is a, c, g, or t
  misc_feature (3717)..(3717): n is a, c, g, or t
  misc_feature (3720)..(3720): n is a, c, g, or t
  misc_feature (3723)..(3724): n is a, c, g, or t
  misc_feature (3726)..(3726): n is a, c, g, or t
  misc_feature (3728)..(3728): n is a, c, g, or t
  misc_feature (3731)..(3731): n is a, c, g, or t
  misc_feature (3734)..(3734): n is a, c, g, or t
  misc_feature (3736)..(3737): n is a, c, g, or t
  misc_feature (3739)..(3747): n is a, c, g, or t
  misc_feature (3749)..(3749): n is a, c, g, or t
  misc_feature (3751)..(3751): n is a, c, g, or t
  misc_feature (3753)..(3758): n is a, c, g, or t
  misc_feature (3760)..(3761): n is a, c, g, or t
  misc_feature (3763)..(3765): n is a, c, g, or t
  misc_feature (3767)..(3768): n is a, c, g, or t
  misc_feature (3772)..(3774): n is a, c, g, or t
  misc_feature (3776)..(3776): n is a, c, g, or t
  misc_feature (3781)..(3781): n is a, c, g, or t
  misc_feature (3783)..(3783): n is a, c, g, or t
  misc_feature (3785)..(3786): n is a, c, g, or t
  misc_feature (3788)..(3793): n is a, c, g, or t
  misc_feature (3795)..(3807): n is a, c, g, or t
  misc_feature (3809)..(3809): n is a, c, g, or t
  misc_feature (3811)..(3813): n is a, c, g, or t
  misc_feature (3815)..(3816): n is a, c, g, or t
  misc_feature (3818)..(3818): n is a, c, g, or t
  misc_feature (3821)..(3821): n is a, c, g, or t
  misc_feature (3824)..(3827): n is a, c, g, or t
  misc_feature (3830)..(3834): n is a, c, g, or t
  misc_feature (3840)..(3845): n is a, c, g, or t
  misc_feature (3847)..(3849): n is a, c, g, or t
  misc_feature (3854)..(3854): n is a, c, g, or t
  misc_feature (3856)..(3856): n is a, c, g, or t
  misc_feature (3858)..(3858): n is a, c, g, or t
  misc_feature (3862)..(3862): n is a, c, g, or t
  misc_feature (3864)..(3864): n is a, c, g, or t
  misc_feature (3866)..(3868): n is a, c, g, or t
  misc_feature (3873)..(3878): n is a, c, g, or t
  misc_feature (3880)..(3880): n is a, c, g, or t
  misc_feature (3883)..(3883): n is a, c, g, or t
  misc_feature (3886)..(3887): n is a, c, g, or t
  misc_feature (3889)..(3890): n is a, c, g, or t
  misc_feature (3896)..(3897): n is a, c, g, or t
  misc_feature (3899)..(3899): n is a, c, g, or t
  misc_feature (3901)..(3902): n is a, c, g, or t
  misc_feature (3907)..(3911): n is a, c, g, or t
  misc_feature (3913)..(3915): n is a, c, g, or t
  misc_feature (3917)..(3918): n is a, c, g, or t
  misc_feature (3920)..(3920): n is a, c, g, or t
  misc_feature (3923)..(3926): n is a, c, g, or t
  misc_feature (3928)..(3929): n is a, c, g, or t
  misc_feature (3931)..(3932): n is a, c, g, or t
  misc_feature (3934)..(3942): n is a, c, g, or t
  misc_feature (3944)..(3944): n is a, c, g, or t
  misc_feature (3946)..(3946): n is a, c, g, or t
  misc_feature (3948)..(3949): n is a, c, g, or t
  misc_feature (3951)..(3953): n is a, c, g, or t
  misc_feature (3957)..(3958): n is a, c, g, or t
  misc_feature (3960)..(3961): n is a, c, g, or t
  misc_feature (3963)..(3963): n is a, c, g, or t
  misc_feature (3965)..(3965): n is a, c, g, or t
  misc_feature (3967)..(3972): n is a, c, g, or t
  misc_feature (3974)..(3974): n is a, c, g, or t
  misc_feature (3976)..(3978): n is a, c, g, or t
  misc_feature (3980)..(3980): n is a, c, g, or t
  misc_feature (3982)..(3983): n is a, c, g, or t
  misc_feature (3985)..(3993): n is a, c, g, or t
  misc_feature (3995)..(3996): n is a, c, g, or t
  misc_feature (3998)..(3998): n is a, c, g, or t
  misc_feature (4000)..(4000): n is a, c, g, or t
nnnncnnnnnnnnncgnnnnnnnnnnnncngnnnnnnncngnncgnnnnnnnnnnnnnnnnnnnnnnnnnnannnnnngnnnnnnnnggnngnncnngnnnnnnnnnnnnngnannnnnnnnnnnnnnnnnnnnannnnnncnnnngnnnnnnnnnnnnnnnnnnnnnnnnnnncnnnnnnngnnnnnnnnngnnnnnnnnngnnnnnnnnngnnnnnnnngnnnnnnnnnnncnnnnnnnnnnnnnnnnnnnnnnnnnnnnnnnnnnngnnnnnncgnncnnnnnnnnnnnnncnnnnncnnncnnnnnnnnnngnncnnnnnnnnnnngnncnnnnnnnnnnnnnngnnnnnnnnnnnnnnnnnnnnnnnnnngnnnnnnnnnnnnngnnnnnnannnnnnnnnnnnnaanntntnnnnnnnntnnnnntnntannnnncnnnngcgncnnnnnnnnnnnnnntcnnnntcnnnnngnnnnnnnnnnnnnnnnnnnnnnncnnnnnnnnnnnttttnnntttnnnnntnnnncnngnnnncnnnnnnnncnnnnnncnccnnnnncncnnnnnccnnnnnccncnccnnnnncnnnnanannnnnnnnnncnnnnncnnnnnnnnnannnnnnnnnnngngnnnnngcnctnnnnnnnnnnnnncnnnnnnnnnnnncgcnnnnnnncgnnnnnnnnnnccnnntnnntnnnnnnnnnntnnnnnntnnnannnnnnnntnnnnntttnngnnnnnntnnnnnnnnnnnnnnnnnnntnnnnnnnnnnnnnnncncnnnnnnnnnnnnnnnnnccnnnnnnntttnnnnncncgcgnncgcggncncgnnnnnnnnnnnnnnntncnnnnnnnnnnnnnnnnnnncnnnnnngcnnnnnncnngnnnnnngnnnncgcgnnnnngcnnnnnnnnnnccnccnnnncnnnnnnnnnnnntnccnccnnnnccnnnnnnnnnnnnnnntncnnntnnnccnncnnnnnnnnnnnnnncnnnnnnnnnnnnnnntnnnnnnnnnnnnnnnnnnngnnntnnnnnnnnnnnnnnnnnnnncccnnnnnnnnnncnncnnnnnnnnnnnngngnntnnncnnnnnnnngnncnnnnncnncnnnnnnncnnnnncnnnncccncgnccnngnnnnngnnnnnnnnnnncnnnttnnnnnnngnggnnnngnnnaannnnnnnnnnngnnncgnnnnnnngnnnnngnnnnnnnnnnnnncgngngcgngcgcgnnngcgnncnngngnggggggggnnnggnnnngggngnnnnngcnncgnngnngncnnngnnnnnnnnnnnntnnnngnnngngcnnnnnnnntnngnngnngngngngnnnnnnnannnnnannnnnnnnnannnnnnnnccnncnncnnnnnnnnncnnnnnnnnnnnnnnnnttttnnnnnccggnnaanttttnccccaacctttnaaannnnnnnntttnnccnnnnnnncctttnnccnccggnnnnngagcagcagctcaacttcgggagtggaacgcgacacgacatccgtcactcgctcgacgcacacgccacctcacttcgctcgacgcagaggctacctcgtcgaccgagcacaaaatgcgcgcgggcgtggcgtccgcggtcctcgtggcgtggctcgcggtcctcgccccctcccacgcgctggcgcccgcggacggcgcctccgcggacctcggcgcgtccgagaccgcctcgccgtggttctgccacggcctcgactgtccgccgttcgcggtggagcgccggggcgacgggtacgacgtgcgcgtctaccccgccggcctgaggtggacctccacgaccgtctcgggctcgagctacgacgacgccacggccaccgggttcgagcgtctgtttaggtacatcagcggagagaacgagggaaacgagaagatcccgatgaccgcgcctgtgcgagtagcagtcgcncccggcgacggcccgttctgcgactccaacttcacggtctcgttcttcgtgccgttcgaggaggagggggtcgaaacgacacgttcggaaatggacggtcacgggactcacgggacacacactcgtcgttctcagcgagacgtcccggaacccacggacccggacgtgttccgagacgcggacgcggaggagacgcgcgttttcgtccgcgcgttcggcgggtacgccgacgcgaaacgcctgcgccgagaggcgagcgcgttggcgcggcggctcgaggaggacggcgtcgaggttgccgcgagcgcgtacttctacgcggggtacgactcgccgttcaggccgataggcaggcacaacgaggtgtggttgaagccggcggcggagtgacgcgcgcggagacgcggcgcgaaaaagacgacgacgagtgaannnnnnagannngagnngcccnnntnnncnnnnnnnnnnncncncnnntnnantttggannngcgnangnnnngcgntnnngtcgnnncnccnncacccacannacnncncncnccncgtnnngngnnncntntcnncncncnnctctctnnnnnnnnnnnnggcgcgnnnctctcnncnccnccnnnnnnnnnnnncncncnnccncgnngcgcgcgnngcgcgcgnnnnnacncnncncnncncncnccncncnnnnncncnncnnnnncncnnnngcnnnnnannnncnnnnccnncnncgcngngnnnngngngnnnnnnnnnntntncnnnnngnngngncgcnnngngngcnncncnnnnncnccccngnnnnnnncncnncnccnnnnnnnnnnncacaccncnncnnnnnnnnnngnggngngnngcgcgcnnnnngnnnngcncnncgcgnnnnccncncncnncncnnnnnnnncnnnngnnnnttttttttttttnnncnccnccncncnccacannntgtnnngngngnnnnnnngngcgcnccncnnncncnncncnncncggngnnnanannncnnngngnngnnnnnngngnncnncncnnnnnnnnnncncncngcgnggnnnccncngngnnncnncncgcnnnncnnnnnganannanannnnnnnnnnnnnnnnnnnnnnnggngngngnnnnnncgcnnngcgcgcgccncnnccgcgnnnnanannacncncnncncnncncnnnnnnnnnnnnccncgcgcnncnccnccgcgcnnnnnnngnnnnngnngnnnnnnntctcnncncncncnnnnnnnngngcgngggggnggngngncgcnncnccncncnncncnnnnngcgngngnnnngnnctcnnnnnngnngngnnnnnatntnnnnnanannnnngngnggcgncgcgnnnnnnncncnnngnggngncncnnncnccncnccncnncncgcnnngnnncgcncncncacangngggngcgcgngnnnanaccccccgcgccgcnncncncnngnnnnnnncncnnngngngnnnnncnncncccncncncnnngnngngnntntttttttntcnncncannnnnnnngnngngnnnnnnnnnnnnnnncnnnnngnnnnngcgnnnnnnngnngagnnnnnncgcnnnnnnnnnnnncnncncnnngcgccgcgnngnggnggggnggcgnngcgnnnnncncggngngnnnnncgcngngnnnnnngngnnnngcgnggngncncnnnngngnggngcnncncncgnggngnngnnnnnnnnngngngnnnnnncnncnnngnngcgnnncncgcgncncnncnnnnnngnnnnnnnnnnnnncncnnntnntnttnttnnnntgnnnnntcgcgnnnnnntnnncgcgncncncgcngngnnngcgcnnnnnncnccnccnncnncacacnncncnncgcgnnnnnannncnncncgnnnntnngnntnnnnnnnnncncncnntnnngtgnncnncncncnnnnnncncnnncncnncnnnnnnnnncnncncn

SEQ ID NO: 1023 - DNA, 4000 bp, Escherichia coli
  misc_feature (1442)..(1444): n is a, c, g, or t
  misc_feature (1447)..(1447): n is a, c, g, or t
  misc_feature (1449)..(1455): n is a, c, g, or t
  misc_feature (1457)..(1459): n is a, c, g, or t
  misc_feature (1461)..(1462): n is a, c, g, or t
  misc_feature (1466)..(1467): n is a, c, g, or t
  misc_feature (1469)..(1471): n is a, c, g, or t
  misc_feature (1473)..(1478): n is a, c, g, or t
  misc_feature (1480)..(1485): n is a, c, g, or t
  misc_feature (1487)..(1487): n is a, c, g, or t
  misc_feature (1489)..(1497): n is a, c, g, or t
  misc_feature (1499)..(1499): n is a, c, g, or t
  misc_feature (1501)..(1501): n is a, c, g, or t
  misc_feature (1503)..(1522): n is a, c, g, or t
  misc_feature (1525)..(1533): n is a, c, g, or t
  misc_feature (1535)..(1544): n is a, c, g, or t
  misc_feature (1546)..(1546): n is a, c, g, or t
  misc_feature (1551)..(1553): n is a, c, g, or t
  misc_feature (1555)..(1555): n is a, c, g, or t
  misc_feature (1557)..(1557): n is a, c, g, or t
  misc_feature (1560)..(1577): n is a, c, g, or t
  misc_feature (1580)..(1580): n is a, c, g, or t
  misc_feature (1584)..(1584): n is a, c, g, or t
  misc_feature (1589)..(1589): n is a, c, g, or t
  misc_feature (1591)..(1591): n is a, c, g, or t
  misc_feature (1593)..(1595): n is a, c, g, or t
  misc_feature (1598)..(1602): n is a, c, g, or t
  misc_feature (1605)..(1605): n is a, c, g, or t
  misc_feature (1608)..(1610): n is a, c, g, or t
  misc_feature (1612)..(1612): n is a, c, g, or t
  misc_feature (1615)..(1615): n is a, c, g, or t
  misc_feature (1618)..(1620): n is a, c, g, or t
  misc_feature (1622)..(1622): n is a, c, g, or t
  misc_feature (1629)..(1631): n is a, c, g, or t
  misc_feature (1633)..(1635): n is a, c, g, or t
  misc_feature (1638)..(1640): n is a, c, g, or t
  misc_feature (1643)..(1645): n is a, c, g, or t
  misc_feature (1647)..(1647): n is a, c, g, or t
  misc_feature (1649)..(1651): n is a, c, g, or t
  misc_feature (1653)..(1653): n is a, c, g, or t
  misc_feature (1655)..(1656): n is a, c, g, or t
  misc_feature (1668)..(1672): n is a, c, g, or t
  misc_feature (1674)..(1678): n is a, c, g, or t
  misc_feature (1686)..(1686): n is a, c, g, or t
  misc_feature (1694)..(1696): n is a, c, g, or t
  misc_feature (1721)..(1724): n is a, c, g, or t
  misc_feature (1774)..(1774): n is a, c, g, or t
  misc_feature (1815)..(1815): n is a, c, g, or t
ggcgtcgccaacggcatcgcttgcccgctctgaaccactgagccagtaccagtccactgttggatcggttgctgcacttgtgcggcggcggtcggctgcgccgcccaaggcggcaaagcgggacccgtcgagacggcgtcctgcggggcttcaacttcttcgccgttcgacgaatgatgatgtcgtctgtgatgtctcgtggaatcgccattcgagtattcaatgaagtcgcccgaaggcgctcgatacggttcgattttgtcgacttcctcggctcccgaggcgtccagcgaattaatcatgcgttccaagttgtcgttctcgatcaccgtctgcgtttcgctcgatacccggtgcgaatggtggtgaggcgatcccgtggacgcgacgtcgctacgctcgctaacctgcgacgccgcttgcctggtttcgtacagcgcagactcgtacgacgtcaacggcttgcgcggacgtagctgttgctgcgccgtgggctctgtggaaacatcgatgggcatcgagaccccggtcgggtgactggatgcgagcatgtctctaaactcactctccgccgccggtgcggccggtgccgccatcgctccgttcgccatcaaagatttgatcgtcgcgtccaagtcgtcgatattcgccggcgcgcccgtcgggaacagcgcgcgcgcctgcggcacgatgttgaaaaactgcttcgtcatcgtgctcagcgtctgcgacgtgaccgttcccggattgaacatcgcgttacgaatctgtaaccgcaaccctctgagcgccgtcatctgcgtcggcgtcggcgtcatccccgtcgccgcatccgcccccaaccgcgccctctccgtcgacgtcgtcccccaccgcgcgatcgacgcctcgcccgcgcgcgctcccctcgctcgcatcgctaactcctcccccggcaccggtcgccacgcctcctgcagcgtctcgctccggtgcgtccacaccccgatcgacgcgcacgccgcgagcgcgcacgcgccgcccaccaccatcgccgtccgcgtcgtcccgcgcgtcgtcccgccccgcgcgcgtcctcgcccgtcaccgcgcgcgtcgccgtcgtccccgagcagcgccgccgtctccgcgcgctccacgtcccggtcgtcgcgcgtcatggtgttggccctcgcgctcgccgtcgcgccgtccgtcgtcccgcgcgtcccgcgtccgagcgtcgaccgcgcgcaccgcgtcgaccgcgcctcacgcgcgcgtcgcgtcccgcgtcgccgcgcgtcccgcgtcgcgcgccgtcgtgtgcgcgccgtttgcctcgccgaacgtcacattagtgttgagccgaaatcacactcgcgcgcggcgctcgtcgatattcacacacccgggtgtttcagcgatcgcgtgagcggcgaaaccctatttaatttacttcnnnacncnnnnnnnannncnnacanncnnncnnnnnnannnnnnancnnnnnnnnncncncnnnnnnnnnnnnnnnnnnnncgnnnnnnnnngnnnnnnnnnngnctcgnnngncncgnnnnnnnnnnnnnnnnnncgnacgncgcgncncnnncgnnnnncgncgnnngncgncgnnngncgacgannnannncgnnncgnnncncnnnancnnccgcgacgacgnnnnncnnnnnacgacgangacgacgnnnggcgcgaacgatgatgatgaccgcnnnncggtgcctcgaatggcgaacgcgaatcgcgcgttcgtgtcgccgtacatnggtgcgaacggcgcgaacggcgcgacgcgcgcgcctctgtncgcgcggcgcgcggtgaaagtcgccgggtgcggacgggagaccgccggggacgatgcggcgcggcgatgcttctcggcgctgtacgcgaagcgcaaggcgggcggcggcgggaagcaaaggtcggcgaagacgttcgtggacggcgtggtgatcgcgcgaggcgcgcgcgagcaggcggagctgtgcgatatgcgagggaaacgggtggcgagagggtgcgcggggacgatcgtggaggggacgacgtgcgaaatcggacagtacgaggtggaaatcggcgaggcggtgcgcgcggaggacgtggactcgggcgcggcgttctcgcgcggcggcgcggcggtggcgccggagaaggtggtcgtcgcgaacgagcagaaagtgaaatcgttcgtggcgccggtgcgcgggatcggcggcgccgtcggatcggcgacgacgtcggaggcgaagaagacgttcgcgccggaggcgccgttgcacagcgacgtcgcggacggggcgctcgtgttgtcgacgctcgacactgatttccatcgcagagattatcgcacggcgtgtgcggtggtgtgcgatccgttcatatcgaggtttctccgcccgcatcaacgcgacggcgtgcagttcatgtacgaagccgtcatgggactgcgaacgagcgtgcacacgaacagggcgcacaccgggtgcttgttggcgcacgaaatgggtcttggtaaaacgttgcaagtcatcgcgctcgtgtggactttactcaagcagtcaccgttcaagcgcggccaaccgacgtgtcgacgcgtcgtcgtgtgcgtgccggcgtcgctcacggggaactgggccttggagtttcgcaagtggctcggcgaggaacgctgcgatccaaaagtcgtggaaggcggtgataaggaggcgagaaagagtttcgaggaattcgcgcttccatcgcagcgcagatacaacgtgttgattacatcgtacgaaaccttgagagcgcaggcggacgtcgtcgcgagggcgaacgtcgacttgctcgtgtgcgacgaggcgcatcgcctgaagaacgcgacgcagtccacgaaaggcgcgcaagcgctcgcgtcgctcaagtgtcatcgcagggtgcttctgacgggcacgccgattcagaataacttggacgagttgtggggtgtgatggacttcgcggcgcccggcttgctgggagacctcgattcgtttcgcaaaatttattccgggccgatcgagaaagcgagcgagcgtggggccaaggaagaagttgtgcgaatcggtaacgcgcgtcgcgaagaggtcggtcgtttgatcggccctttcattcactcgagaaaagcggatgagatcaacgcgtcgctgctgccgccaaagaccgagtacgtcgtcttcgttcgactttctgaagtgcagaaaggcttgtacgtcgaccaactcaagcaaaagtcgatgctttcgatgctcgggcgaatcggcaagacgcaagatgcggaatccatctcgccgcttcaggcgattcagacgctgcaaaagctctgcaacgcggcggcgctcgcgactgaggtgagcgatccggtggcttcgtcgagcaaactcgccgtgttgcgcgccatgttccgggcgctcgccaacgatgaacgcatcgtcgtcgtctctggcttcaccacgacgttagacctcatcgccaagctttgcgagagcgagcacctgaagtatgatagattacaaggttccacgccgccgaaagagcgcacgtccattgttcgcacgttcaataattctggcaagattttgttgctctccacgaaagctggaggtgtcgggcttaatctggtcggagcgaacagattggtactagtcgactcgtcgtggaatcccgcacacgatttgcaagcccaggcgcgcgtgtggcgagaaggtcaaacgaaaccgtgttccatctatcgcttgctgagcacgggaacgatcgaggagcgcatgtttcagcgccaagagctcaaaggcgcgctcgcgcgaacgctcggattcaaatcaacttctggtaacaacaactccgccggatcgagctccagcacgttcacgcaagccgaactgcgagacctgttttcgtacgtcaaggacacgcggtgtgacaccgccgaccggatcgccgccatgacgggcgagacgcccgaccac

SEQ ID NO: 1024 - DNA, 4000 bp, Escherichia coli
  misc_feature (1275)..(1275): n is a, c, g, or t
  misc_feature (1280)..(1280): n is a, c, g, or t
  misc_feature (1295)..(1295): n is a, c, g, or t
  misc_feature (1325)..(1325): n is a, c, g, or t
  misc_feature (1328)..(1328): n is a, c, g, or t
  misc_feature (1986)..(1986): n is a, c, g, or t
tttaggcgcgccttatacttcggctcgaattactactcaaggaaagcagtcgttcaaatacggaagaatagatatacgagcaaaggttccttatggatctggaatatggccagcactatggatgttgggtgataacttttctacagaaggctggccgagctgtggcgaaatcgatctaatggaactgatcggaggtgatggttataacgatcgtactgtctatgggactgggcattggtcaaataatggtagtcatgcttcgcatagcggaaataacagccttacctctggtaaatacaatgacgaatttcatgtattctccatagtttgggatagcggatctattaaatggtatagagacgatattcagtatcatacgttgaacatctccaacctaggagcgtttaagaagaaatttttctttatcctaaacattgccgtagaaggaaactggcccggtccagtcggcccttcaacaacattcccccagtacatgctggtggattatatcagagtatttcaataattactaactataaataatgcttaacatgaaaaaaatctacgctttattaatgctggccctacctatgttgggttttgcacaaaaagacgttacgtttatcgttgatatgcgtgactatgcaggttcttacactactgtacaccttaatggtgattttaacagttggtgtggtacttgtaatccaatgactgattcagaaggagattctatctggaccgtaacgcttcctttgactgctgattcgattgagtacaaattcactttggacggttggacaggtcaggaaaacttgacttcaggaactgcttgtactaagacttctggtatttacactaaccgttttgcagccttcactggcgatactattctacctggtgtagcatgggaatcttgtgcagctaaagcaggacaagtttatgtaacgatgcaagtaaacatggaatttgagactgttgattctactggtgtattcctaggtggaggttcaggctttggtactccaggtcaaaatctaatgcatcacatcggtgattcagtatactctatcacacttccacgtgatacagggttcttctcgttctttacattcatgaatggtaactgtccgagctggggatgtaaggaaaatcttgcaggaaagccttgtggtgaccctgcaaactataatgatcgtagtgttggttccgccctatacggagacttccacttgacaacttgttttggacaatgttcaacagatggctcttgtnctacncctccttcaccggtnaatgtaacattccgttctgatcgtacaaantcnccatctttcactgatgcgtacctttctggtactatgaacggttggagtggcgatgctacggcaatgactgatgctgatggtgatggtgtttatgaagtaaccgtatcacttttaccgggtgcttacgagtggaaatttacagctgataactgggcggttcaagaaaacttagaccctgctactagtgattcagtttgtactatcactcaaggtgcatttacaaaccgttatatgatgttgggcggaactgcggatacgactttggagatccacggttgggagcaatgtggtaacgcatctactgtaggcatcgatgaagcaacagctgaattcgttgtgaagccaaaccctgcttcagatgtattattcattgagaacactactggtactgcttctaccgttgcaatctacaatgtaacaggagctaaggtgatggagcaaaactttgaggcgaatactcgtcttgatgttgcaacattgccacgtggtatgtacatcgtgcgtttacagagcgaggatacggatagtgtaattcgtatttcacttaactaaaatctaatttggttagtaagaaagtgttaaagggacccggtaacgggtccctttttcatttgtaaattgctgtatgcgaagattcttatataccgttctttttgtngcctgttcactttttgcaagcggccagtccatacgtcatataggtgctgctgagggactcaataatcccacagtgtattccatagttcaagacgactggggttttgtttggataggaactcgcgacggtttatataaatacaatgaaggtcgcgcacgttcatttccttttctagattctacagattttcgtagatcgaacaatgtccagagcttattagtcactcaagattcagtcctgcttatagggctgcagctaggcggcataatgggggttgatcttgaaagtcttcggcctattccggataataagattccacaacttccaagagaggtatcaataatctcccttcaccaagattcggaaggaactatatgggcaggaagttctggttccggaatattccaactcagactgggtagtgaagactgggagcgtttcgtatccgatgaatatgcggaggaccttaaattcatatttgattttgaagatcaaggagataccttatggatcgcaacaagcggtgatcatctgctgtattatttgaaatcacaatcttctgtttatgcgctggaggcaaataaaagcgtgagttcgtttcgaaaatcggttgatgtatcaggcggaaaagtcattttttctgttgaaggaaccggcgtttttgaattgaccggcgatgtgttttatgaattggcgattccgaccaagggaacccaacgtgacgccattttttatgaaggcaacgtatggatttctactgatggatatggcgtataccaatggaacggtagtaccgctcagcattttacgaaacaagatcctacctcaggaattattacggatcaattctatggaatatatgaagtgtatgatgcgctctggttgggaacctataatggaggtatcgcccaattccctgtaaaaagtagtgccgtatcgttactgccaaagcccaagaaattcgtcgcttcgagcattcagagtgccattagcatggtaagcgataacgatttatgggttggttttgatggtgatggtcttgtacgctatcgagagacagaatctatatggcagcccactacttttgataatccctttttaccggacgtggttacaagtcttgagttttatcaagacgaattgtggattggaagtctgggtcaaggattatttgtgatggacacatcgggtaccatcaaagaacatttcttagcctactctcaatcttcacgtggactcgaaaattcaaacatttggtctttggagaaaacctggggcgatagtttatggattggtacgctttatggcttgcaattctgggatggggtcgaaattacatcgccatttgacaccccgtggcgcgtaggtcgaaacataatggatttagagtttgatggggatttactttgggtaggcacagaatttcaaggcatttataccctctcaagacaaggcgccattcagagcataccaataaaaaattcagtcttggacattgagacctatttaaattataagctcgtaggtaccgaaggaagtggggtgttggtgattgacgaaggtagagtcatcgatacaattattgggaaagagtcgtttgtgaattgctattccattagcgaaaaaaagggaagggtgtatgccgcaacaagtgtcggccttttagaaattaaaataaatgaccagttggaatggtcctatgaagtgttcaaagagctagatgaactgcaagtaggtctctcgaataggaaagcgttgttatggaatggggaacgcctattgttgggaggtactcaaggcgttgttgaaatttcaactgaagattcctctgcagcagcgattcctccaatacttattacgggagtatttgcagataatcttccaaaggctattcccataataaaggacggtgtttcttcagcgcagacggtagtattcgcggcaggaactaaatctgtgcgttttaatttcgaattggccagcaatacgctccggaatggtataagcaatgcat

SEQ ID NO: 1025 - DNA, 4000 bp, Escherichia coli
  misc_feature (2793)..(2793): n is a, c, g, or t
  misc_feature (2799)..(2799): n is a, c, g, or t
  misc_feature (2817)..(2817): n is a, c, g, or t
  misc_feature (2826)..(2826): n is a, c, g, or t
  misc_feature (3012)..(3012): n is a, c, g, or t
  misc_feature (3466)..(3466): n is a, c, g, or t
  misc_feature (3481)..(3481): n is a, c, g, or t
  misc_feature (3550)..(3550): n is a, c, g, or t
  misc_feature (3583)..(3583): n is a, c, g, or t
  misc_feature (3589)..(3589): n is a, c, g, or t
aactccttgtttgggcttctggcaatggtttcataagaaaactcggtgatttttttaattgaatgctttccaaaatgagcccctacccagggcataacattagtaaaggcaatcgaaatggtgtctccttgtccaatcgtagcaaaaaattcaactccatcataatactcatccaaagactcttgagtaagttttgaacgggcagtgcttatgtgtttagaaaactccagatgaacggactcaaatgcacattttagattacgatcatcagtatggttggtcatcacagtgtaatgaatttatccaaaaatagcttccatagaggtattcatggcttctctgacttcagtatcgtcagtaataggctttatcaaagctatttgacatgcgtcttttatatcaacacctttgcttatcaaaacaccagcataattcagaagtcttgtcgaggcaccctcatcaagaccatgcccgacaagtttacgtgtggcatttgcaaattgaactaactttttagctatttcaggatcaactcctgactcattacttacaataattgcttctatctcagggcttgcaaaatcaaaatctagggctacaaatcgttgtttagtagactgcttaaggtccttcattattgactggtaacctgggttatatgaaataaccaactgaaaatctggatgcgcttttaatagttcgccttttttgtcaatcatcaattcacgacgatggtcagttaatgaatgtattacaaccatagtgtcttgacgagcttctacaatttcatcaagatagcagattgcgccatgacgagcagcaatagttaatggaccatcaacccaccttgttccatcagagtcaagtaagaaacgaccaattaaatccgaagctgtaatatcttcattacaagatactgtaataagtggcttatcaagtttgtaagccatatgctcaataaatctagatttaccacagccagttgggccctttatcattaatggtaggcgtgaactgtatgcaaccttatagagatcaacttcattaaattgctcttgataataaggactctcaactaccttaaactgacttatatcaaaattagccataactattctccgaataatcgtttgtaaaaaatataaacactttcgccattttaatgttaaaaacacacattagttggcacattcattttgcaaaaataacaatggtaagcataaaaaaattaaacagagaccaagcacttgacctaataagaggaattgcaatcataatgatgatactgtttcatttaatttatgatctaaacgaattcggctatacaaatattcctctatctaacttttggcttaccagctattggcgctacttaattgttttcttgtttctaaatgcagtaggaattagtcttgtgcttgcctacggaaataactttaacttaaacaaatttataaaacgcctttttttgcttggtcttgctgcactctcagtttctatcagcacctatataatgtttccagatgcttgggtctatttcggcatcctgcatttaatctggacaggaacattgattgctatcttttttacacaactgcctaaaatttctctatttattgctgccttaatatttctatctggttatttaaatttaactgacctttcttttgtaagagtgttgctatcagattatttgccattatctagtgtagatttctacccacttttcccttggatcgcatttatatttactggcatttatctaggtcataatccgatatataaaaaaatatttttcatgaggctacccctattacaacttataggtcaacattcgttgattatctatttattacatcaggtaatacttttttccttagtaggtgcaatttatttcttattcagtcaataaattacaccctctactagacattttacttatgaacacctaacttatctctccacccaggatataagttgtctgcatcgcctgggaatgattcaaatgctcttgcaaattcatggtgttcttttgcaaactcaattgggtctgagcctgatttccagcactcataagcttggcgaagagatgttgctccagctgcaggagaatcaatatgaccataagagccaccgccagaagtattgattacattaccatggcccaaattctcaaagaaacctggaagacgcagtgcattcataccgcctgaaattattggtgtagtaggtttcataccaaaccactcctgatggaaaaaaggaccatctgaactgtcacgttcaatcatatatgcaatgtttctatcatccgcaccgccttccatttttccgtaccccatagtacctacatggataccagaagctcccattaagcgtgatagctttgcaagtacaaatgcagtataacctctaacggctgatggagaagttactgcaccatgaccagctctatgataatgtaggtattgattaggataattacgtcgcgctgtagtaaccatacctggtccaccaacatacccatcaactaggaaggcaacatggtgagcattctcagcaaatgtttcaagaatataatctgcacgggcacacatttcgtggtgatcatctgcagttatattggctgagaataattttgcttcacctgtttcgtcttgtgcacgtctcattgagtcggctaccaaaggtgtaacatctttaattcttgcatatacttgatttccttgtggttcatcattcttaataaagtcaccacctagccagaactggtatgctgcctttgcaaatggntcaggncgcaaacccaatttaggnttaattatngtacctgcaatgtaaccaccgtctgttcgtgaacgacctaatagattccataaatctgtaatatcttttgaaggaccatcaaaaatatcaagcattgattttggaacccaaaaatcttgcatctgtgcacatttaacatcacccataccttggttgttaccaatagcaagcgttaagaatgatacnaccatcgcacgaccatcaattatattgcgatcaaaaagatcatttggataggcaattttcataatgccattagtttcatcgatttcgtaaaccatcgcatctaaatctttagtaaagtcgtcagttgtcgaaacttcaacattagtcccagtagatgactctgctgcaaagtgagcagcagttgataagtaaccataaccttcggctggtgtcatagtataagcaaccaatatatgcttaccttcagcaattagagtgtcttcgtctaacgacaagtcagcatatctattagattgatccattttcttaactcctatttatttaaataaggttgattatagattgagcaataaataatgtaaaataatatttatttataaaatcattagttattattatgattaattacactataaaacaactttatagttttgaagcggttattagattgggnggctttacaagtgcnagtaaagagctacatattacacaaccagcagtctatatgcaggtgcaacaattacaagacaatattggngcaaaaatatttaatgttaatggaaaaaaaatnactccnacttttattggtaacaagatttatgagacggcagttaaagctatcaatgttgttgagaactcaaaactagaaatcaatcaaagtttaaatcctgactctggtcaccttcaaattgcagttgctacaacagcaaactcatttgtaagcaatcttttatcaaaatttaaaaaagaatttccaaaaatgactttttatatggatgttaccaataggcattcactacttgataacctaaaaaatcataatgcagatatagtgataatgggcgaacctccaaaaaatatcccattaatttctcacgcatttatgaaaaatccattgatcgctattgctcatcctgaaaatgaacttctaactaagaatatagtcacaattaaagacttagccaaagaaaccttacttacaagagaa

SEQ ID NO: 1026 - DNA, 4000 bp, Escherichia coli
  misc_feature (96)..(96): n is a, c, g, or t
  misc_feature (103)..(103): n is a, c, g, or t
  misc_feature (273)..(273): n is a, c, g, or t
  misc_feature (598)..(598): n is a, c, g, or t
  misc_feature (1266)..(1266): n is a, c, g, or t
  misc_feature (1989)..(1989): n is a, c, g, or t
  misc_feature (1991)..(1992): n is a, c, g, or t
  misc_feature (2163)..(2163): n is a, c, g, or t
  misc_feature (2553)..(2553): n is a, c, g, or t
  misc_feature (2675)..(2675): n is a, c, g, or t
  misc_feature (2927)..(2927): n is a, c, g, or t
  misc_feature (2943)..(2943): n is a, c, g, or t
  misc_feature (3207)..(3207): n is a, c, g, or t
  misc_feature (3579)..(3579): n is a, c, g, or t
  misc_feature (3582)..(3582): n is a, c, g, or t
  misc_feature (3722)..(3722): n is a, c, g, or t
  misc_feature (3724)..(3727): n is a, c, g, or t
  misc_feature (3730)..(3730): n is a, c, g, or t
  misc_feature (3733)..(3736): n is a, c, g, or t
  misc_feature (3738)..(3738): n is a, c, g, or t
  misc_feature (3740)..(3742): n is a, c, g, or t
  misc_feature (3746)..(3748): n is a, c, g, or t
  misc_feature (3750)..(3751): n is a, c, g, or t
  misc_feature (3753)..(3755): n is a, c, g, or t
  misc_feature (3757)..(3763): n is a, c, g, or t
  misc_feature (3766)..(3770): n is a, c, g, or t
  misc_feature (3772)..(3773): n is a, c, g, or t
  misc_feature (3775)..(3775): n is a, c, g, or t
  misc_feature (3780)..(3780): n is a, c, g, or t
  misc_feature (3783)..(3783): n is a, c, g, or t
  misc_feature (3789)..(3792): n is a, c, g, or t
  misc_feature (3794)..(3795): n is a, c, g, or t
  misc_feature (3797)..(3800): n is a, c, g, or t
  misc_feature (3803)..(3803): n is a, c, g, or t
  misc_feature (3805)..(3806): n is a, c, g, or t
  misc_feature (3809)..(3813): n is a, c, g, or t
  misc_feature (3815)..(3817): n is a, c, g, or t
  misc_feature (3821)..(3822): n is a, c, g, or t
  misc_feature (3824)..(3824): n is a, c, g, or t
  misc_feature (3828)..(3828): n is a, c, g, or t
  misc_feature (3831)..(3831): n is a, c, g, or t
  misc_feature (3833)..(3833): n is a, c, g, or t
  misc_feature (3835)..(3835): n is a, c, g, or t
  misc_feature (3837)..(3837): n is a, c, g, or t
  misc_feature (3841)..(3841): n is a, c, g, or t
  misc_feature (3843)..(3846): n is a, c, g, or t
  misc_feature (3848)..(3848): n is a, c, g, or t
  misc_feature (3851)..(3851): n is a, c, g, or t
  misc_feature (3855)..(3858): n is a, c, g, or t
  misc_feature (3860)..(3860): n is a, c, g, or t
  misc_feature (3862)..(3862): n is a, c, g, or t
  misc_feature (3864)..(3867): n is a, c, g, or t
  misc_feature (3869)..(3869): n is a, c, g, or t
  misc_feature (3871)..(3872): n is a, c, g, or t
  misc_feature (3874)..(3875): n is a, c, g, or t
  misc_feature (3877)..(3881): n is a, c, g, or t
  misc_feature (3883)..(3885): n is a, c, g, or t
  misc_feature (3888)..(3888): n is a, c, g, or t
  misc_feature (3890)..(3890): n is a, c, g, or t
  misc_feature (3892)..(3894): n is a, c, g, or t
  misc_feature (3896)..(3899): n is a, c, g, or t
  misc_feature (3901)..(3904): n is a, c, g, or t
  misc_feature (3907)..(3909): n is a, c, g, or t
  misc_feature (3912)..(3913): n is a, c, g, or t
  misc_feature (3919)..(3920): n is a, c, g, or t
  misc_feature (3924)..(3924): n is a, c, g, or t
  misc_feature (3929)..(3930): n is a, c, g, or t
  misc_feature (3932)..(3934): n is a, c, g, or t
  misc_feature (3937)..(3947): n is a, c, g, or t
  misc_feature (3951)..(3957): n is a, c, g, or t
  misc_feature (3960)..(3965): n is a, c, g, or t
  misc_feature (3967)..(3971): n is a, c, g, or t
  misc_feature (3973)..(3974): n is a, c, g, or t
  misc_feature (3976)..(3979): n is a, c, g, or t
  misc_feature (3982)..(3983): n is a, c, g, or t
  misc_feature (3985)..(3989): n is a, c, g, or t
  misc_feature (3991)..(3993): n is a, c, g, or t
  misc_feature (3995)..(4000): n is a, c, g, or t
caaacttgcacagactccatcaggacctcaaaaatattgccattttttagtgccgcctctctgagacgttccatcattgagtctcgttctttggantggaacntgtgaaaattctccagatcatggatttgcatggtcttttcttcttccgttgaacgcgccagttcaatttctgcatcagtttcagcaggatttgggttaagaaaagtgttcacgcccattataggcagttctccggaatgtttaagagtttcgtaataaagtgattcctcntgaattttgttacgctggtacatcgtttccattgcacccaaaactcctcctcgttcggaaagtctgacaaattccgacaaaattgcttcttcaactaattcagtcaattcctcaatcagaaaactgccctgcattggattttggttgaatgcctgtcctaattcacgattgataatgagctgaatagcgagtgcacgacgaactgactcacccgttggagttgtaaccgcttcgtcgtaagcgttggtgtgaagtgaattacagttatcgtaaacggcataaagtgcctgaagtgttgtccggatgtcattgaaatccatctccnttgcatgcagggaacgtccggaagtttgaatgtgatattttaatttttgtgagcgttcatttgctccatacaaattacgcagtgtgacagcaaaaattctgcgtgctacccttccaattacagcatattccggatccattccgttactgaaaaagaagctcaggttacgcgcaaaatcgtcaatcgccaagccgcgtgccagataatactcaatcagagtaaatccattagcaagtgtgaaggcaacctggctgatcggatttgctccggcttcagcaatatgatatccggaaatgcttaccgaataaaagttacgtacatcgtttgcggtaaaatattcctgaatgtcacccatcatctgcaaagcaaaatttgtgctgaaaatacaagtgttttgcgcctggtcttccttcaaaatatctgcctgaaccgttccgcggacgttgtttaacaaatcagcctttatagcaccgtaagtttcattatctacaaaatgtttaccggacaatcccaacaattccaaacccagtccatcgtgattttccggacgttccatacgatactccggaggctctacaccctgttttttgtagcgttcttgaagcgttttttgcgctttttctaaatgcccgttttcacgtaaatgtttttctatttgctgatcaatngctgcattcatgaaaaaagcgagaaccactggagcaggtccgttgattgtcatggaaacggaagtcttcggtaaaagcagatcaaaaccagaatatagtcgtttcgcgtcatcaactgtgcaaattgaaactccggcatttccgatttttccaaaaatatcgggtcgcaaatgcggatttgaaccataaagcgtcaccgagtcaaacgctgtactcaagcgtgttgcaggctgatcgcaggccagcaaatgaaaacgccggtttgtacgctccgcaattccttctccggcaaacatgcgggtcgggtcttcgccttcacgtttgaaaggaaaaacaccaccggtaaacggaaaacttccgggaaaattttccaatcccaaccagcttgcaatctcgccccagtcgttaaatttgggtgtggcgattttaggaattttgagtccggaaagactgatgttgtgattcgaaattttcagttctttgttgcgaatatcaaagctgaaattttcgcccagatacgcctggttcttttcatgaaattcactcagttgcagccgcagtgattccggaagttttgaggttttttcattgtacagttcggccactgtatgagcagtttccggaatattttcaatcgggcagggctggagtatgttccagctatttttattttcggtttcccccagcatttgtttaagagttccgtgcaattgtccgcattcngnngcagtctgtgcgtttttccggacttcttttttgtagctacgtacgcagccggcgatttgccgtaaatattctttacggtccgacggtatcaactctgtaatttcggaaacagcaaattcagcttcatgactgcgtttccagttaagtgaatttttcttgatcaggatttcnatcaacttgtgataaaaccagtttgtgccgctgtcgttgaaacgattggcaaccacaccaaaaaccggcattgtttcagtagttgcatcaaagtcatttcgactgcgtttatactgtttgcccacggccagcaaagcatcctgtgctccgggtttgtcaaatttgttgattacaatacaatcggcaaagtcaatcatatcaatcttttccagttgagtagccgcaccaaattccggtgtcatcacataaacactcaaatcaacaaaatccgaaatctcggagtcgctctgaccgatgccggcagtttccaccaaaatcaaatcaaatcctccgcctcctgattttccggttgcctgcagtaagctaacagcaccttccagtgcagtagangtggccaggtgggaacggcgtgtggccagtgagcgcatgtaaacacggggatcgttgatggcattcatacgcatccggtcaccaagcagtgctccaccggttttgcgtttggagggatcgantgacaaaatcgctatgcgcttttcaggaaattcttcaagaaaacttcgcaccaattcatctgccagacacgactttcctgcacctcctgttcctgtcaaaccaatcaccggagcctgtgaattctccaccggagagtcttgtgagtggagtttattcaaaactttttgtactgcttcctgaggttccactactttattttcaggtgccagctgtgaacctttcacgttttgttcgatccaagtcagactatnagcaatatgctgaacnttttccgtaaccagtttgtctgcatgaggttcaaatttatccggcaaaacctgaaaatcagaacgtttcagcatatcagcaatcatgcccgtcaggccaagttcacggccgtcttcaggagaataaacgcgactgataccgtaatccgtcaattcctgaatttcactttgaatgatcacacctccgccgccggcaaaaacctgaatatgtcctgaacctttctcccgcaacaagtccagcatgtagcggaaaaattccatgtgnccgccttggtacgaactgactgcaatactttgggcgtcttcctgaatggcaacattgactatttcctcaacgctgcgatcgtggccgaggtgaatcacttccgcaccctgtgactgcattatgcggcgcataatgttaatcgcagcatcatgtccgtcaaataaactcgtggcggtaacaatacgaacactgttttttagtttgattgtttttttgacaggttggggcgagttcatcgttattttaattatttgagtttatttctcttccagttgccaattgataaattttcaacaaatcatcttcggtaacatcaatgaaagtgtccatttggctgagtgcataaacaaaatcagcatgatccactggtgnatnttcgctattagtgtagtctttttcggtttcttttgatagcaaaaatgcaggatagcgccgccaatgaaacaaggcattaaataaaagtgccaccaggagaatggttgtagtattgattgcaattggagtaaggatatacngnnnnccnagnnnntntnnntttnnncnncnnntnnnnnnngcnnnnncnntngcacngcnaggggnnnnanngnnnnggntnnaannnnnannnccanncnccanccnancncnggcncnnnntncantgcnnnngnangnnnncnanngnnannnnncnnntcngntnnngnnnnannnnaannnacnnccaatnncatnccaanncnnnccnnnnnnnnnnngggnnnnnnnaannnnnngnnnnncnnannnnccnntnnnnntnnnannnnnn

SEQ ID NO: 1027 - DNA, 4000 bp, Escherichia coli
gcacaagcgaaacccaagtaggtgcgccaagcaccggagcttgatttgcgggatatacattccaccaccggacaaaactggcaactgccacatctccataaatagaaatatctacgtcctctattgttgttacgaactccgtcttacctccattcaatgcttcttgggcttctcttgtcgctatctgattccgcatatttagtgattcgttggtctgacgcatgcctccagttatgtagactcgatcgggatgcattaactccgcttgtgctgcaaggtcaccctctaaattcccataagcctctatcaccgccatcacatcatccatatcgtcagcgagaagatctaacggcataaccaaaagtaatgttgcaacccacttagtcataaatattttcactcttaatctccttttattttttcaaaccgacttgcctatattgaagaatatacttgttcacacttatagattttgtccgacacaagagcaggtctggacgcagtaacgagggcataagcttgttcagaccatgactctgaattcaaaacatcaaatacctcacctaatcgatataacgtaggtgcaacagcaacaacattcagcaatggctgactgccactaccaattggctggtagacgtcaaattctatatcgtcatagccgttttcatgatatgcagactctaagttcttgatcgccgcaatatattgctggacatcggttggatttacttccaccaaacgagttgcccacgtgtctcttatttctcccccgtagccatcaataatttgccatgtctcattgccagctagcgttctattagcgcttaattcctcttgcagctgtcttattgaggcactgccgatcattgtgtcccatacttgcatagcatcagctacgctcggtacgaaggaaaagaattgcatttcaccaggtacctggtttcctgaaacagcagtgcaagctccagcgatcgtgacaccaagttgttcaaatatttccccatttaatttttggctagccacgtaactgctggggtcttgagctacaaggtttatgataccgactgcacccgttcccagtgcctcattagaggtatggtgatctgcaagtaagggcgaacaaaccactgtcaaaaccgttactaccaagctgcgacctaacgaacttaattttttcatcattgccattatctcctttttatattttctaactggcggcatcactgctataggccccagtgagtcacataactgttaaacaggtttctgtcagtgcaattttcaaaaatcccccctgagggcgtaccgacgctcgccggaaatgaggcatctagcctcttagcaagatccggccaatctcgccctactaacctgatagtgattcgcgtacccatctcagttccggcgggcgtaccaaacaaggcatgagaaagttgcatctgagtttccgatccagaatctgatctgcgcccgttagctgcgtacagctccgaatacacatcctgaattgaaacatctggagaaacagtgcaaaacctggcagccactcctgagacaagatttgcaccactatcgtaggcattcccgcttccgacagagtaattttttaagaaggtgcgattattaccgtcacaagctaacagctcatttaaatggtctctgggcccgcttggagaaaagctcgcagaagcaaaatgcgcaaaatcgtcccaataaacgaccctcagcgcccaattttctgaaaaatctgatccagaaacgggcgttctgtagaagactgcattaggtgctccgtccgcaggataatcgatggctcttgcaacagtgactacttcgtctattgagtgaccgtgtgcaatttcgcaagcagtcacaactataagactcccggaaggcagctcctgtgaccaagagaaatttgaaaaaagcgcaaagctagaaaaaaagattgtaaaaaaaagacgcgctagcctcataacgacccttccacaactaattttatctactcgttttagctcggtcagatgcatttggtcaagcaagaaattcaaaataatctctttctttaccgaacggtcataaaatggtgcgaaagacatcaatgtagtgcattttgttgcgcaggattgcactaaaatagtgcgcaaaatacattatcgcggtcctaggtcgttgctcatagatcagcaatgaatcggcaaaataaagtagtcacaaattcgaatggtaaaagactaatgctttaagatgttatagattccacgtgcaagatttgaaagctagaccctttcatctctcaagcaatcgaatgtaatccagcaatttaccaaaatgaaataaggggcagaaaatgagtctatctgatttgatcaagttaaaagatgaacaactttcgtttgaaggggaattgacttcagtcgtcctatctgatgagggtggaactatcactggcaagggcgacgcgactctctatggcgctgtgtatttgacttacaatttaacccctaacccaaagatagcgggtcaaggcgttatgaccgggaatgcatcggcgatcgatgattctggacaactcaacacggccatactgagtggggtgttcgatagatcaggacatgcgatgaaaatttattgcgtggacgacatttctgacggcaatatcaatctggcagttgttcaaatagacctgagatcaggaaaaattagagtagattggtcgcaactagataggtagattttacctcatgcttcgactgccaggccgttgagtgacttggcggccgaagcaagtgatgagggcttttctgttacttcattccaactaacgagcgagttgctctaagaacaccttacagaattcgagcgagtagtacgccctaactcattgcctagtcatcgttagacgatatcaatgcggatgataattgcttgagcgcgcgcagattgccttcaattttcggaagtgctcgacgccgtacggacattcgctctgaagttgctagttcactagctgaaatgcagctaccttccgcttcatcgatccgacctttcagggctaaatacacgcaaagattattgagatcagcgaaatctaacttaccattgaagtgcttttccgctgcatcgatatctcccttcgatagagcaggcccacccgctgcatctccaaatacgtgataagaagaaccgagcgtcgcgccagaaagagtaatagcaagggttgtaaaaattgctttaaaagtttttggatatttcattggaatagcctcgtagtgaatttaaaagtttatatatgttgttatgcacgctgataagcaataggagtgccaacatttggctaagatgctattcaaatttatacttaaaaatattttcaataaattcaacagtttgaaggcgaacagcttaaaaaaacatgccatttgactgctcaaatgattacgcgtaaatgcttgtgattggtgcgtaggtgctttacgggtgcaagatggacgacttttggaaccattctgaataaagtgggacatccccgaaggtgggtgctgccagagtgcgattgggttttaaaagggggtctatttggaccactgcggcgcaactgaccacaactgattacaatcgcaggcaactgataaagttaggtgttatagtaggaaacgtgacgcaggctgttgtggttgattatctgcgagggactcataatccgtcggtcccagattcgagtcctggtgggcccaccaactaaatcaatgaattacacctccctcgcagtaactccctaatccatgcggaccaaagatgcaggccatcatgctggtttcgctcgcccccggcaagcgccgcggcgaaatcctgaatctacgcttttagattgcgcaaatcgatcgtgcggggcttggaaagatcgaagacgtatcgcatcacaagtggttctcgatgaccaagcgttatagccatcttcgaagatcataattatcgaactggctgatggatggtg

SEQ ID NO: 1028 - DNA, 4000 bp, Escherichia coli
  misc_feature (62)..(62): n is a, c, g, or t
  misc_feature (67)..(67): n is a, c, g, or t
  misc_feature (94)..(94): n is a, c, g, or t
  misc_feature (124)..(124): n is a, c, g, or t
  misc_feature (178)..(178): n is a, c, g, or t
  misc_feature (218)..(218): n is a, c, g, or t
  misc_feature (220)..(220): n is a, c, g, or t
  misc_feature (412)..(412): n is a, c, g, or t
  misc_feature (478)..(478): n is a, c, g, or t
  misc_feature (538)..(538): n is a, c, g, or t
  misc_feature (691)..(691): n is a, c, g, or t
  misc_feature (784)..(784): n is a, c, g, or t
  misc_feature (1988)..(1988): n is a, c, g, or t
  misc_feature (2311)..(2311): n is a, c, g, or t
  misc_feature (2323)..(2323): n is a, c, g, or t
acatctgatgattgaaaaatctaattacgaaagtcctgctaaagcttacgaaacaattaatnatatntataaaagtctggaatctaaggaaatnctatttgaagatgctgtttctcaatccagngaagatctcgcatcaaaagatataggcggtgacttaggcttatcatcaggtgangcatttcctgaagaattcgaaaatgcaatcttgtcaatgnanctggattctattagcccaattattgagcttgaagactcactgcacattcttaaattaactgaggtgattaaacctcaaattaaaacaaaaacagaaatgtctgaaacactattgagcgagcttatcgatgccgaagcgttggctttgatgcaagatgattttttggaattagaatcattggtgcttgaaggngtctcattaaatgcgttagcgaatgctattgatgccccaattcaagttacgggcttgaaggatatngaatctattgaacttgatggcttcgctgaaatctcatcatcagaattatttgatgcatcnatattgcctaacaaaatagaaatttttgaaggcgatgaaagttatgcttttgtgatgttgactcaggctcttcaaccaagtgtacgaccttttgttgatgttgcagatttggccattcaagaagtgcggaatgaaaaagcaaatttaattatnaatgattttgctgatgatgctgaaagtattatcaatggtgaaaaagcactgccaagtcaaaacgggtttaccattgaaagttttaaaggcgtnaaacgattttcttcattgctcccaccagaaattattaactcaacatttgaatcatctctaggcaccttggtttcaagtgaagcatttaatggagatcgttattgggctaagtcttccaatgaatcgataccaacaatagacgagcttggggagtcaattgagcaataccaaggtttttataacgagagtttaagtcaacaattttctggatttattgatcgagccttcaaaaaaggccaaaaagttcgtctagaaaatattactacaaattaatcgctatattcttcaatagacattgcagctgtattaaagccgccatcaacgtaggtaatttcacctgttacaccgctagctaaatcagaacataaaaaagctgcaacattacccacttcccgagttgttacaaccctgcgaagtggagctctgttggcatagtttgttaacatttttctgaagtttttaaccccagaagcagccagagttttaattgggccagctgagatagcatttaccctgatgctatcaggacccatagctgcggcaagaaatctagtatttgcttctaagcttgcttttgcaagacccatgacgttgtaatttggaagtgactgcatcgaccctaaataggttaaggttaatagagcagcattttcattgagcattggtttagcgcccttggccatagctgtaaagctataggagcttatatcatgagctatctgaaaaccctctctagtggcaacatcaacaaagttaccttctagttcatgagctggcgcaaaaccaattgagtgaacaaatccatcaaaagacttccattgctttgaaagttcctggtacattcttgtaatgctatcgtctgatgcaacatcacactcaaatagcaaatcagtgccaagttcagttgcaattttttctacgttacctttcaacctttcgttttgatatgtaaaagctagttctgctccttgagcgtgcattgcttgagctataccagctgcaatagaatgtttatttgcaagcccagctattagtatttttttattttctaacatctatttatatataccttgtattaatttttaccgatttaattatatatgagttcaattatctttaatcaaatgaattaattgaagcaagtcctaatagataattatgcattaaaacttctaatctcatgaaaacaaggttatgatgcccntcagcaagttttgtaaagatttgtgcaccataaaaaacttaggagtattttaaatgattgatttaaaaaaatatttattcagcgcttttgcagtaatctctctttctgtgcctttagccattgctcaagactctgaagaagatgttgaagaagttattgtaactggatcaaggattgttgatcccaacattattagttcatctcaaatcgctgttatcgatgggcaagatataattgatgctggtgtaactcgagttgaagactatcttaatgatatgcctcaaatttctcctggccaatctattactaattcaaatggctcnaacggaactgcnacagttaatttgagaaatctgggttgttcaagaacattggttctgatgaatggcagaagacttgtccccggaactactggtggcggaagctgtgctgatttaaacactatcccaactcttcttttaaagaaggttgaagtgttaacaggtggcgcatcatcagtttatggttctgacgctgttgctggtgttgttaactttgtcttagatgatgagtttgaagggtttaaagccgcttactcccatggtttttacaatcataaaaatgatatcagcagcttaagagagctccaaagaagctatggttatgaaaatgctcctaaagatgtacaaactggtgatactggtaaattttcaattgcttttggcggtgacatcaatgatggtaaaggtcatgtaactgctttctatgagcacaccgatacaaaaccaatgcttcaaggtgaatttgatattagtgcttgtgcgctaagtggtggtattggaagatgtggtggttcatcaactattcctccaggaagatgggctgattttagtggttataagaatggtggatttgtaaatgttgatccaacagttactggtgttgactggaaagtgcaaggaaatgattttgttaatagagatggtcaaacatataactacaacccaacgaacttcttccaaagacctgacgacagaatgaatatgggattctttggaaaatatgaaattactgataatgcagaagtttatttagatttcaccgcaatgaaatctgaatcaaacgctcagattgcatattcaggtactttcggcaatatcgaatcattgccttgttataatgcattgctttcagctcaacaataccaagttgcctgtgctgactggataggaatgggtggatcacatgcgcctgattttgcaactggcgcagctgcattagcttatatcaatggtttgaatacagcagtggctgatggaactattcttggatacagcgcaccattaacctctttaaaaagaaacgttgagggtaaccctagacagagcattacaacatacaagagctataacacaactctaggaatcaaaggcgatattaatgatgactggtcatacgacatttattatcaaaactcagctgttaactatggtaatgaatacaggaacgatctttctgtaatagcaattaaccgtgcggttaacgttattagcgttgctggcgtaccaacttgtgttagtaagcttcaaggcattgatgcaaactgtgttccatataacctatttcaaggtggattacctggtgatgccggaattcaaggcgtaattgatagcggtcaaactgctcaagattacttagctaaatctacttttattaacggtgatggaaagcaaaaaattctttcaggatacgttacaggtgatacagggttcactctcccaggagctcctggttcagtttcattggttgctggttttgaaacaaaagaactttcaaccgactttagacctgatactccaactcttatgggcgatagatctggttcaggaggagcgacacttccaattggcggtaagtatgatgtagatgaattcttcctagaattaggtattccagtgatggataatctaagtgtagaagttggatacagaactgcagattactcaacagggaatgatactgactcaactaaa

SEQ ID NO: 1029 - DNA, 4000 bp, Escherichia coli
  misc_feature (1986)..(1986): n is a, c, g, or t
  misc_feature (1988)..(1988): n is a, c, g, or t
  misc_feature (1991)..(1991): n is a, c, g, or t
  misc_feature (2139)..(2139): n is a, c, g, or t
  misc_feature (2142)..(2142): n is a, c, g, or t
  misc_feature (2382)..(2383): n is a, c, g, or t
  misc_feature (2385)..(2385): n is a, c, g, or t
  misc_feature (2388)..(2389): n is a, c, g, or t
  misc_feature (2391)..(2392): n is a, c, g, or t
  misc_feature (2394)..(2405): n is a, c, g, or t
  misc_feature (2407)..(2411): n is a, c, g, or t
  misc_feature (2413)..(2417): n is a, c, g, or t
  misc_feature (2420)..(2420): n is a, c, g, or t
  misc_feature (2423)..(2425): n is a, c, g, or t
  misc_feature (2427)..(2427): n is a, c, g, or t
  misc_feature (2429)..(2440): n is a, c, g, or t
  misc_feature (2443)..(2446): n is a, c, g, or t
  misc_feature (2448)..(2449): n is a, c, g, or t
  misc_feature (2451)..(2453): n is a, c, g, or t
  misc_feature (2455)..(2458): n is a, c, g, or t
  misc_feature (2460)..(2464): n is a, c, g, or t
  misc_feature (2468)..(2469): n is a, c, g, or t
  misc_feature (2471)..(2473): n is a, c, g, or t
  misc_feature (2475)..(2484): n is a, c, g, or t
  misc_feature (2486)..(2497): n is a, c, g, or t
  misc_feature (2500)..(2505): n is a, c, g, or t
  misc_feature (2507)..(2510): n is a, c, g, or t
  misc_feature (2512)..(2517): n is a, c, g, or t
  misc_feature (2519)..(2525): n is a, c, g, or t
  misc_feature (2528)..(2530): n is a, c, g, or t
  misc_feature (2532)..(2532): n is a, c, g, or t
  misc_feature (2534)..(2537): n is a, c, g, or t
  misc_feature (2539)..(2541): n is a, c, g, or t
  misc_feature (2543)..(2550): n is a, c, g, or t
  misc_feature (2552)..(2557): n is a, c, g, or t
  misc_feature (2564)..(2567): n is a, c, g, or t
  misc_feature (2569)..(2569): n is a, c, g, or t
  misc_feature (2571)..(2574): n is a, c, g, or t
  misc_feature (2576)..(2576): n is a, c, g, or t
  misc_feature (2580)..(2580): n is a, c, g, or t
  misc_feature (2583)..(2583): n is a, c, g, or t
  misc_feature (2585)..(2585): n is a, c, g, or t
  misc_feature (2589)..(2589): n is a, c, g, or t
  misc_feature (2596)..(2597): n is a, c, g, or t
  misc_feature (2600)..(2600): n is a, c, g, or t
  misc_feature (2602)..(2603): n is a, c, g, or t
  misc_feature (2605)..(2605): n is a, c, g, or t
  misc_feature (2609)..(2609): n is a, c, g, or t
  misc_feature (2611)..(2611): n is a, c, g, or t
  misc_feature (2614)..(2615): n is a, c, g, or t
  misc_feature (2619)..(2619): n is a, c, g, or t
  misc_feature (2622)..(2623): n is a, c, g, or t
  misc_feature (2631)..(2632): n is a, c, g, or t
  misc_feature (2634)..(2635): n is a, c, g, or t
  misc_feature (2637)..(2637): n is a, c, g, or t
  misc_feature (2642)..(2642): n is a, c, g, or t
  misc_feature (2645)..(2649): n is a, c, g, or t
  misc_feature (2651)..(2651): n is a, c, g, or t
  misc_feature (2655)..(2655): n is a, c, g, or t
  misc_feature (2661)..(2661): n is a, c, g, or t
  misc_feature (2664)..(2666): n is a, c, g, or t
  misc_feature (2669)..(2669): n is a, c, g, or t
  misc_feature (2672)..(2672): n is a, c, g, or t
  misc_feature (2674)..(2674): n is a, c, g, or t
  misc_feature (2678)..(2679): n is a, c, g, or t
  misc_feature (2681)..(2681): n is a, c, g, or t
  misc_feature (2683)..(2683): n is a, c, g, or t
  misc_feature (2685)..(2686): n is a, c, g, or t
  misc_feature (2691)..(2691): n is a, c, g, or t
  misc_feature (2694)..(2698): n is a, c, g, or t
  misc_feature (2700)..(2701): n is a, c, g, or t
  misc_feature (2704)..(2704): n is a, c, g, or t
  misc_feature (2708)..(2712): n is a, c, g, or t
  misc_feature (2716)..(2716): n is a, c, g, or t
  misc_feature (2720)..(2720): n is a, c, g, or t
  misc_feature (2722)..(2726): n is a, c, g, or t
  misc_feature (2729)..(2729): n is a, c, g, or t
  misc_feature (2731)..(2734): n is a, c, g, or t
  misc_feature (2737)..(2739): n is a, c, g, or t
  misc_feature (2741)..(2744): n is a, c, g, or t
  misc_feature (2746)..(2752): n is a, c, g, or t
  misc_feature (2754)..(2757): n is a, c, g, or t
  misc_feature (2759)..(2759): n is a, c, g, or t
  misc_feature (2761)..(2762): n is a, c, g, or t
  misc_feature (2765)..(2766): n is a, c, g, or t
  misc_feature (2768)..(2771): n is a, c, g, or t
  misc_feature (2778)..(2778): n is a, c, g, or t
  misc_feature (2780)..(2783): n is a, c, g, or t
  misc_feature (2785)..(2785): n is a, c, g, or t
  misc_feature (2787)..(2787): n is a, c, g, or t
  misc_feature (2791)..(2792): n is a, c, g, or t
  misc_feature (2794)..(2795): n is a, c, g, or t
  misc_feature (2797)..(2798): n is a, c, g, or t
  misc_feature (2802)..(2802): n is a, c, g, or t
  misc_feature (2804)..(2809): n is a, c, g, or t
  misc_feature (2811)..(2817): n is a, c, g, or t
  misc_feature (2819)..(2822): n is a, c, g, or t
  misc_feature (2824)..(2824): n is a, c, g, or t
  misc_feature (2828)..(2828): n is a, c, g, or t
  misc_feature (2830)..(2831): n is a, c, g, or t
  misc_feature (2833)..(2834): n is a, c, g, or t
  misc_feature (2837)..(2838): n is a, c, g, or t
  misc_feature (2840)..(2841): n is a, c, g, or t
  misc_feature (2843)..(2843): n is a, c, g, or t
  misc_feature (2848)..(2850): n is a, c, g, or t
  misc_feature (2852)..(2855): n is a, c, g, or t
  misc_feature (2857)..(2857): n is a, c, g, or t
  misc_feature (2860)..(2863): n is a, c, g, or t
  misc_feature (2865)..(2867): n is a, c, g, or t
  misc_feature (2869)..(2871): n is a, c, g, or t
  misc_feature (2874)..(2876): n is a, c, g, or t
  misc_feature (2881)..(2883): n is a, c, g, or t
  misc_feature (2885)..(2885): n is a, c, g, or t
  misc_feature (2890)..(2890): n is a, c, g, or t
  misc_feature (2893)..(2894): n is a, c, g, or t
  misc_feature (2898)..(2901): n is a, c, g, or t
  misc_feature (2905)..(2911): n is a, c, g, or t
  misc_feature (2914)..(2914): n is a, c, g, or t
  misc_feature (2917)..(2918): n is a, c, g, or t
  misc_feature (2922)..(2922): n is a, c, g, or t
  misc_feature (2925)..(2927): n is a, c, g, or t
  misc_feature (2930)..(2932): n is a, c, g, or t
  misc_feature (2934)..(2934): n is a, c, g, or t
  misc_feature (2939)..(2940): n is a, c, g, or t
  misc_feature (2947)..(2949): n is a, c, g, or t
  misc_feature (2952)..(2958): n is a, c, g, or t
  misc_feature (2960)..(2961): n is a, c, g, or t
  misc_feature (2965)..(2965): n is a, c, g, or t
  misc_feature (2968)..(2969): n is a, c, g, or t
  misc_feature (2971)..(2971): n is a, c, g, or t
  misc_feature (2974)..(2975): n is a, c, g, or t
  misc_feature (2977)..(2977): n is a, c, g, or t
  misc_feature (2979)..(2979): n is a, c, g, or t
  misc_feature (2983)..(2983): n is a, c, g, or t
  misc_feature (2986)..(2988): n is a, c, g, or t
  misc_feature (2990)..(2992): n is a, c, g, or t
  misc_feature (2995)..(2995): n is a, c, g, or t
  misc_feature (2997)..(2997): n is a, c, g, or t
  misc_feature (2999)..(3001): n is a, c, g, or t
  misc_feature (3005)..(3007): n is a, c, g, or t
  misc_feature (3009)..(3011): n is a, c, g, or t
  misc_feature (3016)..(3018): n is a, c, g, or t
  misc_feature (3020)..(3020): n is a, c, g, or t
  misc_feature (3022)..(3022): n is a, c, g, or t
  misc_feature (3025)..(3026): n is a, c, g, or t
  misc_feature (3029)..(3029): n is a, c, g, or t
  misc_feature (3031)..(3033): n is a, c, g, or t
  misc_feature (3035)..(3035): n is a, c, g, or t
  misc_feature (3038)..(3041): n is a, c, g, or t
  misc_feature (3043)..(3043): n is a, c, g, or t
  misc_feature (3045)..(3046): n is a, c, g, or t
  misc_feature (3048)..(3049): n is a, c, g, or t
  misc_feature (3051)..(3051): n is a, c, g, or t
  misc_feature (3053)..(3055): n is a, c, g, or t
  misc_feature (3057)..(3057): n is a, c, g, or t
  misc_feature (3059)..(3061): n is a, c, g, or t
  misc_feature (3063)..(3071): n is a, c, g, or t
  misc_feature (3073)..(3081): n is a, c, g, or t
  misc_feature (3083)..(3085): n is a, c, g, or t
  misc_feature (3087)..(3089): n is a, c, g, or t
  misc_feature (3091)..(3091): n is a, c, g, or t
  misc_feature (3094)..(3094): n is a, c, g, or t
  misc_feature (3096)..(3097): n is a, c, g, or t
  misc_feature (3100)..(3101): n is a, c, g, or t
  misc_feature (3103)..(3103): n is a, c, g, or t
  misc_feature (3107)..(3109): n is a, c, g, or t
  misc_feature (3111)..(3114): n is a, c, g, or t
  misc_feature (3117)..(3121): n is a, c, g, or t
  misc_feature (3123)..(3123): n is a, c, g, or t
  misc_feature (3125)..(3128): n is a, c, g, or t
  misc_feature (3130)..(3132): n is a, c, g, or t
  misc_feature (3134)..(3134): n is a, c, g, or t
  misc_feature (3138)..(3138): n is a, c, g, or t
  misc_feature (3141)..(3141): n is a, c, g, or t
  misc_feature (3144)..(3146): n is a, c, g, or t
  misc_feature (3148)..(3152): n is a, c, g, or t
  misc_feature (3157)..(3157): n is a, c, g, or t
  misc_feature (3159)..(3159): n is a, c, g, or t
  misc_feature (3161)..(3166): n is a, c, g, or t
  misc_feature (3170)..(3174): n is a, c, g, or t
  misc_feature (3176)..(3181): n is a, c, g, or t
  misc_feature (3183)..(3186): n is a, c, g, or t
  misc_feature (3188)..(3188): n is a, c, g, or t
  misc_feature (3190)..(3192): n is a, c, g, or t
  misc_feature (3194)..(3195): n is a, c, g, or t
  misc_feature (3197)..(3199): n is a, c, g, or t
  misc_feature (3201)..(3201): n is a, c, g, or t
  misc_feature (3204)..(3206): n is a, c, g, or t
  misc_feature (3208)..(3208): n is a, c, g, or t
  misc_feature (3210)..(3214): n is a, c, g, or t
  misc_feature (3217)..(3217): n is a, c, g, or t
  misc_feature (3219)..(3220): n is a, c, g, or t
  misc_feature (3223)..(3225): n is a, c, g, or t
  misc_feature (3227)..(3232): n is a, c, g, or t
  misc_feature (3234)..(3236): n is a, c, g, or t
  misc_feature (3238)..(3241): n is a, c, g, or t
  misc_feature (3244)..(3245): n is a, c, g, or t
  misc_feature (3248)..(3253): n is a, c, g, or t
  misc_feature (3255)..(3262): n is a, c, g, or t
  misc_feature (3265)..(3267): n is a, c, g, or t
  misc_feature (3270)..(3270): n is a, c, g, or t
  misc_feature (3272)..(3274): n is a, c, g, or t
  misc_feature (3276)..(3276): n is a, c, g, or t
  misc_feature (3279)..(3287): n is a, c, g, or t
  misc_feature (3291)..(3293): n is a, c, g, or t
  misc_feature (3295)..(3296): n is a, c, g, or t
  misc_feature (3298)..(3302): n is a, c, g, or t
  misc_feature (3305)..(3309): n is a, c, g, or t
  misc_feature (3313)..(3313): n is a, c, g, or t
  misc_feature (3315)..(3315): n is a, c, g, or t
  misc_feature (3317)..(3318): n is a, c, g, or t
  misc_feature (3320)..(3321): n is a, c, g, or t
  misc_feature (3324)..(3324): n is a, c, g, or t
  misc_feature (3327)..(3332): n is a, c, g, or t
  misc_feature (3335)..(3335): n is a, c, g, or t
  misc_feature (3337)..(3338): n is a, c, g, or t
  misc_feature (3340)..(3341): n is a, c, g, or t
  misc_feature (3343)..(3343): n is a, c, g, or t
  misc_feature (3346)..(3350): n is a, c, g, or t
  misc_feature (3353)..(3354): n is a, c, g, or t
  misc_feature (3357)..(3357): n is a, c, g, or t
  misc_feature (3359)..(3366): n is a, c, g, or t
  misc_feature (3368)..(3368): n is a, c, g, or t
  misc_feature (3371)..(3377): n is a, c, g, or t
  misc_feature (3380)..(3380): n is a, c, g, or t
  misc_feature (3382)..(3382): n is a, c, g, or t
  misc_feature (3385)..(3387): n is a, c, g, or t
  misc_feature (3389)..(3393): n is a, c, g, or t
  misc_feature (3395)..(3398): n is a, c, g, or t
  misc_feature (3400)..(3402): n is a, c, g, or t
  misc_feature (3404)..(3404): n is a, c, g, or t
  misc_feature (3406)..(3407): n is a, c, g, or t
  misc_feature (3409)..(3412): n is a, c, g, or t
  misc_feature (3414)..(3414): n is a, c, g, or t
  misc_feature (3417)..(3417): n is a, c, g, or t
  misc_feature (3420)..(3423): n is a, c, g, or t
  misc_feature (3425)..(3427): n is a, c, g, or t
  misc_feature (3429)..(3433): n is a, c, g, or t
  misc_feature (3435)..(3438): n is a, c, g, or t
  misc_feature (3442)..(3442): n is a, c, g, or t
  misc_feature (3444)..(3445): n is a, c, g, or t
  misc_feature (3447)..(3448): n is a, c, g, or t
  misc_feature (3450)..(3459): n is a, c, g, or t
  misc_feature (3463)..(3463): n is a, c, g, or t
  misc_feature (3465)..(3465): n is a, c, g, or t
  misc_feature (3467)..(3467): n is a, c, g, or t
  misc_feature (3470)..(3474): n is a, c, g, or t
  misc_feature (3476)..(3479): n is a, c, g, or t
  misc_feature (3485)..(3487): n is a, c, g, or t
  misc_feature (3490)..(3491): n is a, c, g, or t
  misc_feature (3493)..(3493): n is a, c, g, or t
  misc_feature (3495)..(3496): n is a, c, g, or t
  misc_feature (3498)..(3498): n is a, c, g, or t
  misc_feature (3500)..(3501): n is a, c, g, or t
  misc_feature (3503)..(3510): n is a, c, g, or t
  misc_feature (3512)..(3514): n is a, c, g, or t
  misc_feature (3516)..(3518): n is a, c, g, or t
  misc_feature (3520)..(3520): n is a, c, g, or t
  misc_feature (3523)..(3530): n is a, c, g, or t
  misc_feature (3532)..(3537): n is a, c, g, or t
  misc_feature (3539)..(3539): n is a, c, g, or t
  misc_feature (3541)..(3541): n is a, c, g, or t
  misc_feature (3543)..(3545): n is a, c, g, or t
  misc_feature (3548)..(3549): n is a, c, g, or t
  misc_feature (3551)..(3551): n is a, c, g, or t
  misc_feature (3554)..(3554): n is a, c, g, or t
  misc_feature (3557)..(3557): n is a, c, g, or t
  misc_feature (3559)..(3559): n is a, c, g, or t
  misc_feature (3561)..(3562): n is a, c, g, or t
  misc_feature (3566)..(3566): n is a, c, g, or t
  misc_feature (3568)..(3571): n is a, c, g, or t
  misc_feature (3573)..(3575): n is a, c, g, or t
  misc_feature (3577)..(3577): n is a, c, g, or t
  misc_feature (3579)..(3581): n is a, c, g, or t
  misc_feature (3583)..(3584): n is a, c, g, or t
  misc_feature (3586)..(3586): n is a, c, g, or t
  misc_feature (3589)..(3590): n is a, c, g, or t
  misc_feature (3592)..(3592): n is a, c, g, or t
  misc_feature (3594)..(3596): n is a, c, g, or t
  misc_feature (3598)..(3598): n is a, c, g, or t
  misc_feature (3600)..(3601): n is a, c, g, or t
  misc_feature (3603)..(3605): n is a, c, g, or t
  misc_feature (3611)..(3614): n is a, c, g, or t
  misc_feature (3617)..(3617): n is a, c, g, or t
  misc_feature (3619)..(3620): n is a, c, g, or t
  misc_feature (3622)..(3626): n is a, c, g, or t
  misc_feature (3628)..(3629): n is a, c, g, or t
  misc_feature (3631)..(3632): n is a, c, g, or t
  misc_feature (3636)..(3640): n is a, c, g, or t
  misc_feature (3642)..(3642): n is a, c, g, or t
  misc_feature (3644)..(3644): n is a, c, g, or t
  misc_feature (3646)..(3646): n is a, c, g, or t
  misc_feature (3648)..(3648): n is a, c, g, or t
  misc_feature (3650)..(3651): n is a, c, g, or t
  misc_feature (3653)..(3653): n is a, c, g, or t
  misc_feature (3655)..(3671): n is a, c, g, or t
  misc_feature (3673)..(3674): n is a, c, g, or t
  misc_feature (3676)..(3679): n is a, c, g, or t
  misc_feature (3683)..(3683): n is a, c, g, or t
  misc_feature (3686)..(3696): n is a, c, g, or t
  misc_feature (3698)..(3701): n is a, c, g, or t
  misc_feature (3703)..(3703): n is a, c, g, or t
  misc_feature (3706)..(3706): n is a, c, g, or t
  misc_feature (3708)..(3713): n is a, c, g, or t
  misc_feature (3715)..(3715): n is a, c, g, or t
  misc_feature (3718)..(3719): n is a, c, g, or t
  misc_feature (3721)..(3722): n is a, c, g, or t
  misc_feature (3724)..(3730): n is a, c, g, or t
  misc_feature (3732)..(3735): n is a, c, g, or t
  misc_feature (3737)..(3738): n is a, c, g, or t
  misc_feature (3740)..(3743): n is a, c, g, or t
  misc_feature (3746)..(3747): n is a, c, g, or t
  misc_feature (3750)..(3751): n is a, c, g, or t
  misc_feature (3754)..(3758): n is a, c, g, or t
  misc_feature (3760)..(3764): n is a, c, g, or t
  misc_feature (3770)..(3775): n is a, c, g, or t
  misc_feature (3777)..(3778): n is a, c, g, or t
  misc_feature (3781)..(3781): n is a, c, g, or t
  misc_feature (3783)..(3784): n is a, c, g, or t
  misc_feature (3786)..(3791): n is a, c, g, or t
  misc_feature (3793)..(3795): n is a, c, g, or t
  misc_feature (3798)..(3799): n is a, c, g, or t
  misc_feature (3801)..(3806): n is a, c, g, or t
  misc_feature (3808)..(3808): n is a, c, g, or t
  misc_feature (3810)..(3812): n is a, c, g, or t
  misc_feature (3814)..(3818): n is a, c, g, or t
  misc_feature (3820)..(3823): n is a, c, g, or t
  misc_feature (3827)..(3829): n is a, c, g, or t
  misc_feature (3831)..(3831): n is a, c, g, or t
  misc_feature (3833)..(3843): n is a, c, g, or t
  misc_feature (3846)..(3847): n is a, c, g, or t
  misc_feature (3849)..(3849): n is a, c, g, or t
  misc_feature (3852)..(3855): n is a, c, g, or t
  misc_feature (3857)..(3857): n is a, c, g, or t
  misc_feature (3861)..(3866): n is a, c, g, or t
  misc_feature (3868)..(3868): n is a, c, g, or t
  misc_feature (3870)..(3871): n is a, c, g, or t
  misc_feature (3873)..(3874): n is a, c, g, or t
  misc_feature (3876)..(3882): n is a, c, g, or t
  misc_feature (3885)..(3885): n is a, c, g, or t
  misc_feature (3887)..(3893): n is a, c, g, or t
  misc_feature (3896)..(3899): n is a, c, g, or t
  misc_feature (3901)..(3903): n is a, c, g, or t
  misc_feature (3905)..(3917): n is a, c, g, or t
  misc_feature (3919)..(3920): n is a, c, g, or t
  misc_feature (3922)..(3924): n is a, c, g, or t
  misc_feature (3926)..(3928): n is a, c, g, or t
  misc_feature (3930)..(3933): n is a, c, g, or t
  misc_feature (3936)..(3948): n is a, c, g, or t
  misc_feature (3950)..(3956): n is a, c, g, or t
  misc_feature (3958)..(3958): n is a, c, g, or t
  misc_feature (3960)..(3961): n is a, c, g, or t
  misc_feature (3963)..(3964): n is a, c, g, or t
  misc_feature (3966)..(3970): n is a, c, g, or t
  misc_feature (3972)..(3974): n is a, c, g, or t
  misc_feature (3976)..(3977): n is a, c, g, or t
  misc_feature (3979)..(3983): n is a, c, g, or t
  misc_feature (3985)..(3987): n is a, c, g, or t
  misc_feature (3989)..(3991): n is a, c, g, or t
  misc_feature (3993)..(3996): n is a, c, g, or t
  misc_feature (3999)..(4000): n is a, c, g, or t
tcggacgggaaaggcgacgcgcggacgcggtggaagtcatgctctggggcggtttcgctatttggttgctattggttacacgtatcatcacaactgaaacaacgagctaataatgccgatatcgaacgaatgggaacaaccgtgagagcgagcgatgagcgagcgagacagagacggagaccggcgctatgtctcccccgcctctttcgccctggtgttcacgaagtaaataccgaccaaggtgacgacggctccgccgagctgcgtcgaagtgagggtctcgtccaacgcaaagtaaccgagagccgaggcgaacatgggcgtgagaaacgtgagcgtgctaagctttgtgagtgaacccttgttcgcaaagtaaaagaaggcgccgtaggcgacagcgcctccgaaaatggaggcgtacgcgagactggcgacatccgtcgtcgagagcgccatgtttgagtatagttctggttccgtcgcgagcgagtacgcgagcaacggtacgcctccgagcgccatatgccaacccgtcgccatgacgggatcgacgtacttgcacacccaacgaaccatgacggtgccgatggccatggattgcgccgccaacaacatccaccactccccgctatcccaaaggttgccatcaaaaagcgcaacgttactcaaagcctccgcgccatccgagttcaccacagatgttaaaacctccggagggagttcgaggagtaagagacccaagacgccgagcgcgaggccggcgacgccctccgcgccgagcgtctctccgtagaagatggacgccaacacagccacagtcagaggctgagaatctatgatgaccgatcccagaccagcgcttgtgcgctgcaatccctcagccaaaaacccttgaaacatcgccgcgtcaaccacggcgaagagcgccaccgcggtccaggcctgggcggatttgggaagcggtctccctttactcaacgcccacgcgacgagaatcaatcccgacggaatgaggcgcaccgaagccacaaacatcggcgaagtcacgggcaatacacccttcatcgccaccatactcgtgccccacaagaagaagggcgagacgagcgccaaacttccaaacaacgacgcgacgtccgacgtcgtcgcctctgccaccctctcgctcgcgctcgcgaccctatcgtccacatccatcgacacgtcgcacgacgcctccatccccacaccgacgcacgaaatctctctctcatttaccaccggttccggaatcacgcactcggcgcccatcgtcgacgcgacgcactccaaaccttcatccgccgaacgcgcttgactctccgccaccgcgccgacgccgtccgcgtcctgttctgcgcgcacccgactcctcacgcatcgcgacgacgacgacgacgacgacgacggcgcatacaccatcgacaccgcgcgtcgcgtccgcacatctctcaccgtcggcgtcgttcgcctcaaaccaccgttcgccgctggcgccatcgtcatcacccgcaccgtcgtcatccgcatcgtcttgattctgataacacccgtcgtccaggcgtggcgcgaacacccacgcgaacgaccgacggtgaagcgaagtagcgaacgacgcggtcgacgacgactgcgtccgcccgtcgcgcactgcggcgcgcgcgcgacgcgcgcgtcgtcgtcacaaatctatgtaccagagaatcacagtacaacgacccacgacaatacgacacatatgtaccatactaaaaccacataaacatctatataaatgaataaaatagaaaattaactcaaaaaatttaactcgtcgtattgtaccaccgtttaacgccgttcaacactcaagatttgttagtcccaggtcgatcccacgggttgcgaatctcaacgatcgagatgtttgaaaatcatgcataaaaacacgtagggtttacaaataccatattgtaggacatttaaaancnatncgaatatattttccaaggagtcattcatggatactttcgtgcgggaacgaacgaacgaacgttggaacgctcggttcgacacaccgcgacgacggaaggaaccgcgaggtacgaaccgggagaccgcgcgacgcgacgcgaacgccgncgncgacgacgacgccacccccgcccgcgcggtggcgttccgttccgcgcggcgccgacgacgacgccgacgcgccagtaaaatgaatgaaatgcgcgaacccgagcgagggattcgactgacgaacgaacgcgaacgcgtcgcgcgcgcgcaggattctctcgaaaaacgaaggatcgaacgaaatgaaggctcaggaaaaggtgcgtccgtcgcgtctcgcgcgatcaaagtcgacgcgtnnanagnncnnannnnnnnnnnnngnnnnngnnnnncgngannngngnnnnnnnnnnnntcnnnnanncnnncnnnngnnnnngtgnntnnntnnnnnnnnnntnnnnnnnnnnnnttnnnnnntnnnngnnnnnngnnnnnnngtnnncntnnnngnnncnnnnnnnngnnnnnnggttgtnnnntngnnnncnaganggngngacngacgganngangnnanggangncgnngcgncgnncgcagcanncnnangaatngannnnncnaccnccgaancgnnngangangncgtnntngntnntttgntcnnnnnanngangagnnnnnatgnggcngnnnnnccncnnnncgnnngnnnngnnnnnnngnnnngngnngcnnannnngacgacnannnngncngccnngnngnngaanannnnnncnnnnnnncnnnngnaggngnngnnggnngnngntaagnnnannnngncgnnnnannngnnnaannnggcgnnncngccgncgnngctnnnnaagnnnnnnngcncgnngaanaannnaannngncaaanngtcatcnnngcnnnnnnngnnaagncgnngngcnncngnacgncgnnncnnntcntntnnngcannnannnaagannngngntgnnggnannncnccnnnncnannannanannntnannngnnnnnnnnngnnnnnnnnnannncnnnantancnnatnngnggannnannnnacnnnnncngnnnngnnnanttgnaangannnannnnncaagnancnnnnnnactnnnnnannnnnnannnngnannncnncnnncngtnnncngnnnnncgnannagnnnannnnnncnnncnnnnctnnaannnnnnannnnnnnncgnnnaancnnncnacnnnnnnnnngctnnntnncnnnnnacnnnnnaacnancnnannaantcnnnnnntcngnncnncnacnnnnncanntcnannnnnnnngncgnnnnnnngangnaannnannnnngnnnngnnngnannannnnanaanaannnnannngnnnnncnnnncagntnncnngnnnnnnnnnnaagnangnaannnnngnnnngccgcnnngcnncnanncnannannnnnnnntnnncnnntnacnnnnnnnncnnnnnngngncnnngtnncnatnaananannaaanannnnannncnannnannanaannanannnanannannnaactannnnacnannannnnnanntnntcannnnncnancnancnnanannnnnnnnnnnnnnnnntnnannnntttnatnnnnnnnnnnngnnnngncgncnnnnnngnganngnngnnnnnnngnnnncnngnnnncgnngcnncgnnnnncnnnnnatcacnnnnnnanncancnnannnnnncnnnccnncnnnnnngncnnngnnnnntnnnnctcnnncntnnnnnnnnnnncgnngnttnnnntntttnnnnnntngnncnncnnnnnnncgngnnnnnnngcnnnntnnntnnnnnnnnnnnnncnncnnncnnncnnnngcnnnnnnnnnnnnncnnnnnnncntnncnncnnnnngnnncnnannnnncnnncnnncnnnntcnn

SEQ ID NO: 1030 - DNA, 4000 bp, Escherichia coli
  misc_feature (188)..(188): n is a, c, g, or t
  misc_feature (239)..(239): n is a, c, g, or t
  misc_feature (317)..(317): n is a, c, g, or t
  misc_feature (319)..(319): n is a, c, g, or t
  misc_feature (428)..(428): n is a, c, g, or t
  misc_feature (664)..(664): n is a, c, g, or t
  misc_feature (1138)..(1138): n is a, c, g, or t
  misc_feature (1206)..(1207): n is a, c, g, or t
  misc_feature (1399)..(1399): n is a, c, g, or t
  misc_feature (1404)..(1404): n is a, c, g, or t
  misc_feature (1987)..(1987): n is a, c, g, or t
  misc_feature (2015)..(2015): n is a, c, g, or t
  misc_feature (2048)..(2048): n is a, c, g, or t
  misc_feature (2319)..(2319): n is a, c, g, or t
  misc_feature (2565)..(2565): n is a, c, g, or t
  misc_feature (2640)..(2640): n is a, c, g, or t
  misc_feature (2661)..(2661): n is a, c, g, or t
  misc_feature (3009)..(3009): n is a, c, g, or t
gcaagtggtctacctgtggagcgagagggcatataccatcgttgatgatttcataatcactacgtcgtatcacttcctcttgcggtagttgacgtgctatccactcaagggtcttttccctactaatactatcacgtgccatcacacgacgaatacgtacttcttctggcgccgtaacgcatactacnttatcaatgtgggtacgcttatcaaaaccactatcaaagagtatcgcactntcaagccacgattgacccgattgctcaaaatcatgagctacagcaggatgtatcacggcattgaccgcctgtacatgngnctcactctgtaagagataggctgcaagaatggctttttgcaagacaccatcacggaagacatcctcaccgacaagtgcagaaagctgttgttgtagtggttgagaggtncgcatcaattcctttgcgtgcgcatcacaatcgtaaacagagatacctcgctccgcaagaagcttacagacgtaagactttccgctaccaataccaccagtcaacgctactatcatcgctgctcaatgagataatcaaccgtatttacttctggtcgtacgttgcgtacaccattaggagaacttatcacatagataggacatttctcgctattatttttctctatatcttcgtanttgactacaacacggaagcctacagggagaagttcctttgtctccgcattctttggcatcgaacgcatacgataggcacctaccacaaacttcacttttatcttgcttgggaaggtacgcatcaccttgttgtcaggcatattgacagcttcaattggtacctcaaccgtctcctctgtaagtacatctggatagagtttcatctttacactggaaggaacacacttggcattcgtaaactttcggaggtctacagtcaactccttgacatctgtgaaattggtaatatactgtcgctctgtatagactgtttgaatactatccaacacattacgcgctgcataaacctgaacgctatctggagtaaagtctacacgagcaagataataattatcaccaggtgttactgtccccaaaaggcgtacaggtacctttttatgacgaccaaagttaaatgagaaagagaactttccngccttgacagaagctatctttgaactctttgacagttgaagataaatctgacgttgaaggtctgcaannggtacatctcccttacttcgtccgtcactatgaactttgtagtcgacatagatagggcggaatgtatcatcaagaccataatacgcaatcatatatcccttgtctcgcacagtaaaacggacaacagaatcaaggtcactggtaataaccacattacgaggaacacccgtcatgcgaagtggtatactgaantcacnctcataagtttcgttcagtgtcattatcaaccagaaccctccactcaataccaagaaaaacaaaaaaatcagaaactccttgttgaatatcctcaacaagaagttcctgaaggtactgaatgtatgaagcgatttgcttgttttcatcaaatgctttccttcttttctaccaataaggtttacttagtctgaccctgctgagaagcctgtacgtttgcgaatacgtagttcttatcaacagtgataacaacaccacgtgcaatctcaacttcaaccttattggttgtcatatcaatatgctttactgtgccatagattccaccaccagtcacaacagaatcacctgctgagagagcattctggaaagcacgaatctccttctgcttcttctgctgtggacgaatcatgaaaaaccacatgatggcgaagatagctaccatcatgataatcataggcattgggctgccttgacctgcagcctgtgctgcgaggattaatgttgtattcattatttatcagttattatgttcttaatttatgagcgtgaaaaggaggctataggcaagcataacgtctgaaaggnttttataaacactcatcattattatgcnaaacaagcctctttcgtgacgattcttaaaagntttccgcctatgtctttattccttattctccgcctgatcagttgcttgctgctgacgataagccacacgctgagcagaagtttgcgcaatcgttgggcgacgtccctcacgacgtggtgctctttcctcttggcgatcattgcgaggacgatgttggcgaggctctggcattgtcttcatcatcttaccagtctgtatgagatgacgtgcaattgtatcaagcataccattgatatatccaccacttcgcggtgtactatacaatttagcnaagtcaacatactcgttgatggtcaccgttactgggatattagggaatgtaagcatctcagcaatagctatctgcatgatgacaacatccatataagccaagcgagagaaatcccagttacgacttgactcactcatataacgctgataatcgtctgcattgaggatagttgaacggaagagtttaagtgcaaagtcacggtcctcttcgtcacgatattctggcagaagttcttgatcagcaccnttagcagggtcgaatcgtttgatagtcttgataacgaaggtatcaacaacttccttatcatcattccaataaagnctcttctcctccaacacagcntccaaatcaggattctcctgtatgagagtacgatatatcttacgccacacctcacggtctgcctcgtacgaatcatcatcacttgccatgtactcttggtagatagtgctctgttcaatctgatcacagagtttacgaacagcctccatatcatcttcccaacgacgtttttgtgattccatgaaaaggttaagctgcttattctcttccaactgaacagcaaacttattgtttacaaaacgacttgagggagcctcagtcccctcacggttggcacgatttgcagctatctccacgcgatggcgctcctcttgcgtgactgatacgattaaggccaagaggtaattntagaggtcatacgctttcgccaagctgaaaagaagttccttctcagcattgtccatattcctgttaccgttctgatagtatgcataggttaactggacaatcttaattcttattaattccctattgatcattgtcttttctaaaagattgtgtttcgtattgaatactttattttgcaaatgtaggaaatttccttcgtacatgcaagcattagtatctttttctatgtttttttagagaatacttgctcaatccattgaaaagaagtaactttgcaacgctttttgcaaattgaggattgaaagttgtgatattcattagatttccaattccttagtctctcagtgtgtgatggcgaattaaagttcatattaatttagagtaacacagaattatgaaagaaattaaagtaacaggtcagaagcgtacagaccttggaaagaaagcttctaagcagctccgtaaggagggtttgattccatgtaacctctatggtgaggcacagcaggatggcaagccagtagcattctcattcacagctcctatgtcagagttgcgtaagttggtttacacaccacacatctacgttgtagagttgattattgatggtgagagacgtactgcagttcttaaggaactccagttccacccagtaacagacgctctgcttcacgtagacttctatgaggtgaacgaccagaagccaatcgttatgggtgtaccagttaagctcgtaggtttggcacagggtgttcgcgatggtggtcgtatgaacatgtctatccgtaagattaacgttaaggctccttatcagcagattccagagcacctcgatatcaacgttactgagcttcgtcttggtaagagtatcaaggttggcgagttgagcttcgagggtcttgagttggtaactccaaaggaggttgtagtttgctctatcaaggctacacgtaattctatccaggctgcgcaggctgctgcagctgctgag

SEQ ID NO: 1031 - DNA, 4000 bp, Escherichia coli
  misc_feature (87)..(87): n is a, c, g, or t
  misc_feature (135)..(135): n is a, c, g, or t
  misc_feature (168)..(168): n is a, c, g, or t
  misc_feature (411)..(411): n is a, c, g, or t
  misc_feature (435)..(435): n is a, c, g, or t
  misc_feature (908)..(908): n is a, c, g, or t
  misc_feature (2013)..(2013): n is a, c, g, or t
  misc_feature (3042)..(3042): n is a, c, g, or t
  misc_feature (3051)..(3051): n is a, c, g, or t
  misc_feature (3099)..(3099): n is a, c, g, or t
agtattgttaggcatatttagaaatattaaaatatatcactagtgatatcactagtgatgatttctgaatggtttcagagggtaggnagttcagttccaagaggattttcaaggtattttattctggaattactnaaagagaaaacatacacgggaaaggaaattatngattatgctgtaaaacaaagtaatgggatttggaaaccatctccaggattaatctatccattattaggtagactacttgatgaaaaattaattgaagaaacaaaagatggtagatatcaattaacaaaacaaggtttagagacagcacaagatgtggacaaaattaatgatattgttaaaaatcaattagaagttcttttcagattaggaaacgttggaagatttgttgcattagatttactngaaaaaatttcatctatgggttcnattctaagttctaatttatcaaacatgacagaggatgaaactcaaaaatataaaaaattccttcaagaagaattagagaaaatggaaggcaagaaagtagataaaaaaattaaaatcgaataataaaaaattaataaataattcaaaaaaaatagaaatttatgaaaaaattatctagtatgataaaatcaaaaaaacctctggtcataccaggagtctatgatgcaattggagcaaaaattgctgaaaaagttggatttgatgcaatgtttcaaactggatatggaacatcagctacattatttggaatgccagattatggatttattggagcaacagaaacagtagataatgcaagaaggatatcaaatgcaatatcagttccacttattgttgattcagatacaggttatggtaatgcactaagtgtttggaaattagtaaaagaattagaagctgcaggagcagcaggnatatttctagaagatcaaaaatggccaaaaagatgtggacatatgcaaggaaaagaggtaataccacaagaagaatatacagaaaagctaggtgctgcaattgatgcacgtgaaaataaagacttcatcattgtggccagaacagattcaagagcaacagaaggacttgacaaatcaattgaaagaggaattcaaaataaaaaaacaggtgctgatgccatattcattgaagcaccaagatcattagatgaaatgaagaaaattggaaaagagatcaaagcacctctagtagcaaatatgattgagggaggagcaaccccaatgaattcagcaaaaacattaaacaaaattggattcaacataattctatatccattatcagtattatttgcaaatacatttgcaacaatgaatattttacaagaattaaaaaattctggaacaacttcaaaatataaacaaaaagtggtaaattttgatcaatttaacaaattagtggaattagataaattcaaaaaaatggaaacaaaatacaaatttacaaaaagaaaataaaaaattttaagtaaagtgcaattattctgcgtttctctttacttcaatttctattgttgaaacatttcgtgttctaccatcttctgattccaaagattctgaatcaattttgacatttccgatagaatatccggcattttcagtttttcgtgcaacaatttgagctacatctacagcacgacctatgctgagtcccctagctttgatgttgacagatggcacatttgccaattgaattagcgttgatgttacatatgccatcaatggttttttaccaatgaatatggtgtctctagtttcagtggacatggatagtatagtatttaacgataatttaaagttaaaatgaattttttataaatattataaaaaattgaaaaaatttaagattattatgttgaaaatagaatttaaaaatagtttggaagatatttcaaaaatactagaatcagaaaacgctcaagaaaaaattagaattttagaaactctacatgaaacaaataatttgaaaatattgcaacaagtaatttcaagattaaatgataacagnatacaagttagaggagaagcatttaattcacttttattaaatcaaaatgatatctcaaaaattttaattgataatcttaattcttcaaataaaaatatcaaaagttttacagcactagtattagctaacagaaatgaaaaaaaggcaattccagatataattaaactggtagataacgaacatggaatggtaagatcttgtgcaattggatctctaggatatctaaaagcagatgaaattacagatatcattttggatgcattttcagattccaatttagatgtacaaaaaagtgcattacaagcagcaattcaaacaaatatttttgtttcagaagaaaaaattaaagaaatttcaaaaaataatgatcctcaaatacaaaatctattattgaaattaaaaaaataagtggaccgaaagggatttgaacccttgatccgatgcatgccatgcacctatcctaccagactagacgaccggcccaataatcagaaatctgattgaataatattttgtaaattggttattaacgtttagcgatttaaaaaattaggttagtcaaattatcacaatatatttaaagttcaagatgctgattgaattgtcatggtagtagataacaaagcaactgtcacttatgttcaattattaaaagaagaccttctcataatgagaattgttccaaaggaaggtccagttcctgattttgaagcaggtcaatttctcacattaggattaccaaataaagctgataaagataaaatggttagacgagcatattcaatagcatctcatccagaaaataaagattacattgaatttgtaattagatgggttagaaaaccacttccaggaagattaactacacaaatatttaatgtaaaagaaggggacgaaatatcttggttgaaacctacaggtagagcattaggaatcagtcaagaattaccaagtggtgaaaaagatacaagaagaattgtatgtattggtggtggaactggtcttgcaccatttgtgagttttgcacancatcttcangatactaatgataaaagagaagttgttgttttacatggcgcaagttangttgatgaattaagttacaaagatttgcttaccaatcttgaagatgaaagtattgcaaaaggtaaggatgtatggaattttaaatatagagcagcaataagtagacctcaagagtggttcaatagaagttgggcaggtcaagttggtagagttgaaacgttcctaagacctagagataatggaatgtcaccattagaggaattaattggtgataaagtaacacaaaaaaatacaattttctatgtatgtggctggcaaggcaccatagatggagttatggactttttaaaaccaaaaggattcatcacagaacacgataaacgtgaagatggaagttttgaagtcaaatacgaatcatacggatagaattattcaataaattaatcattgaaatatgagaattatttagaaatcataattgatcacagccatatatcttgctcatctaaatccagtaacaaatgctcatgtagagatcattaaggaattgaaaaaagatgcagatattgtcaaagtaatgccagttatttttagatctgatgaaaaagaagtaaacagtaaaagttttccatttaattttgaaactagaaaaaagatgcttgaatcaatttttggggattcaatcaaaataactgatgattatgcatttctggcaccattcaaaaaatatctcccaccattagtaagaagaaaatcatggaaattaagaaagcagatactcaatggtgttgaaggagattatttttcatacacaggagacaaggcagaaggatacatgttgaaaatgtatagactaaaaccaaaacttggtgaacgaaaagcattgtctgcaacatcagttaaagagaaactgtataattcagtatttgaaaaaaattctacttggaaagaagatgttcca

SEQ ID NO: 1032 - DNA, 4000 bp, Escherichia coli
  misc_feature (187)..(187): n is a, c, g, or t
  misc_feature (2022)..(2022): n is a, c, g, or t
  misc_feature (2514)..(2514): n is a, c, g, or t
  misc_feature (2538)..(2538): n is a, c, g, or t
  misc_feature (2544)..(2544): n is a, c, g, or t
  misc_feature (2546)..(2546): n is a, c, g, or t
  misc_feature (2552)..(2552): n is a, c, g, or t
  misc_feature (2624)..(2624): n is a, c, g, or t
  misc_feature (2627)..(2627): n is a, c, g, or t
  misc_feature (2709)..(2709): n is a, c, g, or t
  misc_feature (2759)..(2759): n is a, c, g, or t
  misc_feature (2790)..(2790): n is a, c, g, or t
  misc_feature (2919)..(2919): n is a, c, g, or t
  misc_feature (2931)..(2931): n is a, c, g, or t
  misc_feature (3153)..(3153): n is a, c, g, or t
  misc_feature (3213)..(3213): n is a, c, g, or t
  misc_feature (3223)..(3223): n is a, c, g, or t
  misc_feature (3358)..(3358): n is a, c, g, or t
  misc_feature (3362)..(3362): n is a, c, g, or t
  misc_feature (3371)..(3375): n is a, c, g, or t
  misc_feature (3377)..(3378): n is a, c, g, or t
  misc_feature (3380)..(3381): n is a, c, g, or t
  misc_feature (3383)..(3384): n is a, c, g, or t
  misc_feature (3386)..(3392): n is a, c, g, or t
  misc_feature (3394)..(3394): n is a, c, g, or t
  misc_feature (3401)..(3404): n is a, c, g, or t
  misc_feature (3406)..(3407): n is a, c, g, or t
  misc_feature (3411)..(3413): n is a, c, g, or t
  misc_feature (3415)..(3415): n is a, c, g, or t
  misc_feature (3418)..(3421): n is a, c, g, or t
  misc_feature (3424)..(3430): n is a, c, g, or t
  misc_feature (3432)..(3432): n is a, c, g, or t
  misc_feature (3434)..(3434): n is a, c, g, or t
  misc_feature (3438)..(3438): n is a, c, g, or t
  misc_feature (3441)..(3441): n is a, c, g, or t
  misc_feature (3446)..(3449): n is a, c, g, or t
  misc_feature (3452)..(3458): n is a, c, g, or t
  misc_feature (3460)..(3461): n is a, c, g, or t
  misc_feature (3471)..(3484): n is a, c, g, or t
  misc_feature (3488)..(3491): n is a, c, g, or t
  misc_feature (3493)..(3494): n is a, c, g, or t
  misc_feature (3496)..(3496): n is a, c, g, or t
  misc_feature (3499)..(3501): n is a, c, g, or t
  misc_feature (3504)..(3506): n is a, c, g, or t
  misc_feature (3514)..(3515): n is a, c, g, or t
  misc_feature (3521)..(3521): n is a, c, g, or t
  misc_feature (3526)..(3526): n is a, c, g, or t
  misc_feature (3529)..(3531): n is a, c, g, or t
  misc_feature (3533)..(3533): n is a, c, g, or t
  misc_feature (3538)..(3541): n is a, c, g, or t
  misc_feature (3543)..(3543): n is a, c, g, or t
  misc_feature (3547)..(3548): n is a, c, g, or t
  misc_feature (3550)..(3550): n is a, c, g, or t
  misc_feature (3552)..(3552): n is a, c, g, or t
  misc_feature (3554)..(3554): n is a, c, g, or t
  misc_feature (3556)..(3556): n is a, c, g, or t
  misc_feature (3561)..(3562): n is a, c, g, or t
  misc_feature (3564)..(3565): n is a, c, g, or t
  misc_feature (3568)..(3568): n is a, c, g, or t
  misc_feature (3572)..(3572): n is a, c, g, or t
  misc_feature (3578)..(3579): n is a, c, g, or t
  misc_feature (3584)..(3590): n is a, c, g, or t
  misc_feature (3599)..(3599): n is a, c, g, or t
  misc_feature (3603)..(3604): n is a, c, g, or t
  misc_feature (3606)..(3609): n is a, c, g, or t
  misc_feature (3611)..(3616): n is a, c, g, or t
  misc_feature (3619)..(3619): n is a, c, g, or t
  misc_feature (3624)..(3624): n is a, c, g, or t
  misc_feature (3629)..(3629): n is a, c, g, or t
  misc_feature (3631)..(3632): n is a, c, g, or t
  misc_feature (3635)..(3635): n is a, c, g, or t
  misc_feature (3641)..(3643): n is a, c, g, or t
  misc_feature (3647)..(3647): n is a, c, g, or t
  misc_feature (3649)..(3649): n is a, c, g, or t
  misc_feature (3653)..(3653): n is a, c, g, or t
  misc_feature (3656)..(3659): n is a, c, g, or t
  misc_feature (3661)..(3661): n is a, c, g, or t
  misc_feature (3664)..(3664): n is a, c, g, or t
  misc_feature (3667)..(3669): n is a, c, g, or t
  misc_feature (3675)..(3679): n is a, c, g, or t
  misc_feature (3690)..(3691): n is a, c, g, or t
  misc_feature (3701)..(3702): n is a, c, g, or t
  misc_feature (3709)..(3709): n is a, c, g, or t
  misc_feature (3715)..(3715): n is a, c, g, or t
  misc_feature (3721)..(3725): n is a, c, g, or t
  misc_feature (3732)..(3736): n is a, c, g, or t
  misc_feature (3738)..(3738): n is a, c, g, or t
  misc_feature (3741)..(3742): n is a, c, g, or t
  misc_feature (3749)..(3751): n is a, c, g, or t
  misc_feature (3754)..(3754): n is a, c, g, or t
  misc_feature (3759)..(3764): n is a, c, g, or t
  misc_feature (3767)..(3767): n is a, c, g, or t
  misc_feature (3771)..(3771): n is a, c, g, or t
  misc_feature (3775)..(3775): n is a, c, g, or t
  misc_feature (3777)..(3777): n is a, c, g, or t
  misc_feature (3782)..(3784): n is a, c, g, or t
  misc_feature (3788)..(3793): n is a, c, g, or t
  misc_feature (3800)..(3800): n is a, c, g, or t
  misc_feature (3803)..(3804): n is a, c, g, or t
  misc_feature (3807)..(3808): n is a, c, g, or t
  misc_feature (3810)..(3816): n is a, c, g, or t
  misc_feature (3818)..(3819): n is a, c, g, or t
  misc_feature (3821)..(3824): n is a, c, g, or t
  misc_feature (3828)..(3835): n is a, c, g, or t
  misc_feature (3838)..(3838): n is a, c, g, or t
  misc_feature (3840)..(3841): n is a, c, g, or t
  misc_feature (3843)..(3843): n is a, c, g, or t
  misc_feature (3848)..(3848): n is a, c, g, or t
  misc_feature (3850)..(3850): n is a, c, g, or t
  misc_feature (3855)..(3855): n is a, c, g, or t
  misc_feature (3859)..(3862): n is a, c, g, or t
  misc_feature (3865)..(3866): n is a, c, g, or t
  misc_feature (3868)..(3868): n is a, c, g, or t
  misc_feature (3872)..(3875): n is a, c, g, or t
  misc_feature (3878)..(3878): n is a, c, g, or t
  misc_feature (3881)..(3887): n is a, c, g, or t
  misc_feature (3889)..(3889): n is a, c, g, or t
  misc_feature (3891)..(3891): n is a, c, g, or t
  misc_feature (3893)..(3893): n is a, c, g, or t
  misc_feature (3897)..(3897): n is a, c, g, or t
  misc_feature (3899)..(3899): n is a, c, g, or t
  misc_feature (3904)..(3904): n is a, c, g, or t
  misc_feature (3908)..(3914): n is a, c, g, or t
  misc_feature (3919)..(3920): n is a, c, g, or t
  misc_feature (3925)..(3925): n is a, c, g, or t
  misc_feature (3929)..(3930): n is a, c, g, or t
  misc_feature (3934)..(3936): n is a, c, g, or t
  misc_feature (3939)..(3939): n is a, c, g, or t
  misc_feature (3943)..(3943): n is a, c, g, or t
  misc_feature (3947)..(3947): n is a, c, g, or t
  misc_feature (3949)..(3956): n is a, c, g, or t
  misc_feature (3961)..(3961): n is a, c, g, or t
  misc_feature (3964)..(3965): n is a, c, g, or t
  misc_feature (3967)..(3968): n is a, c, g, or t
  misc_feature (3977)..(3979): n is a, c, g, or t
  misc_feature (3981)..(3989): n is a, c, g, or t
  misc_feature (3992)..(3993): n is a, c, g, or t
  misc_feature (4000)..(4000): n is a, c, g, or t
agctgcagttgcaccgtaacaagcttctttaacttctatagctcgtacaaatggttgaatgtctaataatccatgaataaatacagaagaggctttactttggtcaacacctgattctgttcctactataatcatatcaattttttctaagtcttctttatctaaaatttcaaatgctgcttgagcnccaagagtaactatatcttgagacacaggtggaatactcatttcaagttgaagtaatcctttagtaaatttatcaggctctatgccacgagcagtcgctagatcgcgaatgtctaagtaatacttaggcatggcaaaacctattttatcaattcctattttcatttccttttacctttcgatctacgtaattattctataaatagtatgtatagaatatattaatattatgtagtatatagatttataataatcatatacttatgtcaaaaataaaaattatcgcaattactattgtataagattttttaaaaatagtccacagtttgactattaaatttttaaaaagttgtatagcactcaaattttaatatagtatacttaaattaagcttaaataaagacacaaaaaagagctaatagagaagaaacctttctctattagcatatttttattttttagaaattgccatagcgacaccttgtcctccgccgatacatagtgaacatattccgcgatttttgttttcgttaattaaagaatgtactaaagtaactagaacacggcaaccgcttgcgccgataggatgtcctaacgctattgcaccaccattaatattaactttagaactatctaagccaagttcacgtgtaacagcaatagattgtgaagcaaaggcttcgttcatttcgaataaatctatgtctttaatatctagatttagttttgataacactttttgagttgcatgaattggtccaagccccataactttattatctaaaccaactgtagtatagccatctacgtaagctaatatatctagacctaattcgtttgctttatcttcagacattaaaataacgcatgcagccccatcattgataccagaagcattaccagcagttactgtaccatcttttttaaatgctggtcgtagttttgatagtgattcaagggttgtttcagggcgaacgtattcgtctgtatcgaaaataatttcttctcgacgagttttaattgtgataggggtaatttcattaacaaacttattattttctatagctgaactagctttttgttgactagctaaagcaaaactatcctgttcttctctagtaatattgaattgttcagcaatattttctgcagtaatacccatatgataattttcaaaagcatcagttagaccatcttttataacgctatcttctaattcaaaattaccaagtttatgaccaaagcgaggtgaactagttacaaatggtgcggcactcatattttctacaccaccacaaactactatgtcgctatctcctagtagaatagcttgtgctcctaagataacactctttaatcctgatccgcaaactttgttgacagtaaacgcacttttttcctttgggatacccgcattaacagctatttggcgcgcgatattttgcccaagtccaccttgaagaacattaccaaaaattacttcatcaacaagtggtgggtctaagttaatattatttaaagcatcttgaacaactgctgaacctaaagctgcagcagaaacatttttaagacttcctccaaaacttccaatagggcttcgttttgcacttacaatagcaactctattcatataataatctccttataagtatatttatcgagtatattttactataaacatttagcaagttcaaataaatgtatctttatacaagataaagagaaaatatgaatgcattttaatagaatctaaggtttctgtaacataattgtaacattgtaacaaaaaaataataacgttcaatacttataaatattaatttagcaacgttcaangactattagaaatatttatgtaatatttttgtaacaattttgtaataaaagtattgcattttgaaatttttaggagtataataagtttgtaaaaaatattgaaaagaatttttattaaaagaaggtatagttatgaacaaattattaaaaacaacaggcgtatttattttaggtgtaggacttttaacagggtgctcacatacttcatcacaaaaatcagataatggcaatgaatcatcaaaagtagctattgcacatgtagatgaaaataaagacaaaaatgataatagaaataatgtaactgaagagaatagtaataataataatgtagcccaagaaaataatggcaacaatacaggttataaagcaactagtgattacaatgatcaaaatagtaaaatagctcaaaataattcaaatatatatagagctattcaagatagcagttatgttaacaaagtaactagaaatagtggagaaaacaataaagtngttaaagataataatactactagnaaagtngnacaaantaatagtaatagcagcaaagtagctcaaaacactaaaaaaactcaacaaaatgctagtgataataaagtaantgntgctaataataaagtcgaacaaaaaaataaaaatgtaaataaagatgagaaaaaatcagttgaacaaaaaaatgttaaaaanaataacgatgtaaaagcaactgaacaaaaaaatccaaaagctgatgatanttctaaagctactgaaaaacaaaataatggntataaacataactttaaagaagtagaaaaattattaaacgttattaattatagcttaagcaatactaaaaattcaaaaatgatagatataataagatttagtgcaagtatctctagtacacaaaatcangttgtttatctnccagcagctaatttattagatagacttaatacaaataacgctgaaacatacaatgttaatgcagttctaaataaattatttgttgaaaatggtgtaaaactagttactgcaaataaagcaaaaagtgaatacactccagctgaattagaaaaattagtaccagataataacactgttgtttacttcaaaaaagataatatgtttgctatacgtagtgtagtnggttatggaggaactactaattctatatttgctccaacagaagattggaaagtagaaggngataaaatcntaattccttatgtaacagtagcaactaataaaccaactggtcttatgacagtaagattaaataataaagtttatccaaatggacaaaataaaactatgtactatgttgaaagctttatctactattaaaaaatanaaanaaaaaaggnnnnnannanntnntnnnnnnntnttttttnnnnannaaannnanttnnnnaannnnnnnananaaanaanaaaannnnaannnnnnntnntaaaagggannnnnnnnnnnnnngggnnnnannanccnnnttnnnaaaaaaannaaaaanttttnttnnntnttaannnnanaaannantnancnaaatnntnnttnaaanaaaaannttttnnnnnnnaaaaggganaaannannnntnnnnnnaanttaanaaaantnnttntttttnnntaananaatnttnnnngnctnttnnntaaaannnnnttaaaattttnnttaaaatttnnttaaaanaaattnattttnnnnnttaaaannnnntngtnntttcccnnnttnttttnnnnnnttntttntttnanaaaannntttnnnnnnaaaaaanccnnggnnannnnnnnanngnnnngggnnnnnnnnttntnnanttttntnttttntttnnnntannantttnnnnttnccnnnnnnntntncncccnanaatanaaannnnnnnttatnnttttntttnnaaannnttnttanaatntnnnnnnnnaaatnttnncnnccaaggttnnnannnnnnnnnggnnaattttn

SEQ ID NO: 1033 - DNA, 4000 bp, Escherichia coli
  misc_feature (308)..(310): n is a, c, g, or t
  misc_feature (312)..(315): n is a, c, g, or t
  misc_feature (317)..(319): n is a, c, g, or t
  misc_feature (321)..(326): n is a, c, g, or t
  misc_feature (329)..(331): n is a, c, g, or t
  misc_feature (333)..(333): n is a, c, g, or t
  misc_feature (335)..(337): n is a, c, g, or t
  misc_feature (339)..(339): n is a, c, g, or t
  misc_feature (341)..(341): n is a, c, g, or t
  misc_feature (343)..(344): n is a, c, g, or t
  misc_feature (346)..(348): n is a, c, g, or t
  misc_feature (351)..(354): n is a, c, g, or t
  misc_feature (357)..(358): n is a, c, g, or t
  misc_feature (360)..(365): n is a, c, g, or t
  misc_feature (367)..(369): n is a, c, g, or t
  misc_feature (371)..(373): n is a, c, g, or t
  misc_feature (375)..(375): n is a, c, g, or t
  misc_feature (380)..(381): n is a, c, g, or t
  misc_feature (383)..(384): n is a, c, g, or t
  misc_feature (388)..(388): n is a, c, g, or t
  misc_feature (390)..(390): n is a, c, g, or t
  misc_feature (392)..(393): n is a, c, g, or t
  misc_feature (398)..(405): n is a, c, g, or t
  misc_feature (407)..(411): n is a, c, g, or t
  misc_feature (413)..(417): n is a, c, g, or t
  misc_feature (420)..(421): n is a, c, g, or t
  misc_feature (423)..(425): n is a, c, g, or t
  misc_feature (427)..(439): n is a, c, g, or t
  misc_feature (442)..(442): n is a, c, g, or t
  misc_feature (444)..(445): n is a, c, g, or t
  misc_feature (452)..(455): n is a, c, g, or t
  misc_feature (458)..(461): n is a, c, g, or t
  misc_feature (464)..(468): n is a, c, g, or t
  misc_feature (471)..(471): n is a, c, g, or t
  misc_feature (473)..(477): n is a, c, g, or t
  misc_feature (479)..(483): n is a, c, g, or t
  misc_feature (485)..(488): n is a, c, g, or t
  misc_feature (491)..(491): n is a, c, g, or t
  misc_feature (493)..(495): n is a, c, g, or t
  misc_feature (497)..(498): n is a, c, g, or t
  misc_feature (500)..(500): n is a, c, g, or t
  misc_feature (502)..(506): n is a, c, g, or t
  misc_feature (508)..(511): n is a, c, g, or t
  misc_feature (513)..(520): n is a, c, g, or t
  misc_feature (522)..(526): n is a, c, g, or t
  misc_feature (528)..(529): n is a, c, g, or t
  misc_feature (531)..(538): n is a, c, g, or t
  misc_feature (540)..(542): n is a, c, g, or t
  misc_feature (544)..(545): n is a, c, g, or t
  misc_feature (547)..(548): n is a, c, g, or t
  misc_feature (550)..(550): n is a, c, g, or t
  misc_feature (552)..(557): n is a, c, g, or t
  misc_feature (561)..(561): n is a, c, g, or t
  misc_feature (564)..(566): n is a, c, g, or t
  misc_feature (568)..(570): n is a, c, g, or t
  misc_feature (572)..(573): n is a, c, g, or t
  misc_feature (575)..(575): n is a, c, g, or t
  misc_feature (577)..(580): n is a, c, g, or t
  misc_feature (583)..(586): n is a, c, g, or t
  misc_feature (588)..(590): n is a, c, g, or t
  misc_feature (595)..(596): n is a, c, g, or t
  misc_feature (598)..(600): n is a, c, g, or t
  misc_feature (603)..(607): n is a, c, g, or t
  misc_feature (609)..(612): n is a, c, g, or t
  misc_feature (614)..(614): n is a, c, g, or t
  misc_feature (616)..(617): n is a, c, g, or t
  misc_feature (620)..(625): n is a, c, g, or t
  misc_feature (627)..(628): n is a, c, g, or t
  misc_feature (630)..(633): n is a, c, g, or t
  misc_feature (635)..(637): n is a, c, g, or t
  misc_feature (640)..(642): n is a, c, g, or t
  misc_feature (644)..(644): n is a, c, g, or t
  misc_feature (647)..(648): n is a, c, g, or t
  misc_feature (650)..(650): n is a, c, g, or t
  misc_feature (652)..(653): n is a, c, g, or t
  misc_feature (655)..(664): n is a, c, g, or t
  misc_feature (666)..(668): n is a, c, g, or t
  misc_feature (671)..(671): n is a, c, g, or t
  misc_feature (673)..(674): n is a, c, g, or t
  misc_feature (676)..(677): n is a, c, g, or t
  misc_feature (679)..(681): n is a, c, g, or t
  misc_feature (683)..(691): n is a, c, g, or t
  misc_feature (693)..(693): n is a, c, g, or t
  misc_feature (696)..(705): n is a, c, g, or t
  misc_feature (707)..(717): n is a, c, g, or t
  misc_feature (719)..(720): n is a, c, g, or t
  misc_feature (722)..(722): n is a, c, g, or t
  misc_feature (725)..(729): n is a, c, g, or t
  misc_feature (731)..(731): n is a, c, g, or t
  misc_feature (733)..(734): n is a, c, g, or t
  misc_feature (736)..(736): n is a, c, g, or t
  misc_feature (739)..(739): n is a, c, g, or t
  misc_feature (741)..(741): n is a, c, g, or t
  misc_feature (744)..(744): n is a, c, g, or t
  misc_feature (746)..(748): n is a, c, g, or t
  misc_feature (750)..(750): n is a, c, g, or t
  misc_feature (752)..(753): n is a, c, g, or t
  misc_feature (755)..(761): n is a, c, g, or t
  misc_feature (770)..(770): n is a, c, g, or t
  misc_feature (772)..(772): n is a, c, g, or t
  misc_feature (774)..(774): n is a, c, g, or t
  misc_feature (1159)..(1159): n is a, c, g, or t
  misc_feature (1162)..(1162): n is a, c, g, or t
  misc_feature (1297)..(1297): n is a, c, g, or t
tcagtccatcacgcgttatctccgctctcacggtttgaggcgcaacgaactgcatgtccacgatcgcccggctcgtcagctgcggaatgaggtaagcgcgcccgaagcacaggctcgatgccagcatatagaacagcgactccggcgattcaagcccgcccgttttgttcttccaatcggcggatgtgtcgtacagttcgccgttctctctcagtatgccaaatggcagtgcgctcacggcgttggcggtcatgtccaccgcctttgccagccacggcaccacgcgcctgagctgctgcgcctgcgcnnngnnnntnnncnnnnnnccnnngntnnncncnannannncgnnnntgnncnnnnnnannncnnngntgatnncnntgangntnncgccnnnnnnnntnnnnntnnnnnctnntnnntnnnnnnnnnnnnntcntnnctgatgnnnnacnnnncgnnnnngangnnnnncnnnnngnnnncgngnnncnncncnnnnncnnnntnnnnnnnntnnnnngnngnnnnnnnntnnntnncnnangnnnnnngctngcnnncnnngnntngnnnntcnnnnannnggatnngnnngtnnnnnannnngntnngtnnnnnntnnannnngnnntgnnntntcnngntnntnnnnnnnnnngnnntgntnntnntnnngnnnnnnnnnangtnnnnnnnnnncnnnnnnnnnnngnngntcnnnnncncnncnatncngtncnnntncnntnnnnnnnaggccgcangnancctgtcctccagcactgggtaatccacgcggttgaatcggtcaagcgccaccatttcgcgcgtgttcacgtccagcaccgtgataaccgtgtaatccacggaagccgccacatccaccccagcgctgtactggtgcccatcaagcggttgctcaagtggttgcaggatggccgcgtcgtgtaccctgcggaagaccatgccctctgaatcaacgaactccgccaggtattcctgcctgaatatgatttcaggtaactccgcccgcgccgcttcgatctcacctttcggcatgaaagggttcgcgcttgtcgggtaggtgaacgatgaccaatccggctccgccccacccttgcggtgaatgtcccaaaaccagttgcgcccgcgnggngtggagatgaacagcgcccgccctaacctgtctgacaatgccggcctgattgcctctatccacgcctccggcataatgtacgcggcttcatccataacaacaaaatcaagcccctcaccgcgcagactgtcaggnttgtcggctgatctaacagccaccaatccaccgcctggaaacaccgcttgccgttctgacttattgaccgataccccgtcaagaggtgaacaaacctgcctgattggccgccagccgacattactcatcttgtaggttggtgcgatccaccaggcgcgcccgccacgcatagcgacttgcaaacattctgtaactgcaagccacgttttgccgaaacgcctgccggctgatacagtcctgaagcgcgtatcatccttgtaaatcttgaactgcgccggatgtaagtctgatataacctcaatcggaatcaccgccctgcgtcaattccctcaccgtcaatgaatgttttatgtccccaccatccgcgcccgtgacctcctgccgctcaacgtaaccgcgattcttgcccttcgtggatagttgatacttcagcgcccacgggtcagcattgatcaccgctttgcgtagattaagctcggcaatatctgtaacctcttcgtcaaactgatccttcaattcttgcaactctggatacttgttaatataagcatagatggcggtatgcgagcatcctaagtcggcagcagccaagtagaccgctcccttcttgttcttcagcgcctctataaccatcttcttgctcagcctgcggtgtcccatataaacttagtaaacctcttgccatatcaccatggattgcctattgacaatgagcacaattgcgcgtataatataagtgtaagttaaattcaattctattggaggacaaaatgaaagcaaaatatgaccaatatattcacgagtattacgatgaatccggaaatgtgcgttattccgtagcatggtgggacgagaataccggacagtatcagcgtccgctagatgctcggacacgggcattgaccggatgtcatacggaatacacccaccggattgaagagtttggtggttatctgaccaagcgccaggctctgcgccgggcacgatatctgtttggcgagaatgaataagatgatatacatgattggctattccaattttgaaccatcgcaaatcaagcagatcgcggatgaattgaacggggtaatatttgacgtgcgattgcacgcattttcgtatacaaccgcatattgcaagtccaaactggcggagctgctgggtgatagatatctccatattccccaatggggcaatgtgaattataaagaccggaatctcccgtttcggatagcggatttttatggcgggctggaaatatttgagcacgaatccaggccggtcatattgatgtgtacatgcaaaaattttttgaattgccatagattcatcctggtgagtagaatcggtggacaatacacagagataaaatccgcgtcgcagatattgcaaccatcgctgttctaaggcctccggcatctatatacatctgggactccttccggtaagtacggaaggagttccttcttaatgaagtaaggtatgtcattctcaagcatgaattttgttactcgctcggcaaaaccataccagttaatcgtcttttcatgcgcgtttctgttcaggcgtccaatacgataatgattgacgaaatttcgcgtcttttcaacgatcttataaacttcgtcttcgtacaacactggctcaagactcacccacgtaggtattccggcttcatggaatgtccgcagcgcattacagcgatcctcgaataacgccgcccctggctcccacttgcgactaagttcatctgttgtagttgttagagtgctggcgaattcatcgcgcggcgtaaatagcttgatgtcgcgcaacgcccgcgttccacccttcgtcagtgttacaaaggtatgacctgtagcatgaagtatttgaattgccttgcgtgtcaacccgtattccaattcggctggttgataagggtcgtttagaaacgacatcagaacgtgcccaccctctccacgctgatagcgcgcaattgcgtccttttccagcattaccaggaagttagcacgaggctcaatcctggcgttaaatatttctcgttttgtgaacgtagcagacggaacataacaatatgcacaggcatgcgtacatccatgatagatattcaacgcaagtgctgcatcactgcgcgccgatccggttggctcataaatcactgacactgttcacctctaacaccggctgaataccaatcttgctaaattgctccagtagaaatgcgatgtacatcggttcaatatcaatcccgacacaagacttcccgagctgctggcaggcaagtgctgtatttccgcaacctaaaaacggatcaaacaccgaattaccagagaaacagtcccctatcagcaggcgcacccaatcaagcggtttttcatacggatgaaatccatcattatgtaattgcggaagcggcatctggaagatgtcgctcaagtgctttccgcgcgggtcgggatggaatgtatacgctccacgtgagttttttacttcatgctcttctccagcatcaccataatgagccccgtcgaagttgtattgctcaatatctccgaaccacagcgccagcttcgcacgacgcaaaggacgatttggagtataccaagaggtgcaaccatcccatgcgaatatccacgtcggcaacccaaacattttaatcacatcccgcgccctgtatccatcactgtaagcgattattccctg

SEQ ID NO: 1034 - DNA, 4000 bp, Escherichia coli
atatttctcataaagaggagccatagcatgcgcgaatgctacgtttaattcaggactattgcccatgttgaggactgaaggatctgctgcatcacgagcttcttcagagtgacgttctgctagagcatcaattaggtctttttctaactcagaacaaccgtctttgagagttattgctttttggatatggtcgtgccctgaacctaggcctggagcccagttgtaatttgaagaaacacaatatgcaataccccaccatgccatagcacaatctggatcgatttcagcacatttactgaaacatgcaatcgcttcttcgtggttgtaattcaacatgtgcccataagcacggacaaacatttttcgggcatcatcattggcacaagttatcgtagttgcgaatgaaaaattcgcggcatttccgaaattataatcagttggggctaaagacatattttagcggaaatgagttctgaattaatgatttatgattaagttctaataggaggtagtcattttttagattggtgaatcagttatcttgtttaactgtaagatgaggataaggaataccgatattatttgacttgaatctatctaacatttctataagcagccaatctttagcttttctctcactattgtagtcatcaacccaacaatcgagtctgaatactagggcagtttcagtcacatcgtatagtagcacctcggtttttggactatcaatagtaaaactgcaatcattaattatattatttattagagattttacaattttaggatcagcatccagagaggttcgtattcggaaacgaagattcattgagtctttatctcccagagagcctcctaatgcatagttctcaactatttcacctgaaagtgttgtatttggtatcactactaaacgttcgttacccgtacgtatcttagtagtcatgaggccgacatcatcaacccttcctttcacccccattactatcactttatcaccctttgagaaaggcttgtcgagcaacatgagtagcccagaaactagatttgctgccgtttcttgtaatgcgagtcctataactaatgtcaatatagttgcagatgcaacaattgctgtgacatcgatattcatttggtctagagcgatgagaattgcagccagccaagcaaggagtttggaaacactaactgtaattgtttttagtgttgataaatcaagagatgtgttttcatccattgattgaaataatggaggtatgaactcatcgactatcgaagtaagaaactgagcaaataatatcagcaatatagccgctgatccaccagcaaaagcagatctttcgaaagagccctcttcaaatgcaaaacgaaatgtcaaccaaattccaataaggaatacacctgtattaagaattggtgtagctagattgaataatcggtcatcatatatgttatcacttgaagaaattaccttcaatactggtccacgtaatatcaatcttgaaattaaagttgcaacgatacttgccacgattccaacaagaatttgaacaaatatacttgaggattctaaatcatcaaaatatgattcgaatggggccatcatcaagtcttcaaagtgaggaatagtttatttgatttgtgccgacaatgatgtgaaattagtcgaaaaatagaacttttggtgctcgtgccgggatttgaacccgggtcgccgcctcgaaagggcggcatgatggaccgaactacaccacacgagcggtaagccgccgagaagcaaaccccacataatcgcaacggttcaaaccactacaaaaaaatataaactaatcttctatatcatcttcaatagactgactagaagatgaataagaagaaatccaaaaaaggaataaaactaaacccaataaataaaatattagcaacggattttgagtatcagatttaagccatctttcagaatctgtagggaaaaaatccgaattatcccctactccatcatcatcagaatctaaagtctcatttgaatcataagggaaggcgtcagaattatctccaattccatcaccatctgaatctaaatattcatcaggattattcgggaatacatcagaattatctcccaccccatcattatcaaaatcaattgtttcattagaatcataagggaaggaatctgaattatctcccactccatcgttatcagaatcggatatctcattagaatcataagggaaggcatcggaattatcccctactccatcgttatcggaatcaattgtttcatcaggatcatatgggaacatatctgaattgtcccctactccatcattgtctgaatctgctgtttcattagaattgttagggaacatatctgaattatctcccactccatcgttatcagaatcaattgtttcatcagggtcgtatggaaaaacatctgaattatctcctactccatcattgtcagaatctaaagtctcatttgaatcataagggaaggcatcagaattatctccaattccatcaccgtcagaatccatattttctaatggattatatggaaaagcatcagaattatctccaacaccatcgctatctgtatctagatgttcatttggattgagaggaaatacatcagagttatctccgattccatccctatctgtatctgaaatttcagtagaatcatcagggaactcatctgagttatcacctactccatcattatctgagtctactgtttcagtcgaatcattagggaactcatctgagttatcacctactccatcattatctgaatctactgtttcggttgaatcgttcggaaaagcatctgagttatcccctactccatcatcatctgaatctaatgtttcagttgaatcgttcggaaaagcatcagagttatcccctacaccatcgccatcagaatcttgattttcaagcggatcatgcgggaagtcgtctacatcatctctgaaaccatctccgtctgaatcaggggagtatccagtgaggccccaattcagtattgtttcagcgaaatcatcatcacttgcagatgatacagcaggtagatgaccaccatctggaattttccaaagagaaacacgattaccaaagttacagtttagatattcatattcaatcgtatcattttgtccactaggggatataatatctaattcgtctatcaaagttagagaagcgtcacattctgagcgattcgcccaataattaactgtttgaggtgctgaaggataattaccaccaaataatgaaccaccatcatactgaattacagagtctagagtcccatgtatttgtaaaatattgggatgaccagtgttctgacaatcattaaaatcagaatatgtggctccagcaagagatatcgcggctctgatcatatcgcctctttcacaggccatgcggtgagccatgaaaccaccattggaatgacctacgagtattattccctctggatctgcaccgtgatatgtgattgcctcatttatcaaaactgtcagccacgacacgtcatcaacatcttcattccaaatattacagcatgcatccgtggcattccagtacctttgaccagtagcactgtatgacccatctggcctcaataaaagatgcccgtttttatgcacactttctattaaatcaaagtatgaagaaacgaaagaacctgaattcgtaaaaccatgtaaagcaacaactaatggcaatttatagctagtattatggccaccaggcatctctaatatggcttttctagaagaaggaccaatctctaccgtagtatggttatctgtatattcaatagaatatctttcatcaatattagagttgttctcttcgaactgattaatagaattatttgtcgataatgaaaaagattgtgtgatgaaaattaatactatcaagaacggaattacttgggtccttatcattgagaaatctccacatttaatgaattccaccaattaattaa

SEQ ID NO: 1035 - DNA, 4000 bp, Escherichia coli
  misc_feature (49)..(49): n is a, c, g, or t
  misc_feature (92)..(92): n is a, c, g, or t
  misc_feature (202)..(202): n is a, c, g, or t
  misc_feature (959)..(959): n is a, c, g, or t
  misc_feature (1107)..(1107): n is a, c, g, or t
  misc_feature (1228)..(1228): n is a, c, g, or t
  misc_feature (1992)..(1993): n is a, c, g, or t
  misc_feature (2139)..(2139): n is a, c, g, or t
  misc_feature (2149)..(2151): n is a, c, g, or t
  misc_feature (2157)..(2159): n is a, c, g, or t
  misc_feature (2161)..(2162): n is a, c, g, or t
  misc_feature (2164)..(2169): n is a, c, g, or t
  misc_feature (2171)..(2171): n is a, c, g, or t
  misc_feature (2173)..(2173): n is a, c, g, or t
  misc_feature (2182)..(2188): n is a, c, g, or t
  misc_feature (2190)..(2194): n is a, c, g, or t
  misc_feature (2196)..(2197): n is a, c, g, or t
  misc_feature (2199)..(2201): n is a, c, g, or t
  misc_feature (2203)..(2208): n is a, c, g, or t
  misc_feature (2210)..(2211): n is a, c, g, or t
  misc_feature (2213)..(2213): n is a, c, g, or t
  misc_feature (2215)..(2215): n is a, c, g, or t
  misc_feature (2222)..(2222): n is a, c, g, or t
  misc_feature (2224)..(2227): n is a, c, g, or t
  misc_feature (2231)..(2232): n is a, c, g, or t
  misc_feature (2234)..(2250): n is a, c, g, or t
  misc_feature (2253)..(2254): n is a, c, g, or t
  misc_feature (2258)..(2293): n is a, c, g, or t
  misc_feature (2297)..(2301): n is a, c, g, or t
  misc_feature (2303)..(2304): n is a, c, g, or t
  misc_feature (2307)..(2308): n is a, c, g, or t
  misc_feature (2315)..(2316): n is a, c, g, or t
  misc_feature (2318)..(2318): n is a, c, g, or t
  misc_feature (2320)..(2321): n is a, c, g, or t
  misc_feature (2323)..(2326): n is a, c, g, or t
  misc_feature (2328)..(2330): n is a, c, g, or t
  misc_feature (2333)..(2336): n is a, c, g, or t
  misc_feature (2338)..(2342): n is a, c, g, or t
  misc_feature (2345)..(2347): n is a, c, g, or t
  misc_feature (2350)..(2350): n is a, c, g, or t
  misc_feature (2352)..(2354): n is a, c, g, or t
  misc_feature (2356)..(2359): n is a, c, g, or t
  misc_feature (2361)..(2363): n is a, c, g, or t
  misc_feature (2365)..(2366): n is a, c, g, or t
  misc_feature (2370)..(2370): n is a, c, g, or t
  misc_feature (2372)..(2372): n is a, c, g, or t
  misc_feature (2374)..(2378): n is a, c, g, or t
  misc_feature (2381)..(2382): n is a, c, g, or t
  misc_feature (2384)..(2386): n is a, c, g, or t
  misc_feature (2388)..(2389): n is a, c, g, or t
  misc_feature (2391)..(2391): n is a, c, g, or t
  misc_feature (2393)..(2394): n is a, c, g, or t
  misc_feature (2400)..(2400): n is a, c, g, or t
  misc_feature (2402)..(2402): n is a, c, g, or t
  misc_feature (2404)..(2406): n is a, c, g, or t
  misc_feature (2408)..(2412): n is a, c, g, or t
  misc_feature (2414)..(2419): n is a, c, g, or t
  misc_feature (2421)..(2422): n is a, c, g, or t
  misc_feature (2424)..(2424): n is a, c, g, or t
  misc_feature (2426)..(2427): n is a, c, g, or t
  misc_feature (2429)..(2432): n is a, c, g, or t
  misc_feature (2435)..(2435): n is a, c, g, or t
  misc_feature (2437)..(2438): n is a, c, g, or t
  misc_feature (2440)..(2441): n is a, c, g, or t
  misc_feature (2445)..(2446): n is a, c, g, or t
  misc_feature (2451)..(2451): n is a, c, g, or t
  misc_feature (2454)..(2455): n is a, c, g, or t
  misc_feature (2459)..(2459): n is a, c, g, or t
  misc_feature (2461)..(2464): n is a, c, g, or t
  misc_feature (2466)..(2466): n is a, c, g, or t
  misc_feature (2469)..(2469): n is a, c, g, or t
  misc_feature (2472)..(2480): n is a, c, g, or t
  misc_feature (2484)..(2487): n is a, c, g, or t
  misc_feature (2494)..(2496): n is a, c, g, or t
  misc_feature (2498)..(2500): n is a, c, g, or t
  misc_feature (2505)..(2505): n is a, c, g, or t
  misc_feature (2507)..(2507): n is a, c, g, or t
  misc_feature (2510)..(2518): n is a, c, g, or t
  misc_feature (2521)..(2521): n is a, c, g, or t
  misc_feature (2523)..(2523): n is a, c, g, or t
  misc_feature (2525)..(2525): n is a, c, g, or t
  misc_feature (2528)..(2530): n is a, c, g, or t
  misc_feature (2532)..(2533): n is a, c, g, or t
  misc_feature (2535)..(2535): n is a, c, g, or t
  misc_feature (2537)..(2537): n is a, c, g, or t
  misc_feature (2540)..(2543): n is a, c, g, or t
  misc_feature (2545)..(2547): n is a, c, g, or t
  misc_feature (2550)..(2550): n is a, c, g, or t
  misc_feature (2552)..(2553): n is a, c, g, or t
  misc_feature (2556)..(2558): n is a, c, g, or t
  misc_feature (2560)..(2560): n is a, c, g, or t
  misc_feature (2562)..(2564): n is a, c, g, or t
  misc_feature (2567)..(2573): n is a, c, g, or t
  misc_feature (2575)..(2579): n is a, c, g, or t
  misc_feature (2581)..(2584): n is a, c, g, or t
  misc_feature (2587)..(2587): n is a, c, g, or t
  misc_feature (2589)..(2589): n is a, c, g, or t
  misc_feature (2591)..(2592): n is a, c, g, or t
  misc_feature (2595)..(2595): n is a, c, g, or t
  misc_feature (2597)..(2597): n is a, c, g, or t
  misc_feature (2599)..(2599): n is a, c, g, or t
  misc_feature (2601)..(2602): n is a, c, g, or t
  misc_feature (2608)..(2610): n is a, c, g, or t
  misc_feature (2615)..(2619): n is a, c, g, or t
  misc_feature (2621)..(2646): n is a, c, g, or t
  misc_feature (2650)..(2662): n is a, c, g, or t
  misc_feature (2666)..(2675): n is a, c, g, or t
  misc_feature (2677)..(2684): n is a, c, g, or t
  misc_feature (2687)..(2688): n is a, c, g, or t
  misc_feature (2690)..(2694): n is a, c, g, or t
  misc_feature (2696)..(2700): n is a, c, g, or t
  misc_feature (2704)..(2706): n is a, c, g, or t
  misc_feature (2710)..(2714): n is a, c, g, or t
  misc_feature (2716)..(2719): n is a, c, g, or t
  misc_feature (2722)..(2722): n is a, c, g, or t
  misc_feature (2724)..(2725): n is a, c, g, or t
  misc_feature (2727)..(2727): n is a, c, g, or t
  misc_feature (2729)..(2729): n is a, c, g, or t
  misc_feature (2731)..(2732): n is a, c, g, or t
  misc_feature (2734)..(2737): n is a, c, g, or t
  misc_feature (2739)..(2739): n is a, c, g, or t
  misc_feature (2741)..(2742): n is a, c, g, or t
  misc_feature (2744)..(2744): n is a, c, g, or t
  misc_feature (2746)..(2746): n is a, c, g, or t
  misc_feature (2748)..(2749): n is a, c, g, or t
  misc_feature (2751)..(2751): n is a, c, g, or t
  misc_feature (2753)..(2754): n is a, c, g, or t
  misc_feature (2756)..(2764): n is a, c, g, or t
  misc_feature (2766)..(2767): n is a, c, g, or t
  misc_feature (2769)..(2770): n is a, c, g, or t
  misc_feature (2772)..(2772): n is a, c, g, or t
  misc_feature (2774)..(2774): n is a, c, g, or t
  misc_feature (2776)..(2778): n is a, c, g, or t
  misc_feature (2780)..(2781): n is a, c, g, or t
  misc_feature (2783)..(2783): n is a, c, g, or t
  misc_feature (2785)..(2787): n is a, c, g, or t
  misc_feature (2789)..(2789): n is a, c, g, or t
  misc_feature (2791)..(2791): n is a, c, g, or t
  misc_feature (2793)..(2793): n is a, c, g, or t
  misc_feature (2796)..(2805): n is a, c, g, or t
  misc_feature (2807)..(2808): n is a, c, g, or t
  misc_feature (2810)..(2810): n is a, c, g, or t
  misc_feature (2812)..(2814): n is a, c, g, or t
  misc_feature (2818)..(2819): n is a, c, g, or t
  misc_feature (2821)..(2824): n is a, c, g, or t
  misc_feature (2826)..(2835): n is a, c, g, or t
  misc_feature (2839)..(2839): n is a, c, g, or t
  misc_feature (2841)..(2841): n is a, c, g, or t
  misc_feature (2848)..(2848): n is a, c, g, or t
  misc_feature (2851)..(2856): n is a, c, g, or t
  misc_feature (2858)..(2858): n is a, c, g, or t
  misc_feature (2860)..(2869): n is a, c, g, or t
  misc_feature (2871)..(2873): n is a, c, g, or t
  misc_feature (2877)..(2878): n is a, c, g, or t
  misc_feature (2880)..(2880): n is a, c, g, or t
  misc_feature (2882)..(2884): n is a, c, g, or t
  misc_feature (2886)..(2887): n is a, c, g, or t
  misc_feature (2889)..(2889): n is a, c, g, or t
  misc_feature (2891)..(2893): n is a, c, g, or t
  misc_feature (2895)..(2895): n is a, c, g, or t
  misc_feature (2897)..(2897): n is a, c, g, or t
  misc_feature (2899)..(2899): n is a, c, g, or t
  misc_feature (2901)..(2901): n is a, c, g, or t
  misc_feature (2903)..(2903): n is a, c, g, or t
  misc_feature (2905)..(2905): n is a, c, g, or t
  misc_feature (2907)..(2909): n is a, c, g, or t
  misc_feature (2913)..(2921): n is a, c, g, or t
  misc_feature (2923)..(2924): n is a, c, g, or t
  misc_feature (2926)..(2926): n is a, c, g, or t
  misc_feature (2930)..(2930): n is a, c, g, or t
  misc_feature (2932)..(2932): n is a, c, g, or t
  misc_feature (2934)..(2950): n is a, c, g, or t
  misc_feature (2954)..(2957): n is a, c, g, or t
  misc_feature (2959)..(2959): n is a, c, g, or t
  misc_feature (2961)..(2964): n is a, c, g, or t
  misc_feature (2966)..(2966): n is a, c, g, or t
  misc_feature (2969)..(2972): n is a, c, g, or t
  misc_feature (2974)..(2974): n is a, c, g, or t
  misc_feature (2976)..(2979): n is a, c, g, or t
  misc_feature (2981)..(2981): n is a, c, g, or t
  misc_feature (2983)..(2983): n is a, c, g, or t
  misc_feature (2985)..(2990): n is a, c, g, or t
  misc_feature (2994)..(2994): n is a, c, g, or t
  misc_feature (2996)..(2996): n is a, c, g, or t
  misc_feature (2998)..(2998): n is a, c, g, or t
  misc_feature (3000)..(3003): n is a, c, g, or t
  misc_feature (3005)..(3006): n is a, c, g, or t
  misc_feature (3009)..(3015): n is a, c, g, or t
  misc_feature (3017)..(3017): n is a, c, g, or t
  misc_feature (3019)..(3020): n is a, c, g, or t
  misc_feature (3022)..(3022): n is a, c, g, or t
  misc_feature (3024)..(3024): n is a, c, g, or t
  misc_feature (3026)..(3032): n is a, c, g, or t
  misc_feature (3034)..(3035): n is a, c, g, or t
  misc_feature (3038)..(3044): n is a, c, g, or t
  misc_feature (3046)..(3046): n is a, c, g, or t
  misc_feature (3048)..(3048): n is a, c, g, or t
  misc_feature (3051)..(3055): n is a, c, g, or t
  misc_feature (3057)..(3058): n is a, c, g, or t
  misc_feature (3060)..(3060): n is a, c, g, or t
  misc_feature (3063)..(3063): n is a, c, g, or t
  misc_feature (3066)..(3066): n is a, c, g, or t
  misc_feature (3069)..(3072): n is a, c, g, or t
  misc_feature (3075)..(3075): n is a, c, g, or t
  misc_feature (3077)..(3080): n is a, c, g, or t
  misc_feature (3082)..(3082): n is a, c, g, or t
  misc_feature (3085)..(3085): n is a, c, g, or t
  misc_feature (3087)..(3088): n is a, c, g, or t
  misc_feature (3091)..(3094): n is a, c, g, or t
  misc_feature (3096)..(3096): n is a, c, g, or t
  misc_feature (3100)..(3100): n is a, c, g, or t
  misc_feature (3102)..(3103): n is a, c, g, or t
  misc_feature (3105)..(3105): n is a, c, g, or t
  misc_feature (3111)..(3112): n is a, c, g, or t
  misc_feature (3114)..(3114): n is a, c, g, or t
  misc_feature (3117)..(3120): n is a, c, g, or t
  misc_feature (3124)..(3125): n is a, c, g, or t
  misc_feature (3128)..(3130): n is a, c, g, or t
  misc_feature (3133)..(3133): n is a, c, g, or t
  misc_feature (3135)..(3136): n is a, c, g, or t
  misc_feature (3140)..(3140): n is a, c, g, or t
  misc_feature (3142)..(3142): n is a, c, g, or t
  misc_feature (3145)..(3145): n is a, c, g, or t
  misc_feature (3147)..(3148): n is a, c, g, or t
  misc_feature (3150)..(3150): n is a, c, g, or t
  misc_feature (3153)..(3153): n is a, c, g, or t
  misc_feature (3156)..(3159): n is a, c, g, or t
  misc_feature (3161)..(3162): n is a, c, g, or t
  misc_feature (3164)..(3167): n is a, c, g, or t
  misc_feature (3169)..(3169): n is a, c, g, or t
  misc_feature (3171)..(3173): n is a, c, g, or t
  misc_feature (3175)..(3179): n is a, c, g, or t
  misc_feature (3181)..(3181): n is a, c, g, or t
  misc_feature (3183)..(3188): n is a, c, g, or t
  misc_feature (3190)..(3190): n is a, c, g, or t
  misc_feature (3192)..(3192): n is a, c, g, or t
  misc_feature (3194)..(3204): n is a, c, g, or t
  misc_feature (3210)..(3210): n is a, c, g, or t
  misc_feature (3212)..(3215): n is a, c, g, or t
  misc_feature (3217)..(3217): n is a, c, g, or t
  misc_feature (3219)..(3220): n is a, c, g, or t
  misc_feature (3222)..(3228): n is a, c, g, or t
  misc_feature (3230)..(3231): n is a, c, g, or t
  misc_feature (3233)..(3241): n is a, c, g, or t
  misc_feature (3244)..(3244): n is a, c, g, or t
  misc_feature (3247)..(3256): n is a, c, g, or t
  misc_feature (3258)..(3258): n is a, c, g, or t
  misc_feature (3260)..(3260): n is a, c, g, or t
  misc_feature (3262)..(3262): n is a, c, g, or t
  misc_feature (3264)..(3264): n is a, c, g, or t
  misc_feature (3266)..(3267): n is a, c, g, or t
  misc_feature (3272)..(3274): n is a, c, g, or t
  misc_feature (3277)..(3281): n is a, c, g, or t
  misc_feature (3283)..(3283): n is a, c, g, or t
  misc_feature (3285)..(3292): n is a, c, g, or t
  misc_feature (3294)..(3296): n is a, c, g, or t
  misc_feature (3298)..(3302): n is a, c, g, or t
  misc_feature (3304)..(3304): n is a, c, g, or t
  misc_feature (3308)..(3313): n is a, c, g, or t
  misc_feature (3315)..(3315): n is a, c, g, or t
  misc_feature (3318)..(3318): n is a, c, g, or t
  misc_feature (3320)..(3326): n is a, c, g, or t
  misc_feature (3328)..(3328): n is a, c, g, or t
  misc_feature (3330)..(3331): n is a, c, g, or t
  misc_feature (3333)..(3334): n is a, c, g, or t
  misc_feature (3336)..(3339): n is a, c, g, or t
  misc_feature (3341)..(3344): n is a, c, g, or t
  misc_feature (3346)..(3346): n is a, c, g, or t
  misc_feature (3349)..(3353): n is a, c, g, or t
  misc_feature (3355)..(3355): n is a, c, g, or t
  misc_feature (3357)..(3361): n is a, c, g, or t
  misc_feature (3363)..(3366): n is a, c, g, or t
  misc_feature (3368)..(3368): n is a, c, g, or t
  misc_feature (3370)..(3373): n is a, c, g, or t
  misc_feature (3375)..(3377): n is a, c, g, or t
  misc_feature (3379)..(3379): n is a, c, g, or t
  misc_feature (3381)..(3386): n is a, c, g, or t
  misc_feature (3388)..(3388): n is a, c, g, or t
  misc_feature (3390)..(3391): n is a, c, g, or t
  misc_feature (3394)..(3404): n is a, c, g, or t
  misc_feature (3406)..(3406): n is a, c, g, or t
  misc_feature (3409)..(3409): n is a, c, g, or t
  misc_feature (3411)..(3412): n is a, c, g, or t
  misc_feature (3414)..(3414): n is a, c, g, or t
  misc_feature (3417)..(3417): n is a, c, g, or t
  misc_feature (3422)..(3428): n is a, c, g, or t
  misc_feature (3430)..(3443): n is a, c, g, or t
  misc_feature (3445)..(3445): n is a, c, g, or t
  misc_feature (3448)..(3448): n is a, c, g, or t
  misc_feature (3450)..(3454): n is a, c, g, or t
  misc_feature (3456)..(3467): n is a, c, g, or t
  misc_feature (3471)..(3472): n is a, c, g, or t
  misc_feature (3474)..(3474): n is a, c, g, or t
  misc_feature (3476)..(3476): n is a, c, g, or t
  misc_feature (3478)..(3479): n is a, c, g, or t
  misc_feature (3483)..(3485): n is a, c, g, or t
  misc_feature (3487)..(3489): n is a, c, g, or t
  misc_feature (3491)..(3491): n is a, c, g, or t
  misc_feature (3493)..(3495): n is a, c, g, or t
  misc_feature (3498)..(3503): n is a, c, g, or t
  misc_feature (3505)..(3508): n is a, c, g, or t
  misc_feature (3510)..(3510): n is a, c, g, or t
  misc_feature (3512)..(3513): n is a, c, g, or t
  misc_feature (3519)..(3522): n is a, c, g, or t
  misc_feature (3524)..(3525): n is a, c, g, or t
  misc_feature (3527)..(3528): n is a, c, g, or t
  misc_feature (3531)..(3541): n is a, c, g, or t
  misc_feature (3543)..(3547): n is a, c, g, or t
  misc_feature (3549)..(3549): n is a, c, g, or t
  misc_feature (3552)..(3552): n is a, c, g, or t
  misc_feature (3555)..(3558): n is a, c, g, or t
  misc_feature (3560)..(3564): n is a, c, g, or t
  misc_feature (3566)..(3569): n is a, c, g, or t
  misc_feature (3571)..(3576): n is a, c, g, or t
  misc_feature (3579)..(3582): n is a, c, g, or t
  misc_feature (3584)..(3584): n is a, c, g, or t
  misc_feature (3587)..(3587): n is a, c, g, or t
  misc_feature (3589)..(3589): n is a, c, g, or t
  misc_feature (3591)..(3592): n is a, c, g, or t
  misc_feature (3594)..(3594): n is a, c, g, or t
  misc_feature (3597)..(3597): n is a, c, g, or t
  misc_feature (3600)..(3601): n is a, c, g, or t
  misc_feature (3603)..(3604): n is a, c, g, or t
  misc_feature (3606)..(3623): n is a, c, g, or t
  misc_feature (3625)..(3630): n is a, c, g, or t
  misc_feature (3634)..(3636): n is a, c, g, or t
  misc_feature (3638)..(3638): n is a, c, g, or t
  misc_feature (3640)..(3645): n is a, c, g, or t
  misc_feature (3647)..(3652): n is a, c, g, or t
  misc_feature (3654)..(3655): n is a, c, g, or t
  misc_feature (3657)..(3658): n is a, c, g, or t
  misc_feature (3660)..(3669): n is a, c, g, or t
  misc_feature (3672)..(3674): n is a, c, g, or t
  misc_feature (3678)..(3678): n is a, c, g, or t
  misc_feature (3683)..(3690): n is a, c, g, or t
  misc_feature (3692)..(3692): n is a, c, g, or t
  misc_feature (3698)..(3698): n is a, c, g, or t
  misc_feature (3701)..(3701): n is a, c, g, or t
  misc_feature (3703)..(3703): n is a, c, g, or t
  misc_feature (3706)..(3706): n is a, c, g, or t
  misc_feature (3708)..(3708): n is a, c, g, or t
  misc_feature (3710)..(3724): n is a, c, g, or t
  misc_feature (3726)..(3726): n is a, c, g, or t
  misc_feature (3728)..(3731): n is a, c, g, or t
  misc_feature (3733)..(3733): n is a, c, g, or t
  misc_feature (3736)..(3736): n is a, c, g, or t
  misc_feature (3738)..(3738): n is a, c, g, or t
  misc_feature (3742)..(3742): n is a, c, g, or t
  misc_feature (3745)..(3745): n is a, c, g, or t
  misc_feature (3747)..(3747): n is a, c, g, or t
  misc_feature (3749)..(3753): n is a, c, g, or t
  misc_feature (3755)..(3756): n is a, c, g, or t
  misc_feature (3758)..(3759): n is a, c, g, or t
  misc_feature (3761)..(3761): n is a, c, g, or t
  misc_feature (3765)..(3765): n is a, c, g, or t
  misc_feature (3768)..(3768): n is a, c, g, or t
  misc_feature (3771)..(3772): n is a, c, g, or t
  misc_feature (3774)..(3777): n is a, c, g, or t
  misc_feature (3782)..(3782): n is a, c, g, or t
  misc_feature (3784)..(3784): n is a, c, g, or t
  misc_feature (3786)..(3791): n is a, c, g, or t
  misc_feature (3794)..(3796): n is a, c, g, or t
  misc_feature (3798)..(3798): n is a, c, g, or t
  misc_feature (3800)..(3800): n is a, c, g, or t
  misc_feature (3802)..(3810): n is a, c, g, or t
  misc_feature (3814)..(3814): n is a, c, g, or t
  misc_feature (3816)..(3816): n is a, c, g, or t
  misc_feature (3818)..(3818): n is a, c, g, or t
  misc_feature (3820)..(3825): n is a, c, g, or t
  misc_feature (3827)..(3832): n is a, c, g, or t
  misc_feature (3836)..(3844): n is a, c, g, or t
  misc_feature (3846)..(3846): n is a, c, g, or t
  misc_feature (3848)..(3849): n is a, c, g, or t
  misc_feature (3851)..(3852): n is a, c, g, or t
  misc_feature (3854)..(3866): n is a, c, g, or t
  misc_feature (3868)..(3868): n is a, c, g, or t
  misc_feature (3870)..(3871): n is a, c, g, or t
  misc_feature (3874)..(3881): n is a, c, g, or t
  misc_feature (3883)..(3883): n is a, c, g, or t
  misc_feature (3885)..(3888): n is a, c, g, or t
  misc_feature (3890)..(3890): n is a, c, g, or t
  misc_feature (3892)..(3895): n is a, c, g, or t
  misc_feature (3897)..(3899): n is a, c, g, or t
  misc_feature (3901)..(3901): n is a, c, g, or t
  misc_feature (3903)..(3903): n is a, c, g, or t
  misc_feature (3905)..(3907): n is a, c, g, or t
  misc_feature (3909)..(3909): n is a, c, g, or t
  misc_feature (3914)..(3915): n is a, c, g, or t
  misc_feature (3919)..(3920): n is a, c, g, or t
  misc_feature (3923)..(3928): n is a, c, g, or t
  misc_feature (3930)..(3930): n is a, c, g, or t
  misc_feature (3932)..(3934): n is a, c, g, or t
  misc_feature (3936)..(3936): n is a, c, g, or t
  misc_feature (3942)..(3945): n is a, c, g, or t
  misc_feature (3949)..(3950): n is a, c, g, or t
  misc_feature (3952)..(3952): n is a, c, g, or t
  misc_feature (3954)..(3954): n is a, c, g, or t
  misc_feature (3958)..(3958): n is a, c, g, or t
  misc_feature (3960)..(3962): n is a, c, g, or t
  misc_feature (3965)..(3966): n is a, c, g, or t
  misc_feature (3968)..(3968): n is a, c, g, or t
  misc_feature (3970)..(3970): n is a, c, g, or t
  misc_feature (3972)..(3972): n is a, c, g, or t
  misc_feature (3975)..(3975): n is a, c, g, or t
  misc_feature (3977)..(3978): n is a, c, g, or t
  misc_feature (3980)..(3982): n is a, c, g, or t
  misc_feature (3984)..(3987): n is a, c, g, or t
  misc_feature (3989)..(3989): n is a, c, g, or t
  misc_feature (3991)..(3994): n is a, c, g, or t
  misc_feature (3999)..(4000): n is a, c, g, or t
cacgccttcttccttgtcggccatgtcgctcgaaagcttcgtgccgtcngtgatcagaccgtcttgcgtgagtttgccgctggtagcatctncgatgcggttgcccgaagcgtcaacacccatgtaagcgaagccgttgttgtaagcagtttgtgcctgctggaggagcttctgggccttttcgttgttgatgtcttgttcngcactcttcaggaggtcagccacttcctggtcggtgatggtgcgtgccttgaaggtcgaaccgtcagcctgccagtcccaaaccacggtaccgttgtggtcactgccggtgtgtacaccgccgaattcccaacggtcgccgccgttgtaaccccagtagttacccttaccgcgccagaggtcgggcgagtagaagcagaagtagccgggatagttgcggctggtcacgatgttgtaggaagcctcggctccatccgtcatttcgatacgagcgctgggaacgatactgccgttggaggcaatgttctgagccgtacccacgtaacgattggtagccaagttttggaagaagaagtaaccgggtttcgcatcgttcttcgtcaccttccagatgtacttcaagctcttgtagtcgagcggagcatccttcttgtaggtgatgtcgccacccttgtaagtccaatgcagttgcttgtccttatcgttcactgcaccaccgtcgtaaagtgcaccgtcgtcatagccggtaccctgcgagcggtaggaagtgaggatgtagtaaccgggctcgagcaccttacccgaggtggtgaaggtggtgtaagccttgggcagatctaccacgagctgatcgatctcgtcgtcggtagccgttgcgccaccgttgaggatctcttgcgacttgttgtagagtgccatgaaggcgtcgtacttcgcctggttgtactcaccgatgttgttaccgcgggggaacttcncggagaattcatccacgttgaagttggcaccgagcgattcggcgatcacagcctggaggtcttccttggcagtgagctcgttggcggcgtataccaaccacgcgttgcggttgtagtccgtgcccttgccggcatcgccgttgagcgncgtcttggggcaggtgagcaagaagttgtactcgctgtacttgtcgtccttctttttcgcttcgggcgaaacgagcacgacggtgttgtcaccattcacaaaggtgaaggtgctcaagtcnagattctcgttgttggcacgagcttcttccacgtaagcgcgaacgcccttgatggtttcggttgtgtcaacaccgtcagccttggcatgcgtccactcgtaggagtgttcgggatccttgacttcagtgacttgcttcacttcgatcttccaagcacgatccgtagcggaggtgtagaagttttggttcgaaggatctgcaagatactggttttcgttcacgcctttgcgcttgaggtagaaggtcttaccgtcacccgttgattcaaagacgaaaacgttgtcgagcgtcaagctggtcgttgtggtgaacttctgtccggcgaggaagcagttgccgttcgcagcttcggagaacgcaggctgaagcacatacgattgtccggctacgatgttggtcactgcaccatcgttgacgttagcaccccaatggcgagcagacgcacttgtcgctccggccaccaggagggcggtcaaagcaaacaaattgcaaacctttttcattgaagatttaacattaaagttagacatagagataattcgatgggacacgatgcgacttccatgtacctcccccatcgaaaacagaagggtcacggaagtttagtgcagggtgttcgtgcgacaaagatagagaaaaaaaactacacatggcagattcgcatctaaaaaacgacgagtttctgcccgacagcactgcattttatactttgtcgccccttgtgttttttgaaaaatctaaatgatttccgctggtcccgttgnnggattaactgaaaagtgttgaatctgtccttgtgtttttccggtttcgtgtgggagaaggggatgcttcggcgcgctgtttgtgccgttcgtcaggtctgttcggtaaacgacggaaaggggtgccgatgctcggtgggagacagngcgtcgatgnnngccgannncnncnnnnnngnanaaaaaacgnnnnnnntnnnnnannannncnnnnnngnngncnccccccntnnnntttnngnnnnnnnnnnnnnnnnnggnntttnnnnnnnnnnnnnnnnnnnnnnnnnnnnnnnnnnnncccnnnnnannttnnttttttnncntnncnnnntnnnccnnnngnnnnnaannnttntnnntnnnntnnntnngggngnannnnnttnngnnnanncntnncccccncngnnngnnnnncnnnnnngnngnanntnnnncgncnntnnttcnnttttnccnncggngnnnncnttnttnnnnnnnnntttnnnngaaaaannngnnnttttncnaannnnnnnnnggngnanggnnnannancnaannnntnnnccntnnttnnntntnnnttnnnnnnntnnnnnannnnggngnannggngnangnnaaaaannnaaaannnnngnnnnnnnnnnnnnnnnnnnnnnnnnngggnnnnnnnnnnnnncccnnnnnnnnnngnnnnnnnnttnngnnnnncnnnnngggnnngcgnnnnngnnnnagngnngngngnntnnnngngnngngncnngngnnannnnnnnnngnngnncncncnnngnncncnnngngncntcnnnnnnnnnntnncncnnncgcnntnnnngnnnnnnnnnnaaangngggcgcncannnnnngngnnnnnnnnnncnnngtgnncncnnngnncncnnngngngngngncncnnngagnnnnnnnnncnncncccncncnnnnnnnnnnnnnnnnngggnnnncncnnnncnccnnnngngnnnncncncnnnnnnaacncncngnnnngnnttnnnnnnnananngnanannnnnnngnngcnnnnnnngngnggnnnnngnngngcnccnccnnnngtntnnnncnccncnnccnnnngngggngnngnggcgcnngngtnnnngtgnngannncgngnngtgngnggngnntnttntgnnnntnntnnnncncnnngnnnnngngnnnnnngngnannnnnnnnnnngcgtcncnnnngngnngnnnnnnncnncnnnnnnnnngcncannnnnnnnnngngngngncnnagagnnnaannnnncncnnnnnnnngnnnannnnncncgcnnnnnncnccncnnnnnnngngnngnngnnnntnnnncncannnnncncnnnnncnnnntntnnnngnnncncnnnnnngngnnatnnnnnnnnnnngngcngnncnccncgcgnnnnnnngnnnnnnnnnnnnnngnggngnnnnncnnnnnnnnnnnngtgnngngngnngtgnnnannngngnnnagnnnnnnannnncncnncgcgcnnnncnncnnagnnnnnnnnnnncnnnnnanagngcnnnngnnnnnannnngnnnnnnacnnnngnggngngnngnggnggnncnncnnnnnnnnnnnnnnnnnntnnnnnntgtnnntntnnnnnnannnnnngnngnncnnnnnnnnnnttnnncacngcgcnnnnnnnncnccgcgnggngnggngngnnnnnnnnnnnnnnncncnnnngnggngngcgnggngngnnnnngnngnngngagnggnggnngnnnnagagntntnnnnnnggnnnananannnnnnnnngcgngnanannnnnncnnnnnngtgnnnnnnnnngngnngnncnnnnnnnnnnnnncncnnctnnnnnnnntntnnnntntnnnncnnngngngnnncncgcgnngcgnnggnnnnnncncnnngnggagannnngcgnngngngggngnnnaanngngngnggngnncnnnannnngngnnnngtgtnn

SEQ ID NO: 1036 - DNA, 4000 bp, Escherichia coli
  misc_feature (1160)..(1160): n is a, c, g, or t
  misc_feature (1646)..(1646): n is a, c, g, or t
  misc_feature (1658)..(1658): n is a, c, g, or t
  misc_feature (4000)..(4000): n is a, c, g, or t
tccatttaaagtttgataatatccacgagctgttggtgttccagctacgtgaaacgtatctattgtagaccaatcctcataagagtttccattatggtgtgtatagttattcattattcctgatacataactccataatatataagtgtcgtttaactgaaataaatcatctccgtcaacatcaccaataaagtattcaatagaatttaatgtgtctattctaccaccaccactattataattgtgatgtttacctgattggaagttaaatgacattatagcatcggttacatttgtaatttgatttctatctaattcaagttgaacgtggttttcaatatcatcacttgcatcaggaggccaaaatgacattcggtatccattgtttcttggtaactgtatattataatatccattagaatctgtataagttgaatcataataagatataccaagaaatccctctgcgggcactacttggtctgctattgttgtttttttaagataaaaatatcctggagctcctgattgataattaccaataacgtcatcggtagtattagtttctgttgttgtagtagcatctgtaattgattctatgttataccaattagaataagaatgtggattactttggtctaattcaaattttattttccaatatggatatgtgttgtctgttgctgtagtgaatgctgctgcaacggctctacctttaccttgaacatatcttaaataaccctctacatctactaactttggatgtaatgtaatatcaccacgtgcaccacctataccaactccatcttgtcctgtgttaccatctatataaatttgatatgtagttagataatttccatttgttacataagtataatatccagttccagctaaatatttagttgctactctaaatgatttagcagaaaaattatctacaacatcttttattctaaaatgtaattttaataattctgtttgagtagaatctccattaccaaatgtgtgcgtatttccattatgagaaaccattgtgattcttaaccaatcatatcgagcatctgtaatagattttgaagtatcttgtgttccacctgcggctaatgaatcagcatatcctacatcagcatacctaacaacttcgtaagagtaatgtgcanctgctgcactatctccttcagtccaaccatttatatatgcacctttctctacgtgggttgaatcgtgagtccaatctattaaatcattatcaaatactaaatctaaacgaaaagcagttacatcggcatcgttgtcatcaagtgtaacagcaattgtcattactgaatctctccaagcatcaaagttattattcttatacgcaacacctctagtcttacttttataagtaccgttagttggattagctaaaccagtagtatcatctgctaaaaatcctcttagcttaaaattttcttgtgctccccaccaatactttggtgtgttatactcccttgattgcataagtctaattattggtgtctgagtatatacgaaactcatcaccatcaagaggcttaataaaaatttacgcaatgtaaatctcctcgttatgttctaagttaagtaaccttttagaataaaaagggttttgatttattccttanatataaatattntatatataagttataattagtttattggatgtattaatttgtattaatttgtgtcgaatttcacaacaaaattacttataaatcaaacctaatagtgaatgccatgtcatatttttttgatttttttattggtttggcaagttttgaaactgctaataaatcatcattatcgttatataaccctatcgtagttacataagtatgaaaatctgaatgtgatacaaaattttctaacttaaatgtaggttttattaaagtattttcttgatactcttcatattttgtataatgaccaattgcaggatatgcacttgaagttctttctaacccctgtctaacttctggaaaatattctaaattagaacctacccaatcagaaccagaaccttcaaaagttgcacttttatttgttggggtgttaaattcatttttctttgctatgactaaatattcgtgttcgtatattgtttgagaattttcaaattctaattcccaaccatcagaaccagaacctaaacccacttcattataactacctgtatctgttatacaaactaatccatgttgataaaaaacatttccaactaaactaccactattattactgtctggagttcctgctgcataacttgaactaaatgcagtatcgtacatattgccataaccatcatcaaccaacacaagtgtttgtgatgtactattatcaagtattcttacactacctggatatatctgttctccaaaaaatttacggggaacattaaatacttgtactgaatcgtgtaattgtcgtctacgaggtgtagaaagagttgtttcattaggtcttggccaagcaagttctaaatcatcaaaagttttatcgggttgtggacagtttgcagaccatggattaggtgtttcttcaccttttacatataagtgatgaattgatctccatattggtttatgataccaagtaccaacactataccattcatcttttccgtgtcctaaagatttagattcttcactaaatgcaccaattgattgtgaggccgcactggcagagttaaaccccaacaaacttccactatgtccttcaagaacaaagacaccacttccagaatctacttctgtaaaggaatatgccttatgaaccttaaagggtgtgaatttataatccccaacaccaaggttcttaaacatcctgtatctcccttagaagtctaatctgacttttactgttgcttctcttgagggtgtttttaagaatggtttggaaagtttagcgactgctaataattcatctgtaccattatacaaaccaactgtagttacataagaacgaggatcggttaagaaattaggattagttaaatctccattacttcctgtaaaatatgttggattttgactataattaaacatattgtttttaactctacagaaataatgagttgatttaatttcttcttcacgtcttgcttgaaaatatcccgtaccagatgcatctgatttaaatgctttaaacaacttactatgattaaagtcatccgcgttatctgaatatgcagttcctaaacttacaccacttaccgtgcctgcggcttctgctggtgcatcatctaagagttttctatcaagataaatcacacctaaatatggatagaatctaccataatatttcttagtagttccagtactatatcggtatgcggatgctccaccttgaattgaaccagacactacattaaaatatgtagatgcctttccagtttcagggtttgtagttgcatcactatcatcaattaggcttaatccttcagcaccagctggcgttcgtaaatctatttgccagttacctggatccattttctctctcattcgggctcttgccacactaagaaaatatccatcagtagaacttgattctgctcccgttgccccaattttaaaatatgtttgggatgggggaagtatcagattcttaaattgtctataaattgcctgacttggattattacctgattgagcattctttgaaccacttcctgcgaagtgtccgtaagcaatactaaattgtacctctgatgtagttgaagatgttacttcgttgtgaatatctaaataatattcaccactgcttccactttgtaaggatgatgtaaacatccctgctgttgtggatgtagcatctaatttaattgctccaccagaccacattccagtagataccgttgatgttgtttcttgtacatcactttggccgtcgaattcaacaaatactgccatttttaactcctgttataataatttaatttttttgtcattaccctactcaatatttactatctctctan

SEQ ID NO: 1037 - DNA, 4000 bp, Escherichia coli
  misc_feature (126)..(126): n is a, c, g, or t
  misc_feature (174)..(174): n is a, c, g, or t
  misc_feature (177)..(177): n is a, c, g, or t
  misc_feature (492)..(492): n is a, c, g, or t
  misc_feature (495)..(495): n is a, c, g, or t
  misc_feature (1001)..(1001): n is a, c, g, or t
  misc_feature (1193)..(1193): n is a, c, g, or t
  misc_feature (1566)..(1566): n is a, c, g, or t
  misc_feature (1985)..(1985): n is a, c, g, or t
  misc_feature (1988)..(1988): n is a, c, g, or t
  misc_feature (1990)..(1990): n is a, c, g, or t
  misc_feature (2624)..(2624): n is a, c, g, or t
  misc_feature (3029)..(3029): n is a, c, g, or t
  misc_feature (3065)..(3065): n is a, c, g, or t
  misc_feature (3143)..(3143): n is a, c, g, or t
  misc_feature (3191)..(3191): n is a, c, g, or t
  misc_feature (3194)..(3194): n is a, c, g, or t
  misc_feature (3201)..(3201): n is a, c, g, or t
  misc_feature (3385)..(3385): n is a, c, g, or t
  misc_feature (3469)..(3469): n is a, c, g, or t
  misc_feature (3490)..(3490): n is a, c, g, or t
  misc_feature (3492)..(3492): n is a, c, g, or t
  misc_feature (3503)..(3504): n is a, c, g, or t
  misc_feature (3526)..(3526): n is a, c, g, or t
  misc_feature (3553)..(3553): n is a, c, g, or t
  misc_feature (3557)..(3557): n is a, c, g, or t
  misc_feature (3560)..(3560): n is a, c, g, or t
  misc_feature (3579)..(3579): n is a, c, g, or t
  misc_feature (3583)..(3583): n is a, c, g, or t
  misc_feature (3586)..(3586): n is a, c, g, or t
  misc_feature (3588)..(3589): n is a, c, g, or t
  misc_feature (3599)..(3599): n is a, c, g, or t
  misc_feature (3613)..(3614): n is a, c, g, or t
  misc_feature (3618)..(3618): n is a, c, g, or t
  misc_feature (3621)..(3621): n is a, c, g, or t
  misc_feature (3628)..(3628): n is a, c, g, or t
  misc_feature (3634)..(3636): n is a, c, g, or t
  misc_feature (3638)..(3639): n is a, c, g, or t
  misc_feature (3652)..(3652): n is a, c, g, or t
  misc_feature (3658)..(3658): n is a, c, g, or t
  misc_feature (3664)..(3664): n is a, c, g, or t
  misc_feature (3667)..(3667): n is a, c, g, or t
  misc_feature (3678)..(3678): n is a, c, g, or t
  misc_feature (3682)..(3682): n is a, c, g, or t
  misc_feature (3690)..(3690): n is a, c, g, or t
  misc_feature (3706)..(3706): n is a, c, g, or t
  misc_feature (3712)..(3712): n is a, c, g, or t
  misc_feature (3715)..(3715): n is a, c, g, or t
  misc_feature (3744)..(3744): n is a, c, g, or t
  misc_feature (3748)..(3748): n is a, c, g, or t
  misc_feature (3813)..(3814): n is a, c, g, or t
  misc_feature (3832)..(3832): n is a, c, g, or t
  misc_feature (3835)..(3835): n is a, c, g, or t
  misc_feature (3838)..(3838): n is a, c, g, or t
  misc_feature (3840)..(3840): n is a, c, g, or t
  misc_feature (3922)..(3922): n is a, c, g, or t
  misc_feature (3932)..(3932): n is a, c, g, or t
  misc_feature (3934)..(3934): n is a, c, g, or t
  misc_feature (3946)..(3946): n is a, c, g, or t
  misc_feature (3948)..(3948): n is a, c, g, or t
  misc_feature (3952)..(3952): n is a, c, g, or t
  misc_feature (3954)..(3956): n is a, c, g, or t
  misc_feature (3959)..(3959): n is a, c, g, or t
  misc_feature (3961)..(3961): n is a, c, g, or t
  misc_feature (3963)..(3963): n is a, c, g, or t
ggaaccggtaaaacaaaacttgcacaggaatttgctaaaacagaaaaccgacccttatttgaagtaccaataacttcagaaagcaaagtttcgctcctcgtttcacgtttcgatgaagttcaacgnctgatggatacacaggctgctgttgccaatgcccagatgaaacaagcnggnattgacatgcagatcgataccggtggacgtaaagtggacaacttggaagaatacgtccatttgggaccactcgcagaagccttctctacaccaggttcggttcttttactggatgaaattgacaaagctccccgtgaacttcccaataatctattgtttttactttccgaacgtaagattgttgttccggaaacacagcaaacaattgcctgtgaaccgggtaaaatgccgattattgtgatcacatccaaccacgaacaggatttgcctgctccatttattcgtcgttgcatctacatgtatatcgaatttccnccnccggaaagattgcgtgaaattgttcggatgcatcatcctggagcaaatgagaaaattgtcgcagcagcaattgaaatcttctatcagttacgtgaacttgacttgacacggaaaccctctaccagtgaaatattagattggatttcatacctcgttcagacaaatgtccttgatactaaagttgttgaaagacttaaaggtgcacaaactctggttaaacatcgtgacgaccgtgagctattacgagtaattcaggaaaaaggtattgagtctgcaaccagtcgaaaaacaccaaactggtaaattctttctcactcatgaactaaaacatgtttcaaattagcttcttcatttttatttttttacttggaagcatccctttcggtttgttgatcagccgttactggttaaaaatagacatccgccagcagggaagcggaaacatcgggatgacaaatgtcatgcgggtcggtggcaaattaccagggattatgacttttttgctngatttcggaaaaggcagtctcgcagttttactggcccaaacagcttttcctgtatccgaaacatctccgcaagctcagctgttattcctcagtctcgctggaatcgttgttgtttgcggacacgtcttttccgtatttctacgttttaaaggaggcaaaggaatttcgacattatttggagttttagcggtnttgcatttcagcatcggtctcagtgcagccttggtttgggcaggcatgtttttatggaaaaagatctcaagcctttctgcaatcaccatgctgatagtacttccgtggttatttatcctgattccctggttacaaaatgaaactcctgtttggactatgtttttccttttccttctgttatcatcactgctaatctttaagcatcgtgaaaatattcagcgtctgctcaaaggtcaagaaggccaactcagttccaataaaaaagactgaaaacatctttcaaagaaaccttaaatgaatccacttgctccattcttgttcttctttggtaaagatatgttccggcacgtaattcttttttccggaattgcantcattgcctggttcctgacactcagcggaattggctggggaggttatttgttgtggatttcacttattctgatcgccacattaataatttggcgggccggtgattttttctcgccagcagcaacttatgtccagaataaacacgatatcccgcagtcaattaaagccgcagttatcgacgcaatcgcgagttcctttccggagttttgtgtcgccattattgcggtaatcttgattggacgagccgaggttggcatctccacaatcgtgggttctgcactttataatgtgctcgttattccagccgccgctggtttggtcgccgctagtccaatggtcatcagccgggaagttgtctggcgtgataatatttattatctttgcgttactcttttgctaggcgcgatgctctggatgttnccnantgaatggggtgccggtgtcgctgtggtgtttttactggcctacattggttatgtctttcttcttcatcgggacttcaaaaaatcaaaaaaacaaactgcggattttcaggaaactgatattttggaaacaaagactgaggatgatgatgaacttaacttaacatccgaaaaaaaggcgtggatgtggattgtcgggatgatgcttgtgatgggaggagcatctcacctgttggttgaagcttcacttgctcttggtgacatgttgggtattgacgcagttatcatgggctttgtcgtgattgccgctggaacatccgtgcccgatactgccctctcggtaatcagcgctaaaaaaggtcattacgatgctgccgtttcaaatgttttcggcagtaacattttcgacatctgcatttgtttaagtattcctatcttactcgcacttgccatgagtggcgagccaaccgctattgatctgccgcaattgggtttgatctggagcctgataggcgccaccttcttagcggtctatttcttctggagtaataactacacactcaccaaattaaaagcaggcatgatggggatgctctacctgcttataattatagtttcattttcgttttaatttaantcaaaaagcagaaactcactggacttggaggcacgtattttcaaggtgccttcatcgcttattgccataccgtctccagagtttagttcaattccattcagtagaagttcccctctcaccatctgcaaccaagcatgactatttgtctcaagcgtgtgttcaatttcctgatcgtcatttaaaatgcccatgtagagtagtgcatcggcgtgcattgtcaatgcaccacctttccctgtcggtccagccagcaatcccaactttccgggtgtaactacatcacgcacaaatttctgtgtgtactccggctcaattccgtttttttccggttcaatccaaatctgcagcacatgagcttcttctgtatctgaggcgttatattcactgtgctgtattccgcttccngcactcatgtgctggatttcacctggacggatcacntcacgattacccatactgtctttgtgctcaagtgcaccggaaatcatgtaggtgataatttccatgtcttgatgaccntgagttggaaaaccgcgtgagggagcaatcttgtcttcattgattacncgnaagttanggaagcccatgaatcttggatcgtaataattgccaaacgaaaagctgggacgtgcttccaaccagctaaattttacatgaccacgttctgcggattttcgaatgttaagcatttacacaccccaaactttttctgatacgaaagacaatgcaactaaagttaaacagcaaagtttactgccatnacaagataaaaaacaacttcactcaactgctgagttgcacccagacagtcaccggttacaccaccaagttttcttttgaaatanattattaaaacccaccagacnancgcgaccgccnncaatgccacccagacttgattnccgataaaaagcaacggcaacaagccnaaancancatttacaattaaatcaantccngananntctgtcattnatccggatttgctnnttgnccnatcctgnacatannntnnaaaacggagctgngaaatngaaacnaancggctcaaagnatgncctgcaanccaaacccaaggtaanatttcngtntcaatttgtaaaagcgcaaaaaatttcancaanaccagaaacactaaaccaagtgcgccgtatgttccaatccgggaatccttcatgatccggagtcnntcttccggagtccatccnccnccnantccgtcgcaggtgtctgcaaatccatcttcgtgtaaagctccggtcaacaaaacagcagcaatcattcccagcaaaaccgcnatcggcaaantnacttccggaaangnccangnnnaancngngaacagcatttgcgccagcagccaaactcccacactc

SEQ ID NO: 1038 - DNA, 4000 bp, Escherichia coli
  misc_feature (1)..(1): n is a, c, g, or t
  misc_feature (4)..(6): n is a, c, g, or t
  misc_feature (8)..(10): n is a, c, g, or t
  misc_feature (13)..(14): n is a, c, g, or t
  misc_feature (23)..(23): n is a, c, g, or t
  misc_feature (25)..(27): n is a, c, g, or t
  misc_feature (38)..(39): n is a, c, g, or t
  misc_feature (42)..(42): n is a, c, g, or t
  misc_feature (44)..(44): n is a, c, g, or t
  misc_feature (47)..(48): n is a, c, g, or t
  misc_feature (56)..(56): n is a, c, g, or t
  misc_feature (59)..(60): n is a, c, g, or t
  misc_feature (63)..(63): n is a, c, g, or t
  misc_feature (67)..(67): n is a, c, g, or t
  misc_feature (71)..(72): n is a, c, g, or t
  misc_feature (75)..(76): n is a, c, g, or t
  misc_feature (79)..(80): n is a, c, g, or t
  misc_feature (85)..(85): n is a, c, g, or t
  misc_feature (87)..(87): n is a, c, g, or t
  misc_feature (91)..(94): n is a, c, g, or t
  misc_feature (97)..(98): n is a, c, g, or t
  misc_feature (100)..(100): n is a, c, g, or t
  misc_feature (102)..(104): n is a, c, g, or t
  misc_feature (106)..(106): n is a, c, g, or t
  misc_feature (111)..(116): n is a, c, g, or t
  misc_feature (118)..(120): n is a, c, g, or t
  misc_feature (122)..(123): n is a, c, g, or t
  misc_feature (129)..(129): n is a, c, g, or t
  misc_feature (132)..(132): n is a, c, g, or t
  misc_feature (138)..(141): n is a, c, g, or t
  misc_feature (150)..(151): n is a, c, g, or t
  misc_feature (154)..(154): n is a, c, g, or t
  misc_feature (161)..(161): n is a, c, g, or t
  misc_feature (164)..(165): n is a, c, g, or t
  misc_feature (167)..(167): n is a, c, g, or t
  misc_feature (172)..(172): n is a, c, g, or t
  misc_feature (175)..(176): n is a, c, g, or t
  misc_feature (178)..(178): n is a, c, g, or t
  misc_feature (184)..(184): n is a, c, g, or t
  misc_feature (186)..(187): n is a, c, g, or t
  misc_feature (190)..(190): n is a, c, g, or t
  misc_feature (192)..(192): n is a, c, g, or t
  misc_feature (200)..(201): n is a, c, g, or t
  misc_feature (206)..(207): n is a, c, g, or t
  misc_feature (217)..(217): n is a, c, g, or t
  misc_feature (219)..(219): n is a, c, g, or t
  misc_feature (228)..(228): n is a, c, g, or t
  misc_feature (233)..(233): n is a, c, g, or t
  misc_feature (235)..(235): n is a, c, g, or t
  misc_feature (242)..(242): n is a, c, g, or t
  misc_feature (244)..(244): n is a, c, g, or t
  misc_feature (246)..(247): n is a, c, g, or t
  misc_feature (249)..(249): n is a, c, g, or t
  misc_feature (256)..(256): n is a, c, g, or t
  misc_feature (258)..(258): n is a, c, g, or t
  misc_feature (263)..(263): n is a, c, g, or t
  misc_feature (268)..(268): n is a, c, g, or t
  misc_feature (271)..(271): n is a, c, g, or t
  misc_feature (278)..(280): n is a, c, g, or t
  misc_feature (283)..(283): n is a, c, g, or t
  misc_feature (286)..(286): n is a, c, g, or t
  misc_feature (293)..(297): n is a, c, g, or t
  misc_feature (301)..(302): n is a, c, g, or t
  misc_feature (306)..(309): n is a, c, g, or t
  misc_feature (317)..(318): n is a, c, g, or t
  misc_feature (320)..(320): n is a, c, g, or t
  misc_feature (324)..(324): n is a, c, g, or t
  misc_feature (326)..(326): n is a, c, g, or t
  misc_feature (328)..(330): n is a, c, g, or t
  misc_feature (335)..(335): n is a, c, g, or t
  misc_feature (342)..(342): n is a, c, g, or t
  misc_feature (345)..(345): n is a, c, g, or t
  misc_feature (353)..(353): n is a, c, g, or t
  misc_feature (359)..(360): n is a, c, g, or t
  misc_feature (364)..(364): n is a, c, g, or t
  misc_feature (371)..(371): n is a, c, g, or t
  misc_feature (375)..(377): n is a, c, g, or t
  misc_feature (383)..(383): n is a, c, g, or t
  misc_feature (388)..(390): n is a, c, g, or t
  misc_feature (392)..(393): n is a, c, g, or t
  misc_feature (400)..(400): n is a, c, g, or t
  misc_feature (402)..(402): n is a, c, g, or t
  misc_feature (405)..(408): n is a, c, g, or t
  misc_feature (411)..(411): n is a, c, g, or t
  misc_feature (417)..(417): n is a, c, g, or t
  misc_feature (419)..(419): n is a, c, g, or t
  misc_feature (422)..(422): n is a, c, g, or t
  misc_feature (428)..(429): n is a, c, g, or t
  misc_feature (432)..(434): n is a, c, g, or t
  misc_feature (437)..(437): n is a, c, g, or t
  misc_feature (440)..(440): n is a, c, g, or t
  misc_feature (444)..(446): n is a, c, g, or t
  misc_feature (449)..(452): n is a, c, g, or t
  misc_feature (457)..(463): n is a, c, g, or t
  misc_feature (468)..(468): n is a, c, g, or t
  misc_feature (471)..(471): n is a, c, g, or t
  misc_feature (473)..(473): n is a, c, g, or t
  misc_feature (476)..(477): n is a, c, g, or t
  misc_feature (481)..(484): n is a, c, g, or t
  misc_feature (487)..(489): n is a, c, g, or t
  misc_feature (492)..(493): n is a, c, g, or t
  misc_feature (495)..(495): n is a, c, g, or t
  misc_feature (497)..(497): n is a, c, g, or t
  misc_feature (500)..(500): n is a, c, g, or t
  misc_feature (502)..(502): n is a, c, g, or t
  misc_feature (504)..(504): n is a, c, g, or t
  misc_feature (510)..(510): n is a, c, g, or t
  misc_feature (518)..(518): n is a, c, g, or t
  misc_feature (520)..(520): n is a, c, g, or t
  misc_feature (523)..(523): n is a, c, g, or t
  misc_feature (528)..(529): n is a, c, g, or t
  misc_feature (533)..(535): n is a, c, g, or t
  misc_feature (538)..(539): n is a, c, g, or t
  misc_feature (544)..(544): n is a, c, g, or t
  misc_feature (549)..(549): n is a, c, g, or t
  misc_feature (552)..(552): n is a, c, g, or t
  misc_feature (555)..(555): n is a, c, g, or t
  misc_feature (560)..(560): n is a, c, g, or t
  misc_feature (562)..(562): n is a, c, g, or t
  misc_feature (571)..(571): n is a, c, g, or t
  misc_feature (576)..(580): n is a, c, g, or t
  misc_feature (583)..(583): n is a, c, g, or t
  misc_feature (589)..(589): n is a, c, g, or t
  misc_feature (592)..(592): n is a, c, g, or t
  misc_feature (595)..(596): n is a, c, g, or t
  misc_feature (602)..(605): n is a, c, g, or t
  misc_feature (613)..(613): n is a, c, g, or t
  misc_feature (617)..(621): n is a, c, g, or t
  misc_feature (624)..(625): n is a, c, g, or t
  misc_feature (628)..(628): n is a, c, g, or t
  misc_feature (631)..(631): n is a, c, g, or t
  misc_feature (638)..(638): n is a, c, g, or t
  misc_feature (641)..(644): n is a, c, g, or t
  misc_feature (646)..(648): n is a, c, g, or t
  misc_feature (651)..(651): n is a, c, g, or t
  misc_feature (653)..(655): n is a, c, g, or t
  misc_feature (658)..(659): n is a, c, g, or t
  misc_feature (666)..(669): n is a, c, g, or t
  misc_feature (671)..(675): n is a, c, g, or t
  misc_feature (679)..(680): n is a, c, g, or t
  misc_feature (683)..(683): n is a, c, g, or t
  misc_feature (689)..(694): n is a, c, g, or t
  misc_feature (697)..(697): n is a, c, g, or t
  misc_feature (703)..(703): n is a, c, g, or t
  misc_feature (713)..(719): n is a, c, g, or t
  misc_feature (722)..(723): n is a, c, g, or t
  misc_feature (735)..(737): n is a, c, g, or t
  misc_feature (739)..(741): n is a, c, g, or t
  misc_feature (746)..(747): n is a, c, g, or t
  misc_feature (749)..(751): n is a, c, g, or t
  misc_feature (757)..(757): n is a, c, g, or t
  misc_feature (760)..(760): n is a, c, g, or t
  misc_feature (762)..(762): n is a, c, g, or t
  misc_feature (766)..(767): n is a, c, g, or t
  misc_feature (769)..(769): n is a, c, g, or t
  misc_feature (772)..(772): n is a, c, g, or t
  misc_feature (777)..(777): n is a, c, g, or t
  misc_feature (780)..(780): n is a, c, g, or t
  misc_feature (783)..(784): n is a, c, g, or t
  misc_feature (790)..(790): n is a, c, g, or t
  misc_feature (792)..(793): n is a, c, g, or t
  misc_feature (802)..(802): n is a, c, g, or t
  misc_feature (805)..(808): n is a, c, g, or t
  misc_feature (810)..(810): n is a, c, g, or t
  misc_feature (812)..(816): n is a, c, g, or t
  misc_feature (819)..(820): n is a, c, g, or t
  misc_feature (827)..(829): n is a, c, g, or t
  misc_feature (832)..(833): n is a, c, g, or t
  misc_feature (836)..(838): n is a, c, g, or t
  misc_feature (919)..(919): n is a, c, g, or t
  misc_feature (1199)..(1199): n is a, c, g, or t
  misc_feature (1263)..(1263): n is a, c, g, or t
  misc_feature (1276)..(1276): n is a, c, g, or t
  misc_feature (1285)..(1285): n is a, c, g, or t
  misc_feature (1293)..(1293): n is a, c, g, or t
  misc_feature (1300)..(1300): n is a, c, g, or t
  misc_feature (1464)..(1464): n is a, c, g, or t
  misc_feature (1503)..(1504): n is a, c, g, or t
  misc_feature (1987)..(1988): n is a, c, g, or t
  misc_feature (1992)..(1992): n is a, c, g, or t
  misc_feature (3256)..(3256): n is a, c, g, or t
nccnnnannnggnncattttccncnnnagtttttaaannaananatnnttccaaanttnnttnaaanaaannaanngtnnctttntntaannnnaanncncnnnanagagnnnnnngnnncnntttttnaanattttnnnnttttccaannaanacaccanccnntnttccnccnngnaatttntnnccncngaaggccnncaaannaggaccggcngngagttcctnttccncngttgaanantnncncaaaccncnttggnggaanttntaaaaannnccnctnccccaannnnnaaannaaannnnaccttttnngngtgngngnnntgccnttttttnaanggaaaccncttccnnaaanccttggntttnnnaatttnaaggnnntnnttttaananagnnnnggngttttntntgngggccnnttnnnaanccncaannnggnnnnggttnnnnnnnccaanttntnccnntttnnnnccnnnttnncncnttntntngggaanccggaaananccnccaanntctnnnaannctccnctggnganaanaaccncnggttttttnttttnnnnntcntttccnttnaanncctttnnnnttaaaaanacannnnnggnnttnttnttaaccnccnnnncnnnttntnnnccnnaaagggnnnncnnnnntttnnggntttttnnnnnncgngaaccncgttttcccnnnnnnngannaaattccaaggnnnannnggaanncnnnccgggnaanantttnngnaanaaaanttnggnnaaaggngnncggcccaanttnnnntntnnnnnaannccggttnnnttnnttnnnctttgggtggtctgagattgattgcggacttgtgctgcaacacgctccaatatttctgcattggcagttgaaacagctttntgtggatttttggaaatttctgatcgtagctgatccagcacgatgtttacctgctccctgactgctttgccgtgagggagcttttgttccttgagaaacgcatcacactctgtgatggacggaaggttttggtaagacattatgccctggaaactttatcagtggccttaagcagcagactcttctgctttgggagcagcagccggtgttacgggcttatcttgctgctgctgaggaatttttgcctttggcttaggttttgtggttttaagcgatttcncaggagaattcttatcctgttctgcacgttttggagttgctgattttgcagaatccttttttgnagcagagactttnctttgagcngatttagnttttgcnacggacttttcagcagaatctactttcgcttttttgggttgtgcttttgtggagacttttgcggaatccgtctttttagcgataggtttttttgcagttgatttacgcggagcagattttacagactttttatccgtaactggcgccgttttatctgctgctgncggagctttagagtcctgctttgcagcaagctgtttggnntttttttctgcatcgcctaaatgaacactactgaacattggtgtttctgcagtatcttcttttactgttttattagcagcaacaattttagttttctctgttaaattctgctgatcttcgaggtgaacacttgtataagttgcaacagtaggttcgtccttgttctcagcaattttttcctgagttgagatgatctttttcggagcaacctctgcttttacaggttcatggctactcttaaaaagtactaccgtttcttctgttttttctgcatttgctgttgaaggtttgctgattcctgctggttttttatcggattcagcagttttttgcggatcctttattgatgactcttcagctccctttttcgcttcagcagttgtatccggaagttcagttttcacgctggactctttagcggactttagctcttcatttttcgacaaagtctttgcaggagtttctgttgatttgggctgttcnnccgntgttttcttttccggagaacttttaacagttacggaatcgtcctttttatcaaactcttttttgtcctgctcttttttagcacgaccttttttcctgcctggtttatcgtcacgcatatcagaggcggaaattggcacggatgttctggtttctcctccgctctgtccttttaaagtaacttccatttccggaatttcttcaactccaagtaaagtgtcaggagttattgaaatgcggattccgtaatccatttccatttgagttaaacgttggcgcttaatattgagcagatgggtcgccaattttaaaggcagtctgaggtaaatctgcatcactttttgttcaattgcggaatcatgaattttccgtaaaatcctgtttgctaaagtgatttcaatagaattaagtgacaagctgctggcaattctctgacgacttaattccaataatccgaatttggaaattatgccaaacgaagtcttggccttgtctgaagacatttcttcttcaattaattgttctacagcaaggcggtttttagagttttccatatcgataaaatccaccacaatcaaaccaccgaggtttcttaaacgtaactgtcttgcaacctcatctgcagcctcaaggtttgtacgtaatgcggttgcctcaacgtttctttcttgagtggatcttccggaattgacgtcaattgccacaagtgcttctgtaggcatgatgactaatgaaccgcctgaaggcaaaggaacctgcgggtgatgcagtacttcaatttggccttcaatatcataagttgaaaaaagagatttttcgccaagataaagctgcagcttattttgttctgccggcatatgagttttaaaaaactccaaggcatgttgaaatgcaaccggttcatcaatcacaacttccgaaatactgtcattgtaataatcacggatcatccgcagcatcgcgtcttcttcctgatagagtatgccaggagttgattgctcttcgtactcgtctttgatttcattccaggtacggcgtaaaatcgtgtagtcacgtttcaattcagtgagcgaacgatcaactccaaccgtacggataatagctgatgaattttcacttccgagacctttcagtaagtgacgcaaacgcgccctttggtcttcatcttcaatttttttggaaacaccgccacggtcactgtccggcataaaaacaagaaaacgtcccgccaaagaaatgtttgtggttattgacgcgcctttgtgnccaatttcatctttgattacctgaaccagaattttttgtccgggtttaagaacctgtgtgatggaaggccgtccgcgtccttcacggtttggtttatagacttggaagtttatatcggaaagggaaaggaaaccgtgacgttcttcaccgtaatcaatgaaggccgcctgaaaggaaggttgtacttttattactttaccgcaataaatattaccaactttttgggagcggtgagtttgttcaatgtaaaggttatccagcttattgccgtgtaataacgcaattctggtttcgtcatcctctacattgatgaggattttattatctacttctgtcattttttacctgatttttatgagtttaaaatcaggatgttctgacaaatatttgatttacagatcagaaatcgaaaagaggaaccgtagtgacgcaattacttatacattgaacagtacaacccagcattcgcttgagcttgcgtagacttgcagttttattttctagaattcagtaatcagaaatcagcatcccccattctttctttccatcaaggggagacagaacatctctgaaatattagttttgatttacggacattttccgcaaaccgtgttcttcagtcgagtacaaattctttttgttcgtactcaccattttcattctttaatattttttctatacgttgctctgcgttttcgaggaatttgttgcattccctactccagcgaacacctgattcaaaag

SEQ ID NO: 1039 - DNA, 4000 bp, Escherichia coli
gtttgggcgcaagccgccactgtattttggcctggtggtgtttgccctggcgtctattggctgcgccatgtcaccgaccattaactggcttatagcgatgcgcttcgtgcaggggattggcgcagcggcggtaatgtcgattccgcgcgcggttattcgtgactgttataccggaaatgaggcgacaaggttaatgtctaccatcatgatcattattgctatttcaccgatgtttgcgcccttgctgggtagcgcggtgattattccctttggctggcgtgcagtgtttgtggcggtttccctggcctctatagttggttttctgatgacccgtttcggactcagggaaaccctgaagtcggagaacagaagtccttttaagctcagtcgcatgatgaatgcctttggtattctgtttcgcgatacccattacatggggcttaccctgattggcggtatgggcatgggcagcttttttgctttcctggcaaccagttcgttcctctacatggattattatgggctgacttcttttcagtacagcctggcgtttgccttgaatgcttttggcttctttgctgccagccagcttgccgcaacactggaagcccgctttggcactattaatgtaatcaagtgggctgtggctggctactgcttctttgcctgcctgctgtttagtgtagtaatgctgggctttgacagttttcctctgctggtaggcttactactggtgacttatgcttttctgggattgatattacctacctcaatggttctggcgcttgaggatcatggaccgattgctggcacagctgcatctctgggtgggacattacagatggttattggcgctatcagtatcgccattgtcagtgcggtattcaacaatacgccggtgccactggttgttgcgatcgccatctgcggtgtgatcgccgccaccctgtcagtgtttgctttaaaaaaaccacaggtcttgcaggaagcgtaattcaatagtaaaagtgctgcagaatttaagctgcatattctgcttgttaatcgctggtcagcgttaacagaatgtcggcaaaccaggcgcagttaagtcccagtgcctcgtcaacttccaggtctctggtgcccacatccagtcgcgctgaatgaatgccgagcaaggtccagggtaattccgagtttaaattttcctcttcgactttcgattcatcccgtgtgactacgggtgcaccgctcataccgcgatgggttcgtgcgtctgtcagaaaatagccattgccctgaaagcgcatactgaaagaggacgcattaatcgcgcgtctggcaactggcaagtgatgcagggtgtcgtgaaagcccaggggaaagcctatgatcagcatttccgttccaatttctattctttcaatcgaatcgtgtaaatgggcaggggtgaaagcgaagtaggtagcggtatctggcaagttgttgcgctcaatttctatcactgctacatcaatatccccggcactgtctgatccctgacgccagacgctttctccgtcattaaacaggaggatggaaaacacagaagactcggcaaggttttccggattgttatggatttccagctcgattctattggggtggtgatcgctgggttcatccaccaacacatggcgactggtcaccagaaaaagtttttcatcgcgctcaaagaaaaacccgctcgctttagtgagcaggtgttcatgttcgtaggtggaaatttgcagggtgcttaacagcaggggttcaatcatgatggagaagactatgccggattttcagattattttatagcgctattttaaatgacccggacggagctgcaatactattgatgaaatggcaggaaagaaaattcatgttatgccgttgcacgaacttaggatcctgctgttgaatgtcgaaaattgtaggcaaataatagtcaatgcagtttgcttgcacatgtgttagagtgcgcgccatcagtgcagtaaagaagctgttctgatgtgaatattataaaggtcagtaaatgaagattagcttcagatttactgatgcggtattaccctccctgattcttgtgcggccctctaaaggcatgccataagcctgctttctaattttctcaacacaaccattgctgccgttacttttatgtatggcatttttctatggcgtgtcccatggtctttccatggtatgtccatgaaaagtcatggcaattgccatgctatttttccagcgcccggtagggttaacttactttttgcgacgggaaagcaataccattaattataaggcttatagttaatcagtagcctattgttacttgctataaaagcccgttaagagtcagaaattttatgagtgaaacacaacaatttaatacccttggtctaagtgattccctgttaagtgcgatacaggcacagggctatacacaaccaactccgatccaggccaaagccattccggcggtgcttgatggagaggatgttatggcagcagcacagaccggtaccggtaaaacggcggcgtttgtactgccaattttacaaaagctgagcaattcaaagcctgtcgccagtggcatggtaaaagtactgatcctggtgccaacacgtgagcttgcggctcaggtgctggaaagtgtcatcacttatggtgataacgaaaaaattaaagcctgcgctgtttttggtggcgttaatattaatccgcaattacaacgcgtacacaagggcgttgatattctggtggcaacgccgggacgtcttcaggacttgattgatcgcagggcggtttcactgcagtcactggaaatcctggtactggatgaagcagacagaatgctggatatgggttttattcatgccattcgcaagattctgaaactggttccgcagcgtcgacagaacctgatgttttctgccaccttttcgccggaaatcagaaacctggcaaaaaccatttgccacaatccggtggaaatcgagtcggcaccgcgcaattctgccgttgaaattattcatcagcagctatttgaagtgaataaagaagataaatccggtgtgctgagaagtttgctgcaaggtaccaacgaccaggccttggtgtttagcagaaccaagcacggtgctaacaagctgactaaaatccttaataaaaataacatcatgacatctgctctgcatggcaacaaaagccagaaacaacgcactgcagcgcttgatgcgtttaaacaaaaccgcatccaggtgctggttgcgactgatatagccgcgcgtggaattgatatcgatttgctgcccatggtgatcaattatgatcttccccatgtgcctgaagattatgtgcatcgtattggcagaaccggccgtgccggtgcccagggcagggcgatctcgctggttagctctgatgagcgcaaacaactgaaagccattgagcgccttatcaagcaaacgatcagtcgtggcctggtggcagagattggaagtgtccaacccgtctagtcattggcataaaaatcagtagcaactaattcgatctaattagttatcttcacagattacagcctctacacattgattgaagtaaacaatcagtgtgcagggggctgtttcatttccatcctgtctcaaaaactgaaaatatcttccttggtcggtatttccatatcctgctcaaaattctcttcccagatctgacgccagggctggccatagacatcgggcaccttgtattcaattatcgtacctggagagataggttcggcgcggccattaatgggaaaaatggtcgggatacactcggtaaatacgatggggtcaccttccctgaaactgctgagcttggtcaggtcccggacaatgcgtactggctgcagtaaagcttcagggtcatagaaaatagcttcgtggttaatgccaatgaaatttccatcactgtcatatctggattggtaaatttcgatggtctgcatttt

SEQ ID NO: 1040 - DNA, 4000 bp, Escherichia coli
  misc_feature (1)..(719): n is a, c, g, or t
  misc_feature (1987)..(1987): n is a, c, g, or t
  misc_feature (1992)..(1992): n is a, c, g, or t
nnnnnnnnnnnnnnnnnnnnnnnnnnnnnnnnnnnnnnnnnnnnnnnnnnnnnnnnnnnnnnnnnnnnnnnnnnnnnnnnnnnnnnnnnnnnnnnnnnnnnnnnnnnnnnnnnnnnnnnnnnnnnnnnnnnnnnnnnnnnnnnnnnnnnnnnnnnnnnnnnnnnnnnnnnnnnnnnnnnnnnnnnnnnnnnnnnnnnnnnnnnnnnnnnnnnnnnnnnnnnnnnnnnnnnnnnnnnnnnnnnnnnnnnnnnnnnnnnnnnnnnnnnnnnnnnnnnnnnnnnnnnnnnnnnnnnnnnnnnnnnnnnnnnnnnnnnnnnnnnnnnnnnnnnnnnnnnnnnnnnnnnnnnnnnnnnnnnnnnnnnnnnnnnnnnnnnnnnnnnnnnnnnnnnnnnnnnnnnnnnnnnnnnnnnnnnnnnnnnnnnnnnnnnnnnnnnnnnnnnnnnnnnnnnnnnnnnnnnnnnnnnnnnnnnnnnnnnnnnnnnnnnnnnnnnnnnnnnnnnnnnnnnnnnnnnnnnnnnnnnnnnnnnnnnnnnnnnnnnnnnnnnnnnnnnnnnnnnnnnnnnnnnnnnnnnnnnnnnnnnnnnnnnnnnnnnnnnnnnnnnnnnnnnnnnnnnnnnnnnnnnnnnnnnnnnnnnnnnnnnnnnnnnnnnnnnnnnnnnnnnnnnnnnnnnnnnnnnnnnnnnnnnnnnnnnnnnnnnnnnnnnnnnnnnnnnnnnnnnttattattattattattattattattattattattattattattattattattattattattattattataaaaaaaaaaaaaaaaaaaaaaaaaatatatatatatatatatatatataatatttctatgatttctataccttgccaagttcctaaagctaatctaccattactaattggaatatttaaactacaaccaaaaagactagatttaacatgagctggcatatcatctggaccttccatagtatgaatgtatggagcatcttctggagcaagtctatttaacatcatttgcatatccctacgaacatctggatcataattttcattaatagttaaagaagctgaactatgttgtatgaatacattggccatctttttattattattattattattaatatatatatatattaggaatgtaatttttacattttttaataaatcatttatttgttattatattatttgaaaccactttaaatgtttacaaatgaaatccatttctaatatatttttttatttttattttttttttttcaacttacaccatatttatattcactaagttcagaagaaatatgagaaagaatttcgtcggtaacaagataacaacctctatttcttggttttaaagtaatcttcttttgagtccaggaagtgttcatattgaattcttttgataaaacaacaaatagtaatagtaaaaataatactattaatttcatttactattaatttttaatttatatatatataaataataaatattttaaaaattaaaaaaaaaaaaacaataaaacaaaataaaaaagaaattataaataaaataataataataatttacctttttttaataagtttttttgtctttataaatatttaaaaaaatttttttttttttaactaaaaataaaatttttaaatatatatatatatcattactttgtggaaccaaattattattgtttataaaaaattgattttagtattatatatggttaggttttatatatccattaaagataacattcaattatttttagaaaattttattaacaaaaaaattattaataaagataaataaatgacacaataatcattcattatcattaaaactttaatcacatataataaaatattaactagtaattatattcaaatatatctacgttaatttaattctattacaaatatcgattaatatttatacgttgattatttgattattggtttattactattttttttttttaatttaaangaaanttcaaaaaaaaaaaaaaaaaaaaatccacaataaagaattatctctattctctatattataaaagccaaattaataatatgtgcgttaattcttttaactaaaattattgaattagtcaaattaatcaataacttttttatgaaatattttttaataattaaaagaaaatattaataaaagattatgaatgttaataaaaaaatatgtataatatttataggttaaaaatctattgatattctatttaaatataacacaaaaccaaataagcaataataacgatatttaaaatctacaatttttaaaaactatagctaatatattttaattttatattaaaattagattatatattatataatttttcatacttcgtatttgtattgattatatatatattttttaaatattttaaatatttatataaatattttttaaaaattttttatgattaattttaaaaaatatatgtatatttaaaccttatagtgtaaattattattattattattattactattttatcttgttaaaatataattatttaactttgtatatatttttattatattataaatattattatatatgaccaaaaaaaagtggaacaaatatttacttttcactaatatttatttaaaatgacttattttttgataatacatgatttaatatttttaaattacattcaatggaacatacatattttattatattaaattcattctttaataataattgtataaaaaagacttacaaattttttttttttttttttaaattatattattggttgttataaactatatattatatgtaataaactatttgatatttataattataataaaaatagaagtattgattaaaaatataaactaaaaatactaattttctaacaatataaaatttaaacaacaacataaaataaaaaataatttttgtataaaatcataattatatttatgcttaacaataaatttataatcatgatttgttgtttttatcaaatactaaatatgaaattatacatttaatataagcaattaattatatgtatatttatattatatttccttattataattattaaaatttaataaattttttcattatattattattagcaaatactttataacataggaaatatattgattattttacataaaaataattaaaaatgttataaatatatttcctattttaaattttaaatcatgataactattgattattataaaaataaaataattatgtcaaaaagaataaaaatttttaaagaactttagtatttgtaaaatagttaaaggttataaagttataaaatgtaaaaataaatagaggctcaaactaagaactattttaaaaatttcccaaaatttatcaaatataatttatttacttttttaatagcaatatatattattttcataataatatgcttaataaataataaataaaagttaatttatatatatatatatagactatgattaaccgctttatacgacgtgtttcatttcagtgatatcttaaactatcattaagagaggaacaactacattaatcctcttatagatgaagtcgcattagcaattatagtctatacttatcatgatgagtgaatgccaacttcatatatatgaaaaaacacactagaaggatgaaaatccctcatataaattcgcgaagtagtattgggatcgatccaaggaatcttatgtataaaacacatatattataattatttctttttattagtgtattgtgttaatttcattttaagaatttgatgatatgaaaattaatctgctaattaatatatatatatttatattaatatatatatattaatattggtatattataatatttgaaattatgacagaaaatgaaaatattaataataataaaatatgatattaaaatatttttataaatcaaatagtaattattgatattgattaaatatttacttaaaatatacaatataataattatttt

SEQ ID NO: 1041 - DNA, 4000 bp, Escherichia coli
  misc_feature (210)..(210): n is a, c, g, or t
  misc_feature (632)..(632): n is a, c, g, or t
  misc_feature (653)..(653): n is a, c, g, or t
  misc_feature (767)..(767): n is a, c, g, or t
  misc_feature (911)..(911): n is a, c, g, or t
  misc_feature (944)..(944): n is a, c, g, or t
  misc_feature (977)..(977): n is a, c, g, or t
  misc_feature (1376)..(1376): n is a, c, g, or t
  misc_feature (1988)..(1988): n is a, c, g, or t
  misc_feature (3507)..(3507): n is a, c, g, or t
  misc_feature (3566)..(3566): n is a, c, g, or t
  misc_feature (3752)..(3752): n is a, c, g, or t
tgccaatcttccacctcgcctgcagatatttgtggtctacgttgatcttttcgataattattaataaaggtggtggtaagaatcctataaagccaagcttttaaatttgttccaggttcaaattgatgaaaacttgtaaatgcctttgcgtatgtatcctggactaaatcctgtgcatcatgtggattttttgtatatctaagtgcagcnccataaagttgtgaggtaaaaactaaagcatctttttcgaatctcgctttgcgttgtgccaaactctctttatttcggtcaacaacagctggtaataaatcttcgttactcatttgggctaaggctacctcgaatggggttttagaaaaacagaaatttgttttaaatcgaccatcgtgctgacagagtgcggtcatagaatttaaaccactgaacgggttgatttattcccgcaggtgctcactgggccttcagtaaacggaagccttacacataaggcggaaggtagactggtggatatgacaaattggcccgcaccttttcgagatgggttgtctgctgcaagtaagccaattaacgcccggttaagtatccctggctcaaaatctgcaaccaaccgggcattgattttagctgcgctngctaattcaccatcaaggatnagaaaacctctcttctcccgtgataccgacttaatggtcaagggattaagaagtttaggatgcaaaattgatgaagttaaaacggatgatggatttgattaccagattacaccncaaaagttagtgggccctgctcaaatagaggttggtaatgcaggaaccgtaatgcgcttcttacctccgattgcatcccttgcttcaggattaatccactttgatggtgatgaacgatcacatgagcgaccaattgctccagtnataaaagctttggaacaacttggtatatcaatngaacacggaaataaatatcgattgccaatcacnatcaatggtgccggaaaagttaaaggtggtgaagttgagatagatgcaagtgcttctagtcagtttgtttctgcactgctactacttgcccctgcaactgagattggcattaaaataaaaaatatagggccagatttaccctcacttcctcacatccaaatgacaattcatatgcttgaagtttttggcgcacaagtagagataagcaaaaatcagtgggcagtaaagccagttacattgtcaggtcaagatttaacaattgaacctgacctttctaatgccgctccattcatggctgctgccatggtttgcggtggcagtatcgtaattaatgattggccaaaatcaaccccacaacctggagatcaattgcgtaatatttttgcacaaatgggggcnaaaattgaacttacatccactggattaaaagtttctggaagtggtgaaattaatggaattgatattgatttacatgatgtcggtgaattaacaccagctatcgcagccctagcctctctcgctaaatcacctacaactctaagaggtattggacacctacgcttacatgagactgatcgactagctgccttagctaatgaaataaataatctgggtggagctgttactgaaggacctggcgaattgttaattgagccaactaaaatggttgcctctcaaatctttaaaagttatgaagaccaccgaatggctactgctggagccattatcggtttggctgtggatggggttatggttgaaaacattgaaactacgagaaaaactctcccagattttccgggaatgtggcagatgattcttaaaggggcttaatggtcagatcaaagcgcaactgggatgaggatgatgttcgcgtcaataagtcacgccaatttggttcaagtaataaagcaagagctcgcactaaagatcgaccagattatgccaacgccgatactgcaacgattactgaggttgatcgcggtcgagtgaaatgcttaatccaaacaaaancaggcaaattattaattaccgcaatgaaagcacgagagttgggaaagaaatcagtagtagtaggagacctagtatcagtagttggtgatgtttcaggctctgatggctccttggctcgggtagtcagtgttcttcccagaaagaattcattgactagaactattgatgatcacgcaaatgatgaacgtgtaattgtttcaaatgttgatgccatggcaattgttatctcagctgcaaatcctgatccaaaaatcggtttggttgaccgtgctctagccgttgcatatgaccaaggaataaagccaataattatcatgactaagcaagatctagcagatggagatgaattcttaaaaatctataaagatctagaaataaagctatttaaaattgataaatcctcaaaccttgcaactctcaagaaagagttagctggcaagataacagtgctgctaggtcactccggagtaggtaagtccaccttagttaataatttattatctagctcgcaaaggaattcagctgagtcagataatacatctacacatcaggtcactggcgcagtaaatgaagtcactggtagagggcgccacacaacatcaggagctattgccctgccattatcttcaacctttgattcagatgagtttggttggattatagacaccccgggcgttcgctcttttggcattgcacatattaaaccttccagagttatatctgcattccctgaatttgctgaagcaatttcaaattgcaaaaaaaattgctcgcacagtgaaccctcttgtgccctaaataactggcctggctttaatgaccaaaatctcgcaagacttgcaagtttgcgcagagttttatctcttggttaagaaaagtaagagtaatctaaactctgtgagcgttgaccttaaaagtgaaaatactcggcaagtaaacctatctttggttggaatgacctgtgcctcatgtgtaagcacagttgaaaggtcacttaataaattacctggagtaagggctgcagtaaatctcgccatggagtccgcacacattattgccccaaaaaatatttcagatgcgcaattgatctctgctgttacctccgccggttatagcgcgaaggcatttaaaggtgaacgagaatcatttgaaagatccaatcgcctgggagtgagagttttactgactttcctctttactgctccaataattttgatttcgatgtttcatgattggcatgcgcaaattgataaaaacttacttcaatttattgataactttaattctttattagtaagtaataatgctgcttttgaaattgcctacccccaagcaccaatgacaacctggttgctgatagcactttcactgccggtagttttaatatttgcttggccgattcaccgcgctgcgattaagaacctacttaacccaacaatggatactttggtttcattaggttcgataatttcatttgtatggagtatttactccactttagatttccagccaaattcancgatgccagatatctatgttgaagtctcctccgctgttattttctttgtgatgttcggncgctaccttgaacatagagcaagacacaaagccggctcatcactggcagaattatttaagctttcagtttctgaagtcgagatcaaggttgaagatgagagcaaaataatacctattgatcaattacaagttggtgatatttttgtggtaaaacctggtgatcgaattgcaactgatgggcaggtnatttctggatttactactgttaataattcatttctcactggtgaagtaacaccaatagaaatttcaattggaagcttggtatttgctggatcaataaataacaatggaaatatcttggtgaaagctaccagggttggatctgaaacagaattagcaaggattaccaggatggtgcttgcagctcaatctgagaaagcacctgcccaacaattagctgaccgggtcagtagagtttttgttcccagtgt

SEQ ID NO: 1042 - DNA, 4000 bp, Escherichia coli
aggcgcagttccagcaccggatggcgtccgtcgcggatgtcgatccggccctcgtccccgatttccggtcgcacccatccgcgcacccgggccgactcggcgaaggccgcgagcacgtccagctgccccagcgccgaggccgtctcctggatggacttgaggtggtcgagcacctgttcgcgcaggcgcaggaacaggtcgtactccaatttcgtggcccgctcctcggagccgaggatcctcgactccatggccttgaggtcctgtgtgatgaagcgttcgccgttggcgatggtctgcttgcgcacgtagtcgccgggcaccttcgccaggtgggccttggtgacctcgatgtagtagccgaagaccgagttgaacccaaccttgagcgacgggatgcccgtccgggcgatctcgtcctgctgaagcttggccagccagtccttgccgccccgcgacgcggcccggagctcgtccagctcggcgctgaagccgtcgcggatcatgccgccctcgcgcaccgccagcggcggctcgtcggccaccgcccgcgacaggagctccacgaggtcgggcagggactccaggcggcggccgagggcctgcagctccgagggcgagccggacccgtcgatggcagcctccggcaacagacggccctgcgggggggcgggcgccgggccggccgcctcggcgacggcggcctggacctggggcaactgctcgagcgccagccgcagcgccagcaggtcgcgggcgttgccgctgcccaggctcagtcggctcagcgtgcgctcgaggtcgcgtacctcggtcacccgggcccggaaggcggccagggtggtcgggcggtcgagccaggcctgcacggcgtcctggcgccgccggatcggatccagggcggccagcggctgcgtgagccagtcgcgcaggcggcgcgcccccatgggcgtgacggtgaggtgcagggccccgaacagcgtggtgttcctcggggcgtcggcgtggagcggttccaggatctccaggttgcgcagcgagatggcgtccaggatgaggtagtcggccacctcgtagaaccccagccgggtcaggtgcgacacgttccgccgcaggtgggtgccgaggtagtgcagcaccgccccggcggccccgatggcggcggaacggccgcgcaggccgaagccgtcgagcgaggccacctggaaatgctcgcgcagcgtgaagacggccgtctcgggctggaagacccagtcgtcgtggggtgagagccggatgggggaatcggccagcaggcccgagagcgccttgcaggcggcgggcaggatcagctcggccgggcgcaggcgctccagttcggccaggagggcgcgggaaccctgcaactcggtgagccggaagtcgccggtggtgaggtccacgcaggccaggccgcaggtgtcccctgcaagggtgaccgaggcgaggaagttgttgcgctcggccaggagcaggcggtcgtcgaagtgggttccgggcgacaggatcgaggtcacctcgcgctgcaccagcttgccgggtcgggcctcctcggtctggtcgcagatggccaccttgcgcccggccttgagcagccggccgatgtagttggtggcggcgtggtagggcaggccgcacatgggcatgccgttacgctgcgtgagggtcagttggagcagttgggacgcatcgacggcgtcctcgaagaacatctcgtagaagtcccccagccggaagagcagcagggcgtccttcgggagttcgccccggatccggcggtattgcgccatcatcggggtcagtgtcgcttcggcggccatcgagccgaggctaggaaaacctccccgaaataaaaagaaggcaggtggtcgctggacggaaccaccggcgtcccgatgaaccgcgctgggagattgaccatcatccgcccccttgattgacatcacaacacagatgcatcagcgtatcaagcctcaagtgtccatgagaacgaccctgaccctggaaaacgacgtctacgaagccgcccagtcgatggcgcaggcctccggcaagcgcctgggcgaggtggtttcgctcctgatgcgccggggattgaaggcctccgtcgagaccgcaccggcccgttccagcttgccggtgtttcaggtggcctccggggaccccatcatccccagcaaccgcgcgcgggacctcctctccgacgaggcgccatgaaaccggccctgctcgacatcaacgtgctgctggccctggcatggcccaatcaccagcaccacgccctcgcgcaccggtggttcgcgcgcgaggcccgtcacggatgggccacctgttcgttcacccagctgggtttcgtccggctgtcctccaatcccgcctacacgccttcggccgtttcgcctcctgaggcggccgggttgctggaccggtgggtgcgccatccgcgccatgccttctgggattccgcacccgccacccgagccgccatctatgcacgagccgtggggcatcagcaggtcaacgacgcttggctcgtcgaggtggcacgccagtccgatgggcgggtggtgaccttcgatcgccggatcagcctccatgatggcgatcgctcgagggtgacggtggtctcggactgaagcccggagctgcggtcgtggtgcttgggggtggggcacttcagggcccattcgccccggttgcgccgatgggctatccttggccaagctgtcctgagaaacccgtccggagcatgccgtcatgaagaccctgagtcacaacccttgtcctgccctgatcgccgccatcgccctgggttcgggggcgattcaggcgctcggtgccgacgatccggacctcgccttgggcgtgcgcaagaccgagcccgtgagtccggccgcgcaggccgggagcttccgcctgcctcccgggttcgagatccagctggtggccaacgagcccgacatccacaagcccatgaacctcgccttcgacgcgacggggcggctctgggtcaccaccagcatcgagtacccctgggccgcgcccaccaaccgggtgggtcgggatcgggtgatgatcttcgaggacttcggcccggatggccgggcccgcaaggtcacccagttcgccggtggcctgaacatccccatcggcgtgtaccccttccgcaccgacgacaagcactggaaggcgatcgtgtggagcatcccgcacatctggctcctggaggacaccgacggcgatggcacggccgacaaacggactccgttgtacgggcccttcgaccacacccgcgacacccatggcaaccaggcctccttccgccggggtttcgatggctggctctacgcgacccacggcttcaacaacgactcgcacgtcacggcccgcgacggcagccatgtggatctgaactccggcaacacctaccgcatccggttggacggctcgcacatcgagcaccacacgcatggacaggtgaaccccttcggtctggcctgggacctgcgcggcaacctgtactccagcgactgccacagcgcgccgctctaccaactgctcgccgggggctggtatccgagcttcggcaagccccacgacggactcggcttcgcgccggtgatgctcgagcacgcccacggcagcacggccatcgacggagcggtctacgtcaacgacgacctctggccggccgagtacttggacacgctcttcatcggcaacgtgatgaccagccgattgaaccgcgaccggatcaccttcgagggctccacgcccaaggccgccgagcagccggatttcctcaccaccagcgatccgtggttccggccggtggacgccaccctcggtcccgacggcgcgctctacatcgccgacttctacaaccgcatcatcggccactacgaggtgccgctgacccatcccggccgtgaccgcgaacgcgggcgtctgtggcgcgtggtggcgaaggggccggacggca

SEQ ID NO: 1043 - DNA, 4000 bp, Escherichia coli
  misc_feature (534)..(534): n is a, c, g, or t
  misc_feature (561)..(561): n is a, c, g, or t
  misc_feature (639)..(639): n is a, c, g, or t
  misc_feature (642)..(642): n is a, c, g, or t
  misc_feature (1500)..(1500): n is a, c, g, or t
  misc_feature (2558)..(2558): n is a, c, g, or t
  misc_feature (2597)..(2597): n is a, c, g, or t
  misc_feature (3952)..(3952): n is a, c, g, or t
  misc_feature (3955)..(3955): n is a, c, g, or t
  misc_feature (3973)..(3974): n is a, c, g, or t
  misc_feature (3979)..(3979): n is a, c, g, or t
  misc_feature (3982)..(3982): n is a, c, g, or t
  misc_feature (3984)..(3984): n is a, c, g, or t
  misc_feature (3997)..(3997): n is a, c, g, or t
atgcttcaagaagcctttccaggatatgaacctcctaccacggcgctctcaatggcagaatacctattggatttcagcttaaatagagcccacttattcaatggaaaaattattgaagtttctaattctactccctaatctaactgcccaaatttaccctcataaaaatctttcatagcttgcatgagttcttcacgagtattcatcacaaaagggccttgtgcagctattggctcatctagaggcttaccgctcaatacaagcaaggtaacctcggaagtcgctttaatagtaaaattctcagcatcattagccatacgtacaaagtggtcaacatcgataacgtcaccatcattgatatgtatcgaaccttctacgactaacacccctgtattataagtcttgttaaaagagagatcaatcattcgatcagcatccaactctatacgatataattcaatagggctatgcgtataagcaggtccttgcgtagtcgcaaattgaccagcaataattttaacaacgaccccatcngaaactatgacttctggaatatcttcnttagaaaaaccttgatactttggtgcatccatcttgttcttagcgggcaaattcacccaaagttgagccatagaaaanagncctcctttagccgcaaattccttttcatgatattctttgtgaagtacccccgaagcagcagtcatccattgcacacctccttcttcaactacaccagaatttcctgcagaatcatgatgtgcaaccttacctttaaaagccaccgttactgtttcaaatcctctatgaggatgaacatcaactcctcttggagttgaggtcgcttcaaagtagaagggagcattatagtctaaaaatataaagggatccatggctttcatatccaatccataagcagagggtataaaattctgaaccctgaatccatcccccacaaaatgaggcaccctaggagagacaacgatatcaattgatctttttttcataatttaaaaatacaaaacaactcttcattagcgttgaattctcaattgcttttttttatacttttataaggtggaacaattattagaaaaataccttccaaaagctgctgtgccaactgttttcaaactcattgagcaagaagaagttcattttaaaatagtcaatgagcgaaaaactagacatggggactatagaagagcgttagatggcagacatttaatcaccataaatgccagtttaaatccttatggttttttagttacaacaattcatgaattagcacatcttattgcttacaagaactatggtagaaggatcaaacctcatggtaaagaatggaaatattgttttcagcacttgatgcttccttttttaagaccggaagtttttccagaacgcttattaccagtattagccaatcactttaaaaatcctaaagcgagttctgacaccgatgctgttttatcgatagcgttaaaacagtatgatcancaatcttcggatttaagtttcatctatgaacttccaaatggatctatattcaaaacctccaatggtcgggtatttaaaattagaaccaaacgagtaaagcgctttgaatgcgaagaactaatcagtaagaagatctacttgtttcaacccaatgctcaagtggaacttatacaataaactacttagatttattcgctaattgaccacaggcggcatcgatatcttttcctctagaccttctaacggttacagtaattctattggcctctaatgttttgatgtaattttgaatcgtttcctccgatgcttgttggtattcacctccctctatagggttgtattcaatcaaattaaccttagcgggagcgaacttacaaaaacgaaccaatgcatcaatatctttttgctgatcattaacatccttccaaactacatattcgtaggttattctattcttggttttagcataccaatattctaaagccgctctaagctcactcagcggaaacgtctcattaaaaggcatgatggtggaacgtacctcatctagagcagaatgaagtgaaacggctaaattgaactttacctcttgatctgccatttttctaatcattttaggaattcctgaagtcgataccgtaatacgttttggtgacattcctaaaccctcttcagaagttattttttcaatagccttaagcacattattgtaattcatcaatggttctcccattcccataaatacaatatttgataagggcatattttgatataatctgctttcttgatcaatagccaccacctgatcataaatctcatcagcattgagattacgcattttctttaaacgagctgtagcacagaatttacaatccaaactacatcctacttgagaagaaacacaagcagtcgttctcttcttagagggaatcaacacggattctacaataagatcgtcatgtaatcgaactgcattcttaatggttccatcaaccgatcgctgcatttgatctactttgatgtgattaatcacaaaatgcgtatctaagagtgctctngtttcttttgacagattggtcatatcttcaaaggaatgngctcctttttgccacaaccactgatatacctgatttcctctaaatgcactatctcccctagagacaaaaaagtctctaagagcatccttactcatagatcgaatatcttttttcatgttgaggctaaaaaaagcccgacattaagacgggccttaagtttttattagatgatcaacatcgcatcgccataagaataaaacttatagccattatctacagcttccttatacgcttttttcattaaatcatgtcccataaatgcggaaaccatcatcaacaatgttgacttaggggtatgaaagttagtaatcatacaattcgcaatactaaaatcgtaaggaggaaaaataaatttattagtccatcctacaaatggatttaaggtttgctccgaacttactgatgattctaatcctctcattacggtagtaccaacagcacatatacgtcttttttcacgctttgccttattgacaatttgaactgattcatcagaaatttctaattcttccgagtccattttatgtttggacaaatcttctacctcaacagggttaaaagttcctaatccaacatgaagcgttaattctgcaaaattaactcctttaatttcgagacgctttaacaagtgttttgaaaagtgaagtcctgcagtaggagcagctacagctccttcatttttagcatagatagtttgataccgttcttcatcatctggttctacctctcttttaatatattttggtaatggagtctctcctaactctctaagtttttttctgaattcagtgtaagagccatcatataaaaaacgaagggttctaccacgagaggtggtattatcgatcacctctgctactaaagaatcatcatctccaaaataaagtttgtttccgatacgaatcttacgagccggatcaacaagaacatcccacaaccgttgttcttcgtttaattctctaagcaagaatacttcaatacgagcacctgtcttctctttattcccataaagacgcgcagggaacaccttagtattattaagtaccatcacatcatcttcatcaaaatattctattagatctttaaagtacttatgttcaatagttccttgggctctattgatgaccattaaacgagcctcatcacgattctcggatgggtattctgctaaaagatcttttgggagatcaaaattaaaatgcgataatttcataatagtgactacaggttttaataaaggttgcaaatatacaacctcaattggggggttgtcaagtaaatagcgataaatctatttttttacttgaattccaagctgttccatgtcctcccaaaagtcaggaaaggacttggtnacnaccatagcatcttcaatnntaaanctngnctttaatgccaangga

SEQ ID NO: 1044 - DNA, 4000 bp, Escherichia coli
  misc_feature (1)..(1): n is a, c, g, or t
  misc_feature (4)..(4): n is a, c, g, or t
  misc_feature (6)..(10): n is a, c, g, or t
  misc_feature (13)..(13): n is a, c, g, or t
  misc_feature (17)..(17): n is a, c, g, or t
  misc_feature (20)..(20): n is a, c, g, or t
  misc_feature (22)..(22): n is a, c, g, or t
  misc_feature (25)..(25): n is a, c, g, or t
  misc_feature (27)..(28): n is a, c, g, or t
  misc_feature (30)..(30): n is a, c, g, or t
  misc_feature (32)..(32): n is a, c, g, or t
  misc_feature (35)..(35): n is a, c, g, or t
  misc_feature (38)..(42): n is a, c, g, or t
  misc_feature (46)..(46): n is a, c, g, or t
  misc_feature (48)..(49): n is a, c, g, or t
  misc_feature (51)..(51): n is a, c, g, or t
  misc_feature (54)..(54): n is a, c, g, or t
  misc_feature (56)..(56): n is a, c, g, or t
  misc_feature (58)..(63): n is a, c, g, or t
  misc_feature (65)..(67): n is a, c, g, or t
  misc_feature (71)..(71): n is a, c, g, or t
  misc_feature (74)..(74): n is a, c, g, or t
  misc_feature (77)..(84): n is a, c, g, or t
  misc_feature (86)..(86): n is a, c, g, or t
  misc_feature (89)..(92): n is a, c, g, or t
  misc_feature (94)..(94): n is a, c, g, or t
  misc_feature (97)..(97): n is a, c, g, or t
  misc_feature (99)..(99): n is a, c, g, or t
  misc_feature (101)..(105): n is a, c, g, or t
  misc_feature (107)..(110): n is a, c, g, or t
  misc_feature (112)..(113): n is a, c, g, or t
  misc_feature (115)..(115): n is a, c, g, or t
  misc_feature (117)..(118): n is a, c, g, or t
  misc_feature (120)..(120): n is a, c, g, or t
  misc_feature (122)..(122): n is a, c, g, or t
  misc_feature (124)..(124): n is a, c, g, or t
  misc_feature (126)..(127): n is a, c, g, or t
  misc_feature (129)..(129): n is a, c, g, or t
  misc_feature (134)..(134): n is a, c, g, or t
  misc_feature (136)..(136): n is a, c, g, or t
  misc_feature (139)..(139): n is a, c, g, or t
  misc_feature (141)..(144): n is a, c, g, or t
  misc_feature (147)..(150): n is a, c, g, or t
  misc_feature (152)..(155): n is a, c, g, or t
  misc_feature (157)..(157): n is a, c, g, or t
  misc_feature (160)..(160): n is a, c, g, or t
  misc_feature (163)..(163): n is a, c, g, or t
  misc_feature (165)..(166): n is a, c, g, or t
  misc_feature (169)..(169): n is a, c, g, or t
  misc_feature (171)..(172): n is a, c, g, or t
  misc_feature (174)..(177): n is a, c, g, or t
  misc_feature (179)..(180): n is a, c, g, or t
  misc_feature (183)..(183): n is a, c, g, or t
  misc_feature (186)..(186): n is a, c, g, or t
  misc_feature (188)..(192): n is a, c, g, or t
  misc_feature (196)..(196): n is a, c, g, or t
  misc_feature (199)..(199): n is a, c, g, or t
  misc_feature (202)..(204): n is a, c, g, or t
  misc_feature (206)..(206): n is a, c, g, or t
  misc_feature (209)..(209): n is a, c, g, or t
  misc_feature (211)..(211): n is a, c, g, or t
  misc_feature (214)..(214): n is a, c, g, or t
  misc_feature (218)..(218): n is a, c, g, or t
  misc_feature (220)..(220): n is a, c, g, or t
  misc_feature (223)..(223): n is a, c, g, or t
  misc_feature (225)..(225): n is a, c, g, or t
  misc_feature (228)..(228): n is a, c, g, or t
  misc_feature (230)..(230): n is a, c, g, or t
  misc_feature (232)..(232): n is a, c, g, or t
  misc_feature (234)..(237): n is a, c, g, or t
  misc_feature (241)..(241): n is a, c, g, or t
  misc_feature (244)..(245): n is a, c, g, or t
  misc_feature (247)..(247): n is a, c, g, or t
  misc_feature (250)..(250): n is a, c, g, or t
  misc_feature (252)..(252): n is a, c, g, or t
  misc_feature (256)..(257): n is a, c, g, or t
  misc_feature (259)..(260): n is a, c, g, or t
  misc_feature (262)..(263): n is a, c, g, or t
  misc_feature (265)..(267): n is a, c, g, or t
  misc_feature (269)..(271): n is a, c, g, or t
  misc_feature (273)..(273): n is a, c, g, or t
  misc_feature (275)..(276): n is a, c, g, or t
  misc_feature (278)..(282): n is a, c, g, or t
  misc_feature (286)..(286): n is a, c, g, or t
  misc_feature (288)..(288): n is a, c, g, or t
  misc_feature (291)..(291): n is a, c, g, or t
  misc_feature (294)..(296): n is a, c, g, or t
  misc_feature (298)..(300): n is a, c, g, or t
  misc_feature (302)..(306): n is a, c, g, or t
  misc_feature (308)..(309): n is a, c, g, or t
  misc_feature (312)..(313): n is a, c, g, or t
  misc_feature (316)..(316): n is a, c, g, or t
  misc_feature (318)..(318): n is a, c, g, or t
  misc_feature (322)..(326): n is a, c, g, or t
  misc_feature (329)..(329): n is a, c, g, or t
  misc_feature (331)..(334): n is a, c, g, or t
  misc_feature (337)..(340): n is a, c, g, or t
  misc_feature (343)..(343): n is a, c, g, or t
  misc_feature (346)..(350): n is a, c, g, or t
  misc_feature (353)..(353): n is a, c, g, or t
  misc_feature (355)..(355): n is a, c, g, or t
  misc_feature (357)..(359): n is a, c, g, or t
  misc_feature (363)..(363): n is a, c, g, or t
  misc_feature (365)..(367): n is a, c, g, or t
  misc_feature (369)..(369): n is a, c, g, or t
  misc_feature (371)..(375): n is a, c, g, or t
  misc_feature (378)..(379): n is a, c, g, or t
  misc_feature (382)..(382): n is a, c, g, or t
  misc_feature (385)..(389): n is a, c, g, or t
  misc_feature (392)..(394): n is a, c, g, or t
  misc_feature (396)..(396): n is a, c, g, or t
  misc_feature (398)..(398): n is a, c, g, or t
  misc_feature (400)..(400): n is a, c, g, or t
  misc_feature (403)..(403): n is a, c, g, or t
  misc_feature (406)..(406): n is a, c, g, or t
  misc_feature (408)..(411): n is a, c, g, or t
  misc_feature (414)..(419): n is a, c, g, or t
  misc_feature (422)..(424): n is a, c, g, or t
  misc_feature (426)..(426): n is a, c, g, or t
  misc_feature (429)..(429): n is a, c, g, or t
  misc_feature (434)..(435): n is a, c, g, or t
  misc_feature (438)..(440): n is a, c, g, or t
  misc_feature (442)..(443): n is a, c, g, or t
  misc_feature (445)..(445): n is a, c, g, or t
  misc_feature (447)..(448): n is a, c, g, or t
  misc_feature (451)..(451): n is a, c, g, or t
  misc_feature (456)..(458): n is a, c, g, or t
  misc_feature (460)..(460): n is a, c, g, or t
  misc_feature (462)..(463): n is a, c, g, or t
  misc_feature (467)..(468): n is a, c, g, or t
  misc_feature (470)..(470): n is a, c, g, or t
  misc_feature (474)..(474): n is a, c, g, or t
  misc_feature (478)..(478): n is a, c, g, or t
  misc_feature (480)..(481): n is a, c, g, or t
  misc_feature (485)..(485): n is a, c, g, or t
  misc_feature (487)..(487): n is a, c, g, or t
  misc_feature (489)..(489): n is a, c, g, or t
  misc_feature (491)..(491): n is a, c, g, or t
  misc_feature (494)..(494): n is a, c, g, or t
  misc_feature (496)..(496): n is a, c, g, or t
  misc_feature (498)..(499): n is a, c, g, or t
  misc_feature (504)..(506): n is a, c, g, or t
  misc_feature (509)..(509): n is a, c, g, or t
  misc_feature (512)..(512): n is a, c, g, or t
  misc_feature (514)..(514): n is a, c, g, or t
  misc_feature (517)..(524): n is a, c, g, or t
  misc_feature (528)..(528): n is a, c, g, or t
  misc_feature (530)..(535): n is a, c, g, or t
  misc_feature (537)..(539): n is a, c, g, or t
  misc_feature (541)..(541): n is a, c, g, or t
  misc_feature (543)..(543): n is a, c, g, or t
  misc_feature (545)..(545): n is a, c, g, or t
  misc_feature (552)..(552): n is a, c, g, or t
  misc_feature (557)..(557): n is a, c, g, or t
  misc_feature (560)..(560): n is a, c, g, or t
  misc_feature (562)..(562): n is a, c, g, or t
  misc_feature (567)..(568): n is a, c, g, or t
  misc_feature (570)..(573): n is a, c, g, or t
  misc_feature (577)..(577): n is a, c, g, or t
  misc_feature (579)..(580): n is a, c, g, or t
  misc_feature (583)..(583): n is a, c, g, or t
  misc_feature (587)..(589): n is a, c, g, or t
  misc_feature (592)..(592): n is a, c, g, or t
  misc_feature (594)..(596): n is a, c, g, or t
  misc_feature (598)..(598): n is a, c, g, or t
  misc_feature (604)..(604): n is a, c, g, or t
  misc_feature (607)..(607): n is a, c, g, or t
  misc_feature (609)..(610): n is a, c, g, or t
  misc_feature (612)..(614): n is a, c, g, or t
  misc_feature (618)..(618): n is a, c, g, or t
  misc_feature (620)..(621): n is a, c, g, or t
  misc_feature (623)..(624): n is a, c, g, or t
  misc_feature (628)..(628): n is a, c, g, or t
  misc_feature (630)..(630): n is a, c, g, or t
  misc_feature (633)..(635): n is a, c, g, or t
  misc_feature (637)..(648): n is a, c, g, or t
  misc_feature (650)..(653): n is a, c, g, or t
  misc_feature (655)..(656): n is a, c, g, or t
  misc_feature (664)..(665): n is a, c, g, or t
  misc_feature (667)..(667): n is a, c, g, or t
  misc_feature (669)..(669): n is a, c, g, or t
  misc_feature (672)..(674): n is a, c, g, or t
  misc_feature (676)..(676): n is a, c, g, or t
  misc_feature (678)..(678): n is a, c, g, or t
  misc_feature (682)..(682): n is a, c, g, or t
  misc_feature (688)..(688): n is a, c, g, or t
  misc_feature (693)..(694): n is a, c, g, or t
  misc_feature (697)..(697): n is a, c, g, or t
  misc_feature (699)..(701): n is a, c, g, or t
  misc_feature (705)..(709): n is a, c, g, or t
  misc_feature (712)..(712): n is a, c, g, or t
  misc_feature (716)..(716): n is a, c, g, or t
  misc_feature (719)..(719): n is a, c, g, or t
  misc_feature (721)..(722): n is a, c, g, or t
  misc_feature (724)..(724): n is a, c, g, or t
  misc_feature (728)..(728): n is a, c, g, or t
  misc_feature (737)..(739): n is a, c, g, or t
  misc_feature (741)..(741): n is a, c, g, or t
  misc_feature (743)..(744): n is a, c, g, or t
  misc_feature (749)..(750): n is a, c, g, or t
  misc_feature (752)..(752): n is a, c, g, or t
  misc_feature (756)..(758): n is a, c, g, or t
  misc_feature (761)..(761): n is a, c, g, or t
  misc_feature (764)..(764): n is a, c, g, or t
  misc_feature (767)..(768): n is a, c, g, or t
  misc_feature (771)..(772): n is a, c, g, or t
  misc_feature (774)..(777): n is a, c, g, or t
  misc_feature (782)..(782): n is a, c, g, or t
  misc_feature (785)..(785): n is a, c, g, or t
  misc_feature (787)..(788): n is a, c, g, or t
  misc_feature (790)..(790): n is a, c, g, or t
  misc_feature (793)..(794): n is a, c, g, or t
  misc_feature (796)..(798): n is a, c, g, or t
  misc_feature (802)..(802): n is a, c, g, or t
  misc_feature (805)..(805): n is a, c, g, or t
  misc_feature (809)..(809): n is a, c, g, or t
  misc_feature (814)..(815): n is a, c, g, or t
  misc_feature (817)..(817): n is a, c, g, or t
  misc_feature (820)..(820): n is a, c, g, or t
  misc_feature (825)..(825): n is a, c, g, or t
  misc_feature (832)..(832): n is a, c, g, or t
  misc_feature (835)..(835): n is a, c, g, or t
  misc_feature (837)..(837): n is a, c, g, or t
  misc_feature (839)..(839): n is a, c, g, or t
  misc_feature (841)..(841): n is a, c, g, or t
  misc_feature (843)..(843): n is a, c, g, or t
  misc_feature (845)..(846): n is a, c, g, or t
  misc_feature (848)..(848): n is a, c, g, or t
  misc_feature (851)..(851): n is a, c, g, or t
  misc_feature (854)..(855): n is a, c, g, or t
  misc_feature (857)..(857): n is a, c, g, or t
  misc_feature (859)..(861): n is a, c, g, or t
  misc_feature (863)..(865): n is a, c, g, or t
  misc_feature (867)..(871): n is a, c, g, or t
  misc_feature (874)..(874): n is a, c, g, or t
  misc_feature (876)..(876): n is a, c, g, or t
  misc_feature (878)..(879): n is a, c, g, or t
  misc_feature (884)..(887): n is a, c, g, or t
  misc_feature (890)..(890): n is a, c, g, or t
  misc_feature (892)..(892): n is a, c, g, or t
  misc_feature (895)..(895): n is a, c, g, or t
  misc_feature (898)..(898): n is a, c, g, or t
  misc_feature (901)..(901): n is a, c, g, or t
  misc_feature (903)..(903): n is a, c, g, or t
  misc_feature (905)..(908): n is a, c, g, or t
  misc_feature (911)..(912): n is a, c, g, or t
  misc_feature (914)..(917): n is a, c, g, or t
  misc_feature (919)..(919): n is a, c, g, or t
  misc_feature (921)..(921): n is a, c, g, or t
  misc_feature (923)..(925): n is a, c, g, or t
  misc_feature (927)..(927): n is a, c, g, or t
  misc_feature (929)..(929): n is a, c, g, or t
  misc_feature (931)..(932): n is a, c, g, or t
  misc_feature (936)..(938): n is a, c, g, or t
  misc_feature (940)..(940): n is a, c, g, or t
  misc_feature (942)..(943): n is a, c, g, or t
  misc_feature (945)..(945): n is a, c, g, or t
  misc_feature (947)..(948): n is a, c, g, or t
  misc_feature (950)..(951): n is a, c, g, or t
  misc_feature (953)..(953): n is a, c, g, or t
  misc_feature (955)..(955): n is a, c, g, or t
  misc_feature (957)..(957): n is a, c, g, or t
  misc_feature (959)..(959): n is a, c, g, or t
  misc_feature (962)..(962): n is a, c, g, or t
  misc_feature (964)..(965): n is a, c, g, or t
  misc_feature (968)..(971): n is a, c, g, or t
  misc_feature (975)..(977): n is a, c, g, or t
  misc_feature (979)..(980): n is a, c, g, or t
  misc_feature (983)..(985): n is a, c, g, or t
  misc_feature (988)..(988): n is a, c, g, or t
  misc_feature (990)..(991): n is a, c, g, or t
  misc_feature (993)..(993): n is a, c, g, or t
  misc_feature (995)..(995): n is a, c, g, or t
  misc_feature (997)..(997): n is a, c, g, or t
  misc_feature (1001)..(1005): n is a, c, g, or t
  misc_feature (1007)..(1007): n is a, c, g, or t
  misc_feature (1009)..(1010): n is a, c, g, or t
  misc_feature (1014)..(1014): n is a, c, g, or t
  misc_feature (1017)..(1017): n is a, c, g, or t
  misc_feature (1020)..(1021): n is a, c, g, or t
  misc_feature (1024)..(1024): n is a, c, g, or t
  misc_feature (1026)..(1026): n is a, c, g, or t
  misc_feature (1028)..(1029): n is a, c, g, or t
  misc_feature (1032)..(1032): n is a, c, g, or t
  misc_feature (1034)..(1034): n is a, c, g, or t
  misc_feature (1036)..(1036): n is a, c, g, or t
  misc_feature (1038)..(1039): n is a, c, g, or t
  misc_feature (1041)..(1041): n is a, c, g, or t
  misc_feature (1043)..(1044): n is a, c, g, or t
  misc_feature (1046)..(1048): n is a, c, g, or t
  misc_feature (1051)..(1051): n is a, c, g, or t
  misc_feature (1054)..(1054): n is a, c, g, or t
  misc_feature (1056)..(1056): n is a, c, g, or t
  misc_feature (1059)..(1059): n is a, c, g, or t
  misc_feature (1063)..(1064): n is a, c, g, or t
  misc_feature (1066)..(1066): n is a, c, g, or t
  misc_feature (1068)..(1068): n is a, c, g, or t
  misc_feature (1070)..(1070): n is a, c, g, or t
  misc_feature (1072)..(1074): n is a, c, g, or t
  misc_feature (1076)..(1082): n is a, c, g, or t
  misc_feature (1084)..(1084): n is a, c, g, or t
  misc_feature (1087)..(1087): n is a, c, g, or t
  misc_feature (1090)..(1090): n is a, c, g, or t
  misc_feature (1092)..(1092): n is a, c, g, or t
  misc_feature (1094)..(1095): n is a, c, g, or t
  misc_feature (1099)..(1100): n is a, c, g, or t
  misc_feature (1102)..(1105): n is a, c, g, or t
  misc_feature (1107)..(1107): n is a, c, g, or t
  misc_feature (1109)..(1110): n is a, c, g, or t
  misc_feature (1113)..(1113): n is a, c, g, or t
  misc_feature (1117)..(1121): n is a, c, g, or t
  misc_feature (1125)..(1125): n is a, c, g, or t
  misc_feature (1127)..(1129): n is a, c, g, or t
  misc_feature (1131)..(1133): n is a, c, g, or t
  misc_feature (1135)..(1135): n is a, c, g, or t
  misc_feature (1138)..(1138): n is a, c, g, or t
  misc_feature (1140)..(1140): n is a, c, g, or t
  misc_feature (1143)..(1144): n is a, c, g, or t
  misc_feature (1146)..(1148): n is a, c, g, or t
  misc_feature (1151)..(1151): n is a, c, g, or t
  misc_feature (1154)..(1154): n is a, c, g, or t
  misc_feature (1157)..(1157): n is a, c, g, or t
  misc_feature (1159)..(1159): n is a, c, g, or t
  misc_feature (1163)..(1163): n is a, c, g, or t
  misc_feature (1167)..(1167): n is a, c, g, or t
  misc_feature (1169)..(1169): n is a, c, g, or t
  misc_feature (1172)..(1172): n is a, c, g, or t
  misc_feature (1175)..(1175): n is a, c, g, or t
  misc_feature (1179)..(1179): n is a, c, g, or t
  misc_feature (1181)..(1182): n is a, c, g, or t
  misc_feature (1184)..(1184): n is a, c, g, or t
  misc_feature (1187)..(1188): n is a, c, g, or t
  misc_feature (1191)..(1191): n is a, c, g, or t
  misc_feature (1194)..(1194): n is a, c, g, or t
  misc_feature (1201)..(1208): n is a, c, g, or t
  misc_feature (1212)..(1215): n is a, c, g, or t
  misc_feature (1220)..(1223): n is a, c, g, or t
  misc_feature (1225)..(1227): n is a, c, g, or t
  misc_feature (1233)..(1234): n is a, c, g, or t
  misc_feature (1236)..(1236): n is a, c, g, or t
  misc_feature (1238)..(1239): n is a, c, g, or t
  misc_feature (1242)..(1243): n is a, c, g, or t
  misc_feature (1246)..(1248): n is a, c, g, or t
  misc_feature (1250)..(1255): n is a, c, g, or t
  misc_feature (1257)..(1259): n is a, c, g, or t
  misc_feature (1265)..(1265): n is a, c, g, or t
  misc_feature (1271)..(1272): n is a, c, g, or t
  misc_feature (1275)..(1275): n is a, c, g, or t
  misc_feature (1307)..(1307): n is a, c, g, or t
  misc_feature (1310)..(1310): n is a, c, g, or t
  misc_feature (1315)..(1315): n is a, c, g, or t
  misc_feature (1431)..(1431): n is a, c, g, or t
  misc_feature (1513)..(1513): n is a, c, g, or t
  misc_feature (1977)..(1977): n is a, c, g, or t
  misc_feature (1996)..(1996): n is a, c, g, or t
  misc_feature (2048)..(2048): n is a, c, g, or t
  misc_feature (2223)..(2223): n is a, c, g, or t
  misc_feature (2665)..(2665): n is a, c, g, or t
  misc_feature (2762)..(2762): n is a, c, g, or t
  misc_feature (2966)..(2966): n is a, c, g, or t
  misc_feature (2996)..(2996): n is a, c, g, or t
  misc_feature (3206)..(3206): n is a, c, g, or t
  misc_feature (3443)..(3443): n is a, c, g, or t
  misc_feature (3857)..(3857): n is a, c, g, or t
ngtntnnnnngcncctnttngnttntnncnanaanaannnnnaaananngnggntntnnnnnntnnnaaanatnttnnnnnnnnanaannnnangtntnannnnntnnnntnncncnngntntntnnanaaatntntanannnnttnnnnannnngnganaananntananncnnnnannttnttnannnnncctnttnaannntnttngnaancctntnaananccntntngnnnnaaanaanntntananaagnncnntnnannntnnntntnnannnnntttntnttnttnnntnnntnnnnntnnaannganangggnnnnnttncnnnnaannnnaanaannnnnatntntnnntatntnnngngnnnnnttnnaanaannnnnaannntntntnaanaanannnnttnnnnnnccnnnanaangggtnnaannncnntncnntanaaagnnntntnnaacnntntaanggtntnnaaananangnganangnnaaaannnaanaananaannnnnnnnttgngnnnnnntnnntncncntatatanaatanaananggtgnnannnnaaangnnccntttnnnttntnnnanttatanaananntnnnttgngnntnnaaangnaannnannnnnnnnnnnntnnnntnnaaaaaganncnanggnnntngntctntttttnttttnngtntnnntttnnnnnttntttnttngnntnaaanaaaaaaaannntnanntttgnnanagannnttnaanaannggnncnnnnaaaanaantnnanttnnannnaaanaanaaanaaaanngnaanaaaanaacacanaanancnanantnngnaanagnntngnnncnnnannnnncanangnnaaatnnnnaancnttnttnttntngnnnnttnngnnnnanantnnntntnanntttnnnangnntntnncnngnantncnaangnnttnnnnaaannncnnttnnnttntnncncnanaaannnnnangnntttnttnttnnctntnannganantntnnancnntnnnaanaananttnggcnnantngntnnncnnnnnnnanaanaanantnnaaanntnnnncncnnttnggtnnnnnaaanannnannntnaananctnnannnaanaanaangnaaanaaananttnttntttntnncnttnnctnttnttttttnnnnnnnnattnnnnaaaannnngnnntttttnntnannaannaannnannnnnnannnaaaaanaatgannttnctatccattttgagctattttcggtagggagnaantagangaaaaatagcttttttacataaaacgaatacctcgaaaagttttttcaacgacttttattgttgcaaaaacttcaaataaaaaagactttcaaatattaaataatgttatctttgnaaggtttctatatagtaatgtattaaaaaacggagaaaacattgtacctttgcaactcaaatgaccaaatggggtcattgtntacgtagaacaaaaataataaataaatataattcaataaaagtacaattatgcctacaattcaacaattggtaagaaaaggcagaaaggttcttgtagacaagagcaagtcacctgcgttggactcatgtcctcaacgtcgtggtgtgtgtgttcgtgtttatacaacaacacctaaaaagcctaattcggcaatgcgtaaagttgcccgtgttcgtttgactaatcaaaaagaagtgaactcttacattcctggagaaggacacaacttgcaagagcacagtatcgttcttgttcgtggtggtcgtgtaaaagaccttcctggtgttcgttatcacatcgttcgtggtactcttgacaccgctggagtagcaaaccgtacacaacgtcgttctaaatatggagcgaaacgtcctaaagctgctaagaagtaattctaagtaattgaaggacaagagatgaagncagagtttagaattatgantgtaatgattattgttaaactcttgactgtgaatctcaaaacaatacaaaanttttattatcgttttgctggtgaattgttaaaaacaggttgagtaaatgctcgagtgagagcgttgaagaacaataacagccccatgcagaatttttattttaaacaaaatgagaaaagcaaaaccaaagaaacgtgtgatccttccagatcccgtttacaatgaccaaaaggtntcaaaattcgtaaatcatttgatgtatgatggtaaaaagactacatcttatgaaattttctacaatgctcttaatatcgtagaggaaaagatggctaaggaagaaaagtcttctttggaaatctggaaacaagctcttgataatattactcctcaagtggaagtgaaaagtcgccgtatcggtggtgctactttccaagttccaactgaaatacgtccagaacgtaaagagagtatctctatgaaaaatatgattttatttgcacgtaaacgtggtggcaagtctatggctgaaaagttggctgcagaaattgctgatgcatataataatcaaggtggtgcttacaaacgtaaagaggatatgcatcgtatggcagaagctaaccgtgcatttgctcatttcagattctaattatataataaggtaaaaagaaaatggcaantcgcgatttaaaattgacacgtaatatcggtattatggctcacatcgatgccggtaagacaacaacttctgaacgtatccttttctatacaggtaanactcacaagattggtgaggtgcacgatggtgcagctactatggactggatggcacaagagcaagaacgtggtattactattacatctgctgctacaacttgtaactggacttggaataaccaaaacttcaagatcaacttgattgacactccaggacacgttgactttactgctgaggtagaacgttctttgcgtgtacttganggtgctgttgctacatactctgctgctganggtgttcaacctcagtctgaaactgtatggcgtcaagctgataaatataacgttcctcgtttgggttatgtaaataagatggaccgttctggtgcagacttcttcgagactgtacaacaaatgaaagacatcttaggtgctaatccttgcccaatccaaattcctattggtgcagaagagaactttaaaggtgtagttgaccttattaanatgaaggctattctttggcatgatgagacaatgggtgcagactatgacttggaagaaattccagctgaccttgttgatgaagctaacgaatggagagaaaaactaattgaatgtgcagctaactttgatgatgctcttatggagaagtatcttgaaggtgctgaaatcacagaagaagaacttatcgctgcaatccgtaaaggtacaattgcaatggaggtaactccaatggtattnggttcttcatacaagaataagggtgttcaacctctattggattatgtttgtgctttcttaccatctccaattgatacaggtgaggtaattggtactaacccagatacagaggaagaagaaggtcgtcaaccttctgaagacgctccaacatcagctcttgcatttaagatcgctactgatccattcatgggtcgtttggtgttcttccgtgtttactcaggtaaggtaactgcaggtagctatgtttacaacccacgttcaggtaaaaaagaacgtatcagccgtttgttccaaatgaactctaacaaggaaattccaatggaatcaatcgacgctggtgatatcggtgcaggtgtaggtttcaaagatatccgtacaggtgatactctttgtgatgaaactaagcctatcgtncttgaatcaatgaccttccctgatactgtgatctctattgcagtagaaccaaagagtcaagctgacgttgcaaaacttgataacggtttggctaaattggcagaagaagacccaactttcacagttcgtacagacgaacaaag

SEQ ID NO: 1045 - DNA, 4000 bp, Escherichia coli
  misc_feature (150)..(150): n is a, c, g, or t
  misc_feature (630)..(630): n is a, c, g, or t
  misc_feature (1986)..(1986): n is a, c, g, or t
  misc_feature (2364)..(2364): n is a, c, g, or t
  misc_feature (3035)..(3035): n is a, c, g, or t
  misc_feature (3542)..(3542): n is a, c, g, or t
  misc_feature (3627)..(3627): n is a, c, g, or t
  misc_feature (3816)..(3816): n is a, c, g, or t
cccacccctagagccaaagccccaccaagccatatactgcgcgtctgtgccatgagcacagccaagacacctagccaaagggctgcatcggcgaaccatgagggccattgctgacgcgatcgccccagcaccacgatgggtagggtcagngcaatggcactggctgtaaagtttttatgccccatcaaaccgggaacgaggtagggatcttccaacgcatccgaccctttggccatgaacgtgaggacatagtgtaggctgagcatcaagccaaagcccaaaatgaacgtggtgaaccgtgccctatcttcagccgaggcatgcgcccaaagccctcccagcagcagaaagcctagatagcccgtaaagcggcctgcgctgtacttccattcggccaccgaatacaaatccgtcatccacggggccacccacgcccaaagtgccaaacctaaccacaccaggacgggccatgaaagtttgtaggtggcggatgtcgtgctcgaccaggctttaagcaggagagcacaccccacgccagcaaatcccaagtggagtggccaatgacctggatccccgagctttgaaaaaaggcccacagaaggcaagatggccatgagggcacccagcccnagcgccaagtatgagtgtactgtttgaggatgcgtttccttcattccttaaaagtaaaaaaccccgtcggaaggacggggttttctttgtcgttgtaaggagaaattaattctcgtcgccgatcacttcaaagtggaagtcgaccactacatcgcggtgcaaacgaaccttcgctgtgtacttgccagcagctttgatggttccacctgcgatttggatgaacttcttgtcgatggcgtgacccatagcagccaactcctcggccacattggcgttggtgacggctccaaaaagcttaccacccttgccagacttggccgtgagcttcaactcgacgcggtgcaaggcttccgctgtcttgttggcagcttcgaccatcttcgcctctttgtgggcacgctgacggaggtcttccgccaacattttctttgcagaaggcgttgccaaaacggcaaaaccctttgggatcaaatagttgaggccataaccgttcttaacggtgaccatatcgtccttgtaaccaaggttttcaacgtcagatttcaagataacttccatggcgctgattatttaaggttgtcggctacgtaaggcatgagtcccaagtggcgtgcgcgcttgatggcttgcgccaatttgcgctggtacttcaaagaggtaccggtgaggcggcggggcaaaattttgccttgctcattcacaaaacgcaacaagaaatcaggatccttgtggtcgatgtgcttaatgccgtatttcttgaagcggcaatacttcttggtgttggtagcgtcaatagcgatcggctggagatagcggatctctgattgattgccagcgttggattccaaagtgctcatttctgtgtaggattaagcgtttttgactttggcgcgacgcttggcagcatactcaacgccgtgtttgtccagggtcacggtgaggaagcgcaagatgcgctcgtcacgcttcatttctacctcgagggtagcaatgacgggagctggagctttgaactcgaggaggttatagaacccactcttctttttgtcgatggggtatgccaacttgcggaggccccacttttcgacgttgataagctcggcaccattcgattgtaggtagccggtgtacttatcaaccgcttcccttgtctgctcttcagacaagacgggatttagaatgaaaacggtttcgtactgattcatagttaatgaaattaggggtgcaaagataggaaaaagcacctttggttataccgaaaaaaggaaaagggttttcgtgttttagggtgaaagaatcaagggacacttcacgccgtgctcgttcgttggtttcctcgttctggggtaaacctcnaattcaccccaatatgagcgcagcgtgatcggccgtttacgactcaacgcttcaccttttaacctgttttcgctagccctctagccctctagctcaatcagcaccggacagtggtcgctgccatactcttccgtcaagatgtccgtgcgggtcacacgaggcatcaggcgctccgataccacatggtagtccaatcgccatccgatgttcttcgcccgcgctcccgagcgcatgctccaccatgaaaacttcacctcctcggggtgttgggcgcgccatgaatccacaaatcccttgctcaacaggtaatccataccgtcaatttccgcttgagtataaccgggggtcttgttgtagttggacttgggattagaaagntctatttcctgatgggctacattcagatcgccacaatagacaatgggtttcttttcatcgtagttggcaagcaagttggcgatatcgcggtcccacgcttggcggttgggaattcggctcaagtcgcccttggaattggggacatacgccgtagccacgtagaaatggggaaattcggccacaataaggcgaccttctccgtcatgttcgggcaggcccacccccactttaacgctcagtggagcttctttcgaaattaatgcggtaccgctgtagcccttcttttcagccgagtgcgcatacacgtggtagcccgcgccaaaaaggacttctgccacttgttcttcggtggccttcgtctcttgaaaacacacgacatccgcatcccatgcggccaattgatccaggaggcccttggtcgcagccgcccgaattccattcacattccaggaaataattttcatgccttaaaggtacctagcccgcacagaattgccgaactttccaccatgggagttatccacaaatgccttttgggagccgccgcagtgttggccatcagttgccaaccgcgctgggtgaattcgggcagttatcagtttgccaacaatgcccaattggtgcaacgcgaatcgttgcaaatcctttcttatccaggggctatttccacngggcaatttcaacaaaacttgaccctgggagatcgagggacgcttttaacacacatcgtgtttttctccccaaaagaaggccatattcaacgctatcagctcgtgagcacgtccagcccgtcgtatgcagccaactttacagacggcctcatggaagtctatgaaggggagttgggtttgtaccccaatgaacgcctttcgctccctgctggcccgctctaccaccccgttatggccccccagtaccctttggtggtggacgccatttggaagctcaaagtgggccaagagcacttgctcaccatggtgcagccgcctaagggcaatatcagtattgcgagctactatttggcccaaaaaacggccaaagagcgcatctatttataccggaatgatagcaacgtaggcaccctcacctatcaaaaaaaacagggtcgctgggtcctcctaaaggcggaccttctcaaccaagatgtgccctatatctgggagcgaatggagcagccntagcgtttacatgtttcggcggtactgaccgcccaccgcaaacatcgcttcggtcatttgacccaaagagcaaaccttggccgcntccataatcgcctcgaagacgttgccgccggaaagggccgcaatctgaatggccgccaaggccgccgaggacttgtcccccgacgcctgctgcaaagcatttaccgtggcgatttggtcctctttttccgcttctgtcgcacgaatgacctcgcccggaatcagggtgggcgatcctttggaactcaanaaggtattcacaccgataatggggtattcccccgtgtgtttgagcatctcataatgcatggactcctcttgaatcttgccgcgctggtacatcgtttccatggcgccgaggacgccgccgcgctccgtgatgcggtcaaattccaccatcaccgcttcttcgacgagctcggtgagctcctcaa

SEQ ID NO: 1046 - DNA, 4000 bp, Escherichia coli
  misc_feature (897)..(897): n is a, c, g, or t
  misc_feature (1824)..(1824): n is a, c, g, or t
  misc_feature (1968)..(1968): n is a, c, g, or t
  misc_feature (1988)..(1989): n is a, c, g, or t
  misc_feature (3609)..(3609): n is a, c, g, or t
  misc_feature (3810)..(3810): n is a, c, g, or t
ataaagcttaaaaaacagcctcatttacaaaatttctgaaattttttaatcaagccgaaaatatggtttgttaaatagtgaaaagagttgttttctctcaaattaacgtgtattttcacccattttatgcgcagataaagatctatctaggtaataaaagccttgagtgggcatgttttactttaattttcattattttcaaaattttttaatgataaaaaactatgcaccgattaaaatttaacctttatgaagtctaattttgtcaaaaatcctctagataagttgcctgatattctcaagcgcaacttagataaaaatctatgtatttgcaacgaggttcccaagatggatgttattgatgccattgcaaacggtgccacaacagtggatgaggttagaaatatcacttatgctactagtggtaatggttgttgtacacgccaggttgtgcgtttaattgagtgtattcattcaatagaattggagaattaaacacagattaaagaggggataaaatgaaggcaatgacttgcaatcaactaggtggcgcatgtgaaaaaagagtttcacgctaatacttttgagcaaacagcacggtataaaagtatttcaagcataaggcgcatctagaagcgatggtaaaaattcaacaacttatgaaaataccagaagacacgcaaaattagcttaatcttaaaaaaagaagaattcaacatgctgcctgaaaatttagattaagcttattccaaattaggtgataacagcctttctgcttgctcgatggaaacgcctttgcgtttagcgtagtcttggacctgctcttgattaattttcgccacaccaaaatatcttgaatctttattggcaaaataccagccactaacgctagctgtnggtagcatagcatatgagcttgttagcgtcatgccggtatttttttcaacatcgagtaaatcccatagcttttctttttcactatgctcagggcacgacggatatcctggagcagggcggatgccatggtatttttcttcaatgagtttttcattgttaaaatcttcatcgctatagccccagatttctgtgcggaatttatagtgcatcatttctgcaaaagcttcagcaaaacgatcggctaccgccttaatcatgattgagttgtagtcatcatggtctgcttcataaacttcaactaatgggtctatattgatgcctgctgttactgcaaaagcacccatataatcttgcacgccactgtctttcggggcgataaaatcactcaggcaaaaattaggggtgttgccttttttatccaattgttgacgcaagtgattaagtgtcataaacacctcaccattatcattagttagctcaatatcttcattgacactatttgctggaaagatacccaccacggcgtttgcttgtaaaagtttttcatcgataacttttttgaacatgacttttgcatcgttaaacagttgtgtggcagattcacccaccacgtcatcagtgagaatatcggggaatttaccagcgagctcccaagtgcggaagaatggcacccaatcaataaatttaaagatttcatttaaatcgtagtctttaaaaacatgaacaccgagttcgttaggcttgctaatgttgtcaaatttaatgctaggcttgttatttctagcagcctccaggctgattagcttgcttttgcctttattagcacgtctgagacgcacttgttcgtactctgctttggtgttactaaccaggtcgggtttgagctcatttgatagcaatgaggtagcaacaccaacggccttagangcgtctttaacatagaacacgcctttgtcgtactctggctcaatctttacagcggtgtgtgcaattgaggtggtggcaccaccaatcattagtggtagctcaaagccttgacgtgtcatttctttggcaacagaaaccatttcntcaagcgatggcgtgatcannccagaaaggccaataatatcaacattttctttgatggctgtttctaggatggtttcagccgggaccatgacgccgagatcaataatttcataattattacacgaaagcaccacgccaacaatatttttgccaatatcatgcacatcgcctttaacggttgccatgagaattttgccctgagctctagagccacattcttgtttttctgcttcaaggaatggatctagataagctacggattttttcattactcgggcggatttcaccacttgtggcaaaaacatttttccatcgccaaacaaatcaccaacgacattcatgccgtccatgagtggaccttcaatcaccagaatagggcggcctagtttgtcaagagcttcttgagtgtcttcatcaataaattcagtaatacctttaaccaaagaatgctctaggcgtttttcaaccgtccaagtacgccactctaaatcttttttattgtctttttgttgtaactcaccagagaattttccagcaatttcaaccaagcgctcaccagcattatcatcggtattaagcaccacatcttctacagcttttttaagttctggatcaatgtcatcgtaaaccaccaactgacccgcattaacaatacccatggtcataccggctttaatagcgtggtataaaaagactgagtgaatggcttcacgcacagggttgttgcccctaaatgagaatgagacgttggatacaccgcctgatattttggcaaatggtagatttttagtgatctctcgagtggcttcgataaaatcaacaccgtagttattgtgctcttcaataccggtggctacggcaaaaatattcggatcgaaaataatatcttctggcgggaaatcaacctcattaactaaaatgttgtaagcattggtgcagatttcaattttgcgcgcttgggtgtcagcctggccttgttcatcaaaggccataacaataatggccgcaccatagcgtttgcaaagatgtgcatatttaacaaagttatctttgccttctttaagcgagatagagttaacaattgccttgccttgtgtgcattttaggccggcttcaataatttcccacttggaagaatccaccatgagtggtactttggaaatatcaggctcggaagcgatcagattaagaaagcgaatcatggctgctttgccatcaagcattccctcatccatattaatatcaaccacttgagcgccatcttcaacttgggcacgacaaatgtccagagcttcttcgtattcttcgttaagaattaagcgcttaaatttggcagagccagtgacattggcacgctcacccacgttgacaaataaagcatcatctgcaatattaaaagcctctaagccagacaggcggcattcaggcttaatggcggggatttttctaggtgctaggttttcaatcgcatcggcaatgcacttgatatgctcaggcgtagagccacaacagccacctaaaatgttaaccaaaccagattctgcccattcgctaacctgcttgcccatggtgatagcgcctagatcgtactcaccaaactcattcggcaggccagcatttgggtgagcggatacataggtnttagccacgcgtgacatttcagccacatattggcgcaacaagtcagggccgagtgcacaattaagaccaatagaaatagggtttgcgtgacgtagtgaattgtaaaaggcttcagtcatttgcccagaaagtgtacggcctgaagcatcggtaatagtgcctgaaatcatgattggaagctcaataccatcttgctcaaanacttcttgcacggcaaaaatagcagccttagcattaagcgtatcaaagatggtttcaatcaaaataatatcagcacctccttcaatcagtccacgggtagattccatataaacttcaactagttcgtcaaaggttacatttctaaagccaggatcgtttacatcgggtgaaagcgaacaagtgcgtgatg

SEQ ID NO: 1047 - DNA, 4000 bp, Escherichia coli
  misc_feature (1)..(1): n is a, c, g, or t
  misc_feature (3)..(3): n is a, c, g, or t
  misc_feature (60)..(60): n is a, c, g, or t
  misc_feature (665)..(665): n is a, c, g, or t
  misc_feature (677)..(677): n is a, c, g, or t
  misc_feature (755)..(755): n is a, c, g, or t
  misc_feature (953)..(953): n is a, c, g, or t
  misc_feature (1115)..(1115): n is a, c, g, or t
  misc_feature (1986)..(1986): n is a, c, g, or t
  misc_feature (3088)..(3088): n is a, c, g, or t
  misc_feature (3383)..(3383): n is a, c, g, or t
  misc_feature (3466)..(3466): n is a, c, g, or t
  misc_feature (3497)..(3497): n is a, c, g, or t
  misc_feature (3527)..(3527): n is a, c, g, or t
  misc_feature (3540)..(3541): n is a, c, g, or t
  misc_feature (3543)..(3543): n is a, c, g, or t
  misc_feature (3545)..(3551): n is a, c, g, or t
  misc_feature (3597)..(3597): n is a, c, g, or t
  misc_feature (3599)..(3599): n is a, c, g, or t
  misc_feature (3608)..(3609): n is a, c, g, or t
  misc_feature (3611)..(3611): n is a, c, g, or t
  misc_feature (3613)..(3614): n is a, c, g, or t
  misc_feature (3616)..(3616): n is a, c, g, or t
  misc_feature (3619)..(3620): n is a, c, g, or t
  misc_feature (3622)..(3622): n is a, c, g, or t
  misc_feature (3626)..(3626): n is a, c, g, or t
  misc_feature (3629)..(3631): n is a, c, g, or t
  misc_feature (3633)..(3633): n is a, c, g, or t
  misc_feature (3635)..(3635): n is a, c, g, or t
  misc_feature (3637)..(3637): n is a, c, g, or t
  misc_feature (3639)..(3640): n is a, c, g, or t
  misc_feature (3642)..(3642): n is a, c, g, or t
  misc_feature (3644)..(3647): n is a, c, g, or t
  misc_feature (3649)..(3656): n is a, c, g, or t
  misc_feature (3658)..(3660): n is a, c, g, or t
  misc_feature (3662)..(3664): n is a, c, g, or t
  misc_feature (3666)..(3667): n is a, c, g, or t
  misc_feature (3670)..(3671): n is a, c, g, or t
  misc_feature (3673)..(3674): n is a, c, g, or t
  misc_feature (3679)..(3682): n is a, c, g, or t
  misc_feature (3684)..(3684): n is a, c, g, or t
  misc_feature (3686)..(3686): n is a, c, g, or t
  misc_feature (3690)..(3692): n is a, c, g, or t
  misc_feature (3696)..(3697): n is a, c, g, or t
  misc_feature (3699)..(3699): n is a, c, g, or t
  misc_feature (3702)..(3702): n is a, c, g, or t
  misc_feature (3705)..(3706): n is a, c, g, or t
  misc_feature (3709)..(3710): n is a, c, g, or t
  misc_feature (3712)..(3712): n is a, c, g, or t
  misc_feature (3714)..(3715): n is a, c, g, or t
  misc_feature (3717)..(3721): n is a, c, g, or t
  misc_feature (3723)..(3727): n is a, c, g, or t
  misc_feature (3730)..(3735): n is a, c, g, or t
  misc_feature (3738)..(3739): n is a, c, g, or t
  misc_feature (3744)..(3744): n is a, c, g, or t
  misc_feature (3746)..(3746): n is a, c, g, or t
  misc_feature (3750)..(3752): n is a, c, g, or t
  misc_feature (3755)..(3756): n is a, c, g, or t
  misc_feature (3761)..(3763): n is a, c, g, or t
  misc_feature (3765)..(3770): n is a, c, g, or t
  misc_feature (3772)..(3772): n is a, c, g, or t
  misc_feature (3774)..(3776): n is a, c, g, or t
  misc_feature (3778)..(3781): n is a, c, g, or t
  misc_feature (3783)..(3783): n is a, c, g, or t
  misc_feature (3785)..(3787): n is a, c, g, or t
  misc_feature (3790)..(3790): n is a, c, g, or t
  misc_feature (3793)..(3795): n is a, c, g, or t
  misc_feature (3798)..(3799): n is a, c, g, or t
  misc_feature (3803)..(3804): n is a, c, g, or t
  misc_feature (3806)..(3808): n is a, c, g, or t
  misc_feature (3810)..(3811): n is a, c, g, or t
  misc_feature (3814)..(3815): n is a, c, g, or t
  misc_feature (3817)..(3817): n is a, c, g, or t
  misc_feature (3822)..(3823): n is a, c, g, or t
  misc_feature (3825)..(3825): n is a, c, g, or t
  misc_feature (3827)..(3827): n is a, c, g, or t
  misc_feature (3829)..(3829): n is a, c, g, or t
  misc_feature (3834)..(3834): n is a, c, g, or t
  misc_feature (3836)..(3841): n is a, c, g, or t
  misc_feature (3844)..(3845): n is a, c, g, or t
  misc_feature (3849)..(3849): n is a, c, g, or t
  misc_feature (3851)..(3851): n is a, c, g, or t
  misc_feature (3853)..(3855): n is a, c, g, or t
  misc_feature (3863)..(3863): n is a, c, g, or t
  misc_feature (3865)..(3873): n is a, c, g, or t
  misc_feature (3875)..(3875): n is a, c, g, or t
  misc_feature (3879)..(3882): n is a, c, g, or t
  misc_feature (3884)..(3884): n is a, c, g, or t
  misc_feature (3886)..(3887): n is a, c, g, or t
  misc_feature (3889)..(3889): n is a, c, g, or t
  misc_feature (3893)..(3893): n is a, c, g, or t
  misc_feature (3895)..(3898): n is a, c, g, or t
  misc_feature (3901)..(3903): n is a, c, g, or t
  misc_feature (3907)..(3907): n is a, c, g, or t
  misc_feature (3909)..(3914): n is a, c, g, or t
  misc_feature (3916)..(3920): n is a, c, g, or t
  misc_feature (3922)..(3922): n is a, c, g, or t
  misc_feature (3925)..(3925): n is a, c, g, or t
  misc_feature (3928)..(3932): n is a, c, g, or t
  misc_feature (3935)..(3936): n is a, c, g, or t
  misc_feature (3940)..(3941): n is a, c, g, or t
  misc_feature (3943)..(3943): n is a, c, g, or t
  misc_feature (3945)..(3951): n is a, c, g, or t
  misc_feature (3953)..(3954): n is a, c, g, or t
  misc_feature (3957)..(3958): n is a, c, g, or t
  misc_feature (3961)..(3962): n is a, c, g, or t
  misc_feature (3964)..(3964): n is a, c, g, or t
  misc_feature (3967)..(3967): n is a, c, g, or t
  misc_feature (3969)..(3969): n is a, c, g, or t
  misc_feature (3971)..(3971): n is a, c, g, or t
  misc_feature (3973)..(3976): n is a, c, g, or t
  misc_feature (3978)..(3980): n is a, c, g, or t
  misc_feature (3982)..(3982): n is a, c, g, or t
  misc_feature (3985)..(3985): n is a, c, g, or t
  misc_feature (3987)..(3988): n is a, c, g, or t
  misc_feature (3990)..(3992): n is a, c, g, or t
ngnccccctggtcgccgtagtcgcacctcgaaacagtttcacagtgccagccattgcttncaagcacgcggaatgctcaagccgcctctgcaacctttggcggcttttggctctggtgcaaggaaagaagattcgcggcgacccgttgagcagaatagtactggtccagttcaagcggggtctcctccgccaagatgaacgaccatccgtgtttgatgaactcgtcccatctcgtctgacggaattcaccaagctttgcgaaatcctcctccagctcttcaattcttgcgctgcgttctttgaggggtcggctcgttcctcccttcaggggacggctcgttcccccttttgcccagagttcctcagctttgtccgtctcactctcgtcgcggaatggaaagtagatggaaaggccgtggcaacgtttctctatcacggtctggttctcgataacgcacccgtcatcacgcaccaccatggcttcacgaatccttttgcatgcagaccttagatcagggacggtagtgctccgggggacttgctccaagtctttgtccaactccttgtctaagcactcgcaaaaatccaaaagatccacgaacagcccaaagacaaaatcttgggcctccttgcgcgcggaaaaaattttcttgcgcacaatgttnttggaactcgangtcagtaaggctttcgcaagctccgttaatgggcctttaatcgtatcgatctcctttagactgaggcttgaaagtgtnattcccttcactccggtgccgggcgtagcgatataatcccgaaacgcttgttggtagagtcccggaatcatcttgcagacttctttaacatcatttcttacgttgtgagctttcaagtcttccagaatcttctgataaggaaaactcgcgtccggcacatcctcttgcgacgcgatcataaaatcaacagaaccccgnagctcactagcaacctcaatcatgctcatcgagcaggcatctatcccgatgatgtctagggtattcccggatttaggatggcccgctgctaattctccttttgctagcttcgtgtttcgaagggcttccttcaggtttgagaaagtaagatatctcctgacngagccgttcgtgaccccatagcggtgcttctcagcccgcaacaactcagtgccatagcggcgcttctgagcccgcaacaactcagtgccatagcggcgcccctcagaaaacaacagctcagtgccatagtggcggtcctcagccaacaacaactcagtgccatagcggcggtcctcatccaacaacaactcagtgccatgaccccacagtatcaggcagtagtgctcggtcttggatttctccgacgcataattgatgaactctgtaagagtctctggacgtgtaatgtcgactggatgaattgttgtgaacttcgcgatttcgtcttctggcatccgactactttcgatcggtaaagtgcgttttttagcgtcaccatcaaaaaagtaaatacgtgcgtcttgaggttgtttggggtcgaattctgcttcaagttctgccaccacaacaatacccttgtgggccgcatctcgcagctgtttcaaggattcgatggcaaaatttgctaacacatcgtcggcagagatgtacaccatgatcgtccaggtcgcagattgatttgtcatatgctcctcgtgatcacaagattcagagttcatggcttggacttgtcggtttcacgccaaagcgtcggagatgcatctctgttgagagctctggagttttagcctttgtggaacgccttcacttcttaaatgccttggataggaaagtatttcagggcccgtaaaccaaagctcccgactgtccgcgggtttgcgccatggacaaaacatgctggctcgctccagcccgaacgaaattagctcgtcccaaatcctggaaacttgtccagacttggtagtgattgcggcctgacttgcaacagaantgtcgagcgtattctgcgcctaccagcttccaaaaatcaatcaaaaagggctttcgagaacactaggctcccaccttgccttatggctttaatacgggaactgagcacagaccagaacggataacgacgccttcaactggaggcggcgcatggcggggatgaatggcggcgaaatacttcaggagatgccgccatatgctagtagaaggtctcggcgccttgggggatttgtgccacaggtgagtaaattgcgagcgaatctggagaggaaaggccgccaagtagcgatagtcaacacctggccagtgtccgggttgtcgctcaggcgggaatcgcgctttgactcgtcgtgcgttaatgttccgcgtgagctaattgtcggacagatgcttggccactaccgtctagtcgagcaaatttcgaggggcggtatgggggtcgtctatcgagctcacgatgagcacctggaaagagaagttgcgctgaaggtgttggcgccagccagcgtgaatgatgccgctgcttgcagacgattccagaacgaagcactgattctttcaaaactcaatcatcccaatatcatttctatttatgattttgacgcccaggacggcatcgacttcctggtaatggaatacgtcccaggccagacactctcggcaaggctcgagaggggcccgctgacccaagacgaagtactccacatcggccgacaaatcgcggcctcagtaaaagaagcacatgaccacggcatcattcaccgggacttgaaaccccaaaacgtgctgcttacgcccaaagggcaggtgaaagtggctgactttggactggcgaagctcgcttcgccagtaatcgacccggcggcgaccactaatgtgagccgtgatcttgggctaattggaaccttgccctacatgccgccggagcagttgcgaggaaagccaacggacttccggagcgacatctattccgctggcgccgtgctctacgagttagcaacaggccgtcgcgcatttccagaaacacttgggccgcgcttgatagattcgattctgcacgaagtaccgcatccgcccagcagcctgacgcgctgggtgtcggnggcgttcgagactattgtcttgaaatgcctggagaaagaacccgagcgacgctatcaatcgtcagccgagctaggcgtggaccttcagcacctaagtacgtccacagcatcgctaccaacggagattgagaatgatgccaagagcaaagccaaagtgtgtgcggagatacttgcccagaaatacatgtttgtgaacaacgcgacgtcagactcaacttgccgtgtccgttcaattatttaaggtggaggaagggataattggctgccgaccgcgttcattcgaggcgatctggcnggcgactctctggcttcgctgatcgcacagatgcaattggccgtccggcggtcggcaagctaccgctttctccagcgagtccntatctaagcgtggtttgtcccaaatcatcantcgagagttgccaataaacttgaatgttgngccctgtttgggnngnannnnnnntcgtgaatcgctggttgggacacgacgccgcagcgaattgagaggnantcggttgcnntntnnantcnntngaantgnnntngntntnntntnnnntnnnnnnnngnnncnnngnngannannacgtnnnncngnggcnnntttnncnggnaannggnngncnncnnnnngnnnnngannnnnnggnnaggcngnaccnnnatnncgagnnngnnnnnnancnnntnnnngncnnnganttnnnccnngaanncnnngnnggnntncccgnngnantnggttncnnnnnnggnngacngngnnngcggctgncnnnnnnnnngnaaannnngncnngnaccnannnnaannnaggncnnnnnngnnnnntngcnttnnnnnttnncggnntnannnnnnntnnagnnttnntnagnantncnnnngnnngncgngnngnnngacgcccc

SEQ ID NO: 1048 - DNA, 4000 bp, Escherichia coli
  misc_feature (214)..(214): n is a, c, g, or t
  misc_feature (225)..(225): n is a, c, g, or t
  misc_feature (565)..(565): n is a, c, g, or t
  misc_feature (3320)..(3320): n is a, c, g, or t
  misc_feature (3390)..(3390): n is a, c, g, or t
  misc_feature (3643)..(3643): n is a, c, g, or t
ggacggagaacgtattttagaccttttcgcgtagttatcagtgcctcagtgttcgtcgatgtaaatggagagagacggattaatagcggcagataccaatttcgcacgagcacgacgaatccaatgaacaggttcataagcgcacctattctcttgacgttcgagaacaaccgcttgagttcgctcactggagtcacgttgatgtgcagacgcnattgcatgctntcacgttgtcacctattgtgcacaaaaatgttaaagtcagatcgtgaaggttatatcagacggcatcttccaaaatgtcttcaaaaatctaagtggcatctatcctcttctcataagtaagtaaatggccccgtcggtttggacgcaacaggtgttgctgttgtcggcgttattatagcggataaaataaacaacgaaagaatgcagcaagtcgttaaaaactttggaaactttgctttcatttcttttcaaacctccgtttgctgttctgttagctaagcgttcctcgctacacgctggatatgcaataggcaaacacagtatgtcactcaagacatangaaaacataaaaatgtatcgatgtatcgatacagtactataaagtgaatcagaaattctgtactaaatatttgtttagcgcgctgcgacttcactcgtctcgtcgtggggcccagttaaggacgacgattatggctgcgattatgccgacgaccattatcactgcgggaacggctagaccgtctaatagagcgccgcccgcaaaagcggatacgctctcattcgatgtattgtgattattcttcagcccgacaaccgatgtaagttgaatcgcgccgtactgccctataggatgaataagcgggtaagtgtcccccgtagtcgaaggagagtcgccgatgccgtttccatcgctgtctgctcctttgtaatcggagtagtaattgcctacgtagctcgaataggtgccgccgttgtaggtataagtgtacttctcggtcgagttcactaggtttccctctggacttgcaattgttgctgggttattcacgaagttgttgaggtagaagcgatttcctgacgaatagccactataaacagcgagtttagcgtttcctgagaatgtattaaaggtaaaagtgttgttatttgagtcatcacggaggcgaacggcaaactcctcatttgcattaatgctgttgttgcttagaacgttattagacgaactgagcaaggagatgccgtaaacgtggttattgctgaggacgttttgcactatggcatttgaatttgactcacgcatataaatcccgtcaccgagcgcgttaccgttccctttttcatacgtcgccacgttgccggaaaaggtatttcccgacgacccatcgaggtaaatgccatagccattattagagaggttgctggcgctcactttattgttggcggcatgctcgatgagcaccgcgtactcgttatcgtgcgcaattatatcagtcacactggactgtgatgcacctgaaaactccacaccagcgcgtccgcctgtaagcgtgagcccttctacccgtatgccgcttcctgagagcaaaaatacgtcgctagatggcacagccgcttttacagtcgttgttgccgccccgcccgatgatttaatgatgagcgatttgttgacaagcacgttctcgctatacgttcccggtggaatgaggattgtgtcgcctggttgagctgcatttactgccgcttggatcgttgtgtactgcccggtcccaacggtaatctcacctgcgcttgcaggtatgacgagccccatgagaagcgagaagagcaaaacgctgataagcgcccctgcgcgcacggcctttttcattgtcctgcgctcatgtggagagttagatcgggatcgggttctactaaagaacatttttagatgagagagatgatctaaacataagaatctttcacacgattagccctgcagccacatagctgcagcgcataaagcggccttttcttttacctgaattattatgtgtaatcatagttacatatgagcaactataaatatatatgtgggaagcggtactgcgtttaaatacagaacgtcggtgtgaagcaatgcttcgttgatcatttcgctgcgctgaagctcagaatatcaagcctgatatggatatgtgcgcagacgcgacgtcagaggacattataaatgggcagtgcagaaacaccatcagagcgctcaggtcgcctaccagagcttgacatacttcgagcatttgccatttgcttgatcgtgttctctcattttccgcccctctcaacactctacatcgacggatcagccaagctgtggtgtgccacctttggcctagcgcttttcctgtttctctctgggtttactttataccgcagcaacagcatcacaagcgttgccgatgtgcggttgttttacaaaaaacgcattatacggatttacccactttacgtgctgatcattgcggtttacgtgctgctccaagtcttgccgctcggtaattcattcctcgagaccacactggccccgacagaaatcgccgtgaatgtgatcggtttgcaagcgctcttgaatacgccctcatacaatgcgctctggtttattggattaattctgaccttttacttgatctacccggttatgatgctcgcaacctcagaaaaaaccgtcaggatcatcatcttttcgtgcgcgacgctcgcactctttgcatgcttgagaattgcatttgatatcgtcaaccttcgcctgatctattactacgtcatatttgtcggggggatccttgcgagtaaagcgcttttgacccatacacaccagtcacacttctcgactaggcgcagtcgcattgtctatctcgttggcgcgcttcccctcttaggcattgcaatggcgttttaccaacagaacctcggagaaacaggggagcttgtaaacttttatgccaatacagctaattacgtgccaaaggcgctgatttcgtttctatttatttcgtgcgcccttagtgctgcacgggtcgttaccatgacatttaagaagcgctactacgccccgctattctttatctcgtttctctcgtacagtatctacctcgttcaccccctgattctcaccgcgtgcacacgagcaacgctcgttgctccgcaactaacaggagcacaacttgatgcaatactcatatttattggcatcccagcgatagtgttagcttcatacctactccagaaaggtgctgatacgctcacgttcagtttgcgtatgcgaagaatgagtgaatacngcaatgatcctcagacgtgagctcggtgcgacgtgttatgtaatgagagttattagccgcggaccgcagngaatcaaacacttctcaactctaatgactagtgctgcctgaactcaagcgggtgatcgttaaattaaacgtgcgttacggcgtaaaaaatcaaaaaattcgcatctttttattcataatattctttttgatcatatctagagcggtttccagcgctccgcgaactgtatcgtcttgctcatcgttcaatgcgtagacaagcgacgctgttgcactcgcatcgcctatcatcccaagggccaaggcaacacttngccgcacgtctgcattgctgtccttcaaggccgacgttaagggttctattgcttgtgcctcttccagctctccgagcatctctgcggcgctctgccgaacctctgggcttttgtcattcaacctagcgattaactcatcaacttttgtcccggagctcattgttcccacattatagtaactaacgcgctgttacggccttcacacagttagataacgaggccgacccccgacaattctttacagtcgttaaggtcgcagtatattgtttttagttctcgcccaacatgcccatcggcggcatgttcatcgccgggtgacatatcctcgtcaagtattcttttaactcgtcagcggat

SEQ ID NO: 1049 - DNA, 4000 bp, Escherichia coli
  misc_feature (1979)..(1979): n is a, c, g, or t
  misc_feature (1985)..(1985): n is a, c, g, or t
  misc_feature (1992)..(1992): n is a, c, g, or t
  misc_feature (2300)..(2300): n is a, c, g, or t
  misc_feature (2303)..(2303): n is a, c, g, or t
  misc_feature (2305)..(2305): n is a, c, g, or t
  misc_feature (3018)..(3018): n is a, c, g, or t
  misc_feature (3130)..(3130): n is a, c, g, or t
  misc_feature (3138)..(3138): n is a, c, g, or t
  misc_feature (3267)..(3267): n is a, c, g, or t
  misc_feature (3370)..(3370): n is a, c, g, or t
  misc_feature (3405)..(3405): n is a, c, g, or t
  misc_feature (3612)..(3612): n is a, c, g, or t
  misc_feature (3696)..(3697): n is a, c, g, or t
  misc_feature (3701)..(3701): n is a, c, g, or t
  misc_feature (3809)..(3809): n is a, c, g, or t
  misc_feature (3813)..(3813): n is a, c, g, or t
  misc_feature (3815)..(3815): n is a, c, g, or t
  misc_feature (3818)..(3818): n is a, c, g, or t
  misc_feature (3826)..(3826): n is a, c, g, or t
  misc_feature (3830)..(3838): n is a, c, g, or t
  misc_feature (3842)..(3843): n is a, c, g, or t
  misc_feature (3849)..(3850): n is a, c, g, or t
  misc_feature (3855)..(3856): n is a, c, g, or t
  misc_feature (3858)..(3858): n is a, c, g, or t
  misc_feature (3860)..(3861): n is a, c, g, or t
  misc_feature (3864)..(3867): n is a, c, g, or t
  misc_feature (3871)..(3871): n is a, c, g, or t
  misc_feature (3874)..(3876): n is a, c, g, or t
  misc_feature (3878)..(3878): n is a, c, g, or t
  misc_feature (3880)..(3881): n is a, c, g, or t
  misc_feature (3883)..(3883): n is a, c, g, or t
  misc_feature (3886)..(3886): n is a, c, g, or t
  misc_feature (3890)..(3890): n is a, c, g, or t
  misc_feature (3894)..(3898): n is a, c, g, or t
  misc_feature (3900)..(3900): n is a, c, g, or t
  misc_feature (3904)..(3904): n is a, c, g, or t
  misc_feature (3906)..(3906): n is a, c, g, or t
  misc_feature (3908)..(3908): n is a, c, g, or t
  misc_feature (3912)..(3913): n is a, c, g, or t
  misc_feature (3968)..(3968): n is a, c, g, or t
  misc_feature (3975)..(3975): n is a, c, g, or t
  misc_feature (3987)..(3987): n is a, c, g, or t
  misc_feature (3996)..(3996): n is a, c, g, or t
  misc_feature (3999)..(3999): n is a, c, g, or t
caccccagcggcggtgaacgcttttctatcgttccgccatcccggccccatggcccgtttcgcgaagcgcgtcctttccatcgagccctctcccacggtccgcatcagcgatctcatcgccgaatcccagggccaagggaagaagatcctctccctggccatcggcgagccggatttcccgacccccgcgcacatcgtcgacgcggcgaagaaggccctcgacgacggctacacgaaatacaccgcggcccccggtatccgcgaactgcgcgaggcaatcgccgagaagtcacaaaaggagaacgggattcccgcgaaggcggagaacgtgatcgtcgcgccgacgaaacacacgctcttcatgacgttcatgtcgctcctcgatcccggggacgaagcgctgatccccgatcccggctgggtctcctacgcgccgatggcgagcctcgcgggtgcgaagcccgtgccgatccgcgcggcggacgaagacggattcgtgccttcgacggagaccgtcgcggatgcgatcaccccgcggacccggctcatcgtgctgaactcgccgtcgaatcctgccggctcggtgtactcgcggtcccagatgcgtggcctcgcggacctcgcggcggaccacgacctcaccgtcgtgagcgacgagatctacgagaagattctgtacgagggcgagcacgtctcgcccgcgtcgctggacggcatgttcgaccgcaccgtcaccgtgaacggcttctcgaagacctactcgatgacgggctggcggctgggctggctcgtcgccccgacgccgatggtccggcagatcgggaaggtgcaggaacacacgatcacctgcgcgaccgcgttcgcccagaaggccggcgtcgcagcgctccgaggtcccacggctccgttgaaggcgatggtcgacgaattccgggcgcgacgggagattgtcctcggagaactcaagaagatcgaccggctctcaacggatcgaccgagtggcgcgttctacgtgttcccgcggctcgacgtcggattgaagagcgcgtccctcgctgaacggatcctccaggaggcgaacgtcgcggtgaccccggggagcgccttcggcgaggccggggagggccacctccgtctctcgtatgccgcctctcgcgagacgatcgtcgaatgcatccgccggatcggggacgtcctcaagggcatctgacgagtcttccggcgggaacgatcgagagtgcgttcagccgtctcccggcaggagttaagtatccgcgtccgcgtttcgcagggcgagggaacgagatggcgcaagacgagcgggaggagatgccgacgatcgtgccaatggtcgcctacgaggaccccgccacggcgatcgattggttggtccgtgccttcgggttccgggaacgcaaagaccagcggatgaaggaccgcgacgggcggatcacgcacgccgagctgcgactcgggaaaggccgggtcttcttggccaccccgacaccggactaccagagcccgaagcatcaccgggagacgtgcgcggccgcgcgcaagtggtcttcggtcccatgggtcatcgacgggctgcttgtccacgtggacgatgtcgatcgtcacttcgctcgcgcgaagagcgagggcgcgaccatgctctccgatctcgaggacaacccggtcgggcggctataccgggccgaggacctcgaagggcatcggtggatgtttctcaaacctcgtccgtgatttcatccgatggccggggtgagaactagcctttcgcgccgcgtgctcgaaggagatccgcgatggccgcatggcctttctccttcgcgtcgtccaacggcgtgtgcccgccatctcggaccgcgtggacgtccgcgccgtggtccaggagcatgcggacgacgtcgagattcccgtgcaccgcggccttgtggagcgtcgtgtaattcgcctcgctcctgacgttcggnttcgcncccgccncgagcaagatccgcacgacgtccgcgtggtctcccgagacggccgcgtcgaccgccgtgttcgcgaaccgactcggtggtttgtggttcacgtcggcgccgtactcgaggaggaccttgaccgcctcgggatgaccgaagaacgccgcgaggccgagcgggtcgaagccttcctccttgttcgcctcgttgacccggacgcgagactgcccgaggatcgtcttcagccggcgggcgttcccgaccgtcgcggcctcatacaggttcagcgcgtcttccggcgtcctggcgagcagcagcttgacgacntcngncgccccgtagaaagtggcggtcaggacgagcgtgccgttcggggttttcatccggaggagcggcggatggcgatcgaggatctcctgggccttcgccaggtcgttcttctgcaccgccttgagcaagtcgtcctcgtcccccatggcctgtcccccgagagcggccgggaacgcggtcgcgcgcctatgaacgttgcgccgctcaggtgacgacctgggtctcgccgcacgaggggcacatgacctcgatcggacggcggctcgtcgacaggtcgatcggtttgccgcagcggcgacaggtgatcgacatcggcgaggtgggcgccgagcggaccggcccttcgggaggcgggggcgggacggccgctttgccgccaatcgggccgaagccgcctccggatcgcctccacatcgcgatcacggcgatcaggagcaggacgaacagcgcgctgaggacgatcgcaaagacgggggcgccgccgacgtccgtggaccagaacgaactcccggtcgggccgacctggaccgtctggaacgcgctcgccccggtgttcagttcattcgcgaacacgagcaggcctccgttcccggtgcccgcggggatcgtcaggaagagatccgcggctgggcccgtggtgatggccgtggccgaggccgacgcggacgacaaggaccagcggaactggctcgggagcgaccccgtgcctttcgcngtcagggtgaggtgcgcgtggactgtctcgcccgcgccgtacgaggtcctgtcgaagctcaagccgaggacgaagccggcggcctgggagatcgtcgcctgcgcctgggtgntgttcccncggtccgtggcggtcacgtggaacgtgtagctgcggctcgacgggttcggggtgcggaacgagaagaacgtcgcgttcgtggtgcccgacaagacgatgaccgcgttcgtgtcgtcgacctcgtacgcntacgaggggttcgtgatgacgtgcgaggagacgccgtagaaggcgctgattatctcgccagggttgtagtcgccgcggtcgaggctcagggccatgtacgccngggcgaccgtcccactctgctggccggccgcgacngttccctggccgtcgtccacggtcgcctcgaagcgcaaggtgccggtgtagccgagggcgatcggataccggaacgtggcccccgcagtcgtggtcgtgttcaggagttggaagaagaagttccggacgcgccacacgtacgtgtagttcccgggcgcgggcgtgcggtacacgatcgcctgtgcggccgcggtgtcgccgctcagntacgacgacttgtcgaggaccaccgtgacggtcatcgccgcgggctggatcggattcggagtcggcatggcgttcgcggttggnntcanggcggcgagggccagaagcccgatcacgaacgcgaatgcgagtgcacaggccctcgatagcagggcggatgacatgcggtgtcccatcccggtgtccgcagggagaancccngnggncggggcgncatnnnnnnnnncctnnttaatnntttgnncngnnggnnnnccgncgnnntncnncnggnattncggnnnnntnttcngntncggnngtggtcctggttggaaccgcaagacccacgttcaggatccgaccgcgggcgtcgncccgccnccttggaggcgngcgaacagntcnt

SEQ ID NO: 1050 - DNA, 4000 bp, Escherichia coli
  misc_feature (7)..(7): n is a, c, g, or t
  misc_feature (10)..(10): n is a, c, g, or t
  misc_feature (33)..(33): n is a, c, g, or t
  misc_feature (118)..(118): n is a, c, g, or t
  misc_feature (235)..(235): n is a, c, g, or t
  misc_feature (298)..(298): n is a, c, g, or t
  misc_feature (311)..(311): n is a, c, g, or t
  misc_feature (424)..(424): n is a, c, g, or t
  misc_feature (545)..(545): n is a, c, g, or t
  misc_feature (817)..(817): n is a, c, g, or t
  misc_feature (932)..(932): n is a, c, g, or t
  misc_feature (1112)..(1112): n is a, c, g, or t
  misc_feature (1313)..(1313): n is a, c, g, or t
  misc_feature (1322)..(1322): n is a, c, g, or t
  misc_feature (1419)..(1419): n is a, c, g, or t
  misc_feature (1799)..(1799): n is a, c, g, or t
  misc_feature (1877)..(1877): n is a, c, g, or t
  misc_feature (2004)..(2004): n is a, c, g, or t
  misc_feature (2939)..(2939): n is a, c, g, or t
  misc_feature (2963)..(2964): n is a, c, g, or t
  misc_feature (2991)..(2991): n is a, c, g, or t
  misc_feature (2995)..(2995): n is a, c, g, or t
  misc_feature (3000)..(3000): n is a, c, g, or t
  misc_feature (3003)..(3003): n is a, c, g, or t
  misc_feature (3009)..(3009): n is a, c, g, or t
  misc_feature (3013)..(3013): n is a, c, g, or t
  misc_feature (3016)..(3017): n is a, c, g, or t
  misc_feature (3019)..(3020): n is a, c, g, or t
  misc_feature (3022)..(3022): n is a, c, g, or t
  misc_feature (3024)..(3024): n is a, c, g, or t
  misc_feature (3028)..(3028): n is a, c, g, or t
  misc_feature (3030)..(3030): n is a, c, g, or t
  misc_feature (3032)..(3034): n is a, c, g, or t
  misc_feature (3037)..(3039): n is a, c, g, or t
  misc_feature (3041)..(3042): n is a, c, g, or t
  misc_feature (3044)..(3044): n is a, c, g, or t
  misc_feature (3046)..(3055): n is a, c, g, or t
  misc_feature (3058)..(3060): n is a, c, g, or t
  misc_feature (3066)..(3066): n is a, c, g, or t
  misc_feature (3068)..(3070): n is a, c, g, or t
  misc_feature (3078)..(3078): n is a, c, g, or t
  misc_feature (3083)..(3083): n is a, c, g, or t
  misc_feature (3085)..(3094): n is a, c, g, or t
  misc_feature (3097)..(3098): n is a, c, g, or t
  misc_feature (3100)..(3101): n is a, c, g, or t
  misc_feature (3106)..(3115): n is a, c, g, or t
  misc_feature (3117)..(3117): n is a, c, g, or t
  misc_feature (3119)..(3121): n is a, c, g, or t
  misc_feature (3123)..(3124): n is a, c, g, or t
  misc_feature (3128)..(3135): n is a, c, g, or t
  misc_feature (3137)..(3138): n is a, c, g, or t
  misc_feature (3141)..(3142): n is a, c, g, or t
  misc_feature (3144)..(3144): n is a, c, g, or t
  misc_feature (3146)..(3150): n is a, c, g, or t
  misc_feature (3152)..(3156): n is a, c, g, or t
  misc_feature (3158)..(3159): n is a, c, g, or t
  misc_feature (3161)..(3161): n is a, c, g, or t
  misc_feature (3163)..(3163): n is a, c, g, or t
  misc_feature (3165)..(3169): n is a, c, g, or t
  misc_feature (3171)..(3174): n is a, c, g, or t
  misc_feature (3176)..(3191): n is a, c, g, or t
  misc_feature (3193)..(3215): n is a, c, g, or t
  misc_feature (3218)..(3224): n is a, c, g, or t
  misc_feature (3226)..(3424): n is a, c, g, or t
  misc_feature (3426)..(3473): n is a, c, g, or t
  misc_feature (3475)..(3854): n is a, c, g, or t
  misc_feature (3856)..(4000): n is a, c, g, or t
ccgctcnacngaggctaagaagtaagcacttcncagccctcccccacttcatatagcaagccgggcaccctccccatctgaggatgcccggcttgtcgcttaatgaacaattcgcccnctctcacgcttatcataccaacgagcagtattctatcacctcgtagcaactaactgaataatgaagaaagtcatcctcagcctcgccctcatctccgcaggtctcttctcgagctangcctgcacggccaaggcttcgagcaacgctgcttctgcctccaccgagacgaccgcagctgcncccagcgaagaanctgctgccgacgacaaggccgcagaaggcgctatcaagcacatcgacgcagcctacctgcgcaagtacatctgggactataaggaagagccctcgaagttcgtcttcaagggnagccgtcccgctatcctcgacttctacgccgactggtgcggtccctgccgtaagctcagccccaagctcgaagctatcgctaagaagtatgcgggtaagatcgacgtctacaagatcgatntcgacaaggaagctggtctggccaatatcttcggtgtgaagagcatccctatgtgcctcttcatccctatgcagggtacgcccatccagacggtaggcgatctcactcccgatcagatcgaggagaccatcaagcagatctactccgacgctaagtaagcccagcgagtcattcgcatctacaataaaagctcatccccacaccgcctgatggcagtgtggggatgagcttttattgtagcgtccgagtgaggaagtcgcttacttcttcgnaggacgggggatgaagtcgaagcccgtgtaaggacgaagagcctcggggatgcggataccttcgggcgtctggttgttctccagcagtgctgcgacgatacggggcagagccagngcactaccattgagcgtgtgcacgagctggacaccctgctcagcgtcacgatagcggcagcgcaggcggttggcctgatagctctcgaagttcgacacagagctgacctcgagccaacgcttctgtgcagcagagaagacctcgaagtcataggtcagcgcgctggtgaagctcatatcnccaccgctcagacgcaggatgcgccagggcagctcgagcttcgtgacgagcgtctctacgtaggcgaccatctcatcgaggcgctgatagctgcgctcgggcttgtcgatgcagacgatctcgaccttgtcgaactggtggaggcggttcagaccacgcacatccttaccatacgacccagcttcgcggcggaagcaggcngagtaagcngtgttgcgtacgggcagatccttctcctcgaggatgacgtcacgatagatattcgtcacaggcacctcagccgtggggatgagatagaggttgtccnccgtagcgtggtacatctgcccttccttgtcggggagctgacccgtgccgtagccagagtcttcgttgacgacgtagggaggctgtacctcgaggtaaccagcttcacgagcattgtcgaggaagaagttgatgagcgcgcgctgcaggcgagctccataacccttatagacggggaagccagcacccgagatcttcacacccagctcgaagtcaatgaggtcatagtccttcgccagctcccagtggggctcggcggtagcatcgagtgcgggcatctcgccaccagtcttgacgcagacgttgtcctcagccgtagcgccttcgggcacgatgtcggcggggaggttaggtacagagagcaggatctcacggatcttngcttcggcctcggccttcttctcctcaaggctcttgcttgcctccttgagcagtgccacctgagagcggatgctctcngcctgctccttggcgccctgcttcatcagatcaccgatctccttagcgagggccttctgacgagagaggctggcatcgagctcctgctgagagcgacggcggatctcatcgaagttcaggacttcgntgatcgcttcgcgtgcctcgaattgcttcttgcggaggcgctcaatgaccgcctcggtattctccttgatttgcttgagtgtaagcataatgtctcgtgtggggtataatgagaggaggtcgctccctccgggctgtgtagacccttctggagcaacctccggttgacttgtctgacgtgtgctccgtcttaggcctcagccgcgatggagacgtacgagcggtcgttcttcttgcgagtgaagaccaccttaccgtcgatcagtgcatagagcgtgtggtccttaccgatacctacgcctgcacctgggtgatgctgcgtgccacgctggcggacgatgatgttaccagccttagcgtgctgaccaccgaagagctttactccgagtcgcttactttctgattcgcgtccgttcttggagctacctacaccttttttatgtgccattgtcttatgtctaaactaatgcggtgatacaattacttacgctacgatttccttgacgaggacttcgctgaactgctggcggtggccattgagcttgcgatagcccttacggcgcttcttgtggaagacaagtaccttgtcgccctttacaagaggcgtgatgatttcgcacacgaccttagcaccagccactacaggcgtacctacagtgacagcaccatccttgtctacgaggaggaccttgtcgaattctactactgcgccactctctgcacccttgacgtggtgaatgaagaggcgacggccctgttctacattgaactgctggccctgaatgtctacgatgacgtacattatcgttgataactaaaaagttagccccgtagggtgccacccgctccacggcggagggatagacttcttctcctaccctacataggaaattcggtcacaaagatacaaaaatatctgatacaacaccttgcacncccttgactttcaccgaagaaacnncctcagtccgagctcttcccctacccnacanaaggnaanatctcncccnccnnannancncccncngnnnccnnncnnancnnnnnnnnnnacnnnaagggntnnnaacctatnttggncnnnnnnnnnnccnntnntggtnnnnnnnnnnancnnnannggtnnnnnnnncnnccnntntnnnnncnnnnnannancnannnnngnnnnannnnnnnnnnnnnnnngnnnnnnnnnnnnnnnnnnnnnnnaannnnnnnannnnnnnnnnnnnnnnnnnnnnnnnnnnnnnnnnnnnnnnnnnnnnnnnnnnnnnnnnnnnnnnnnnnnnnnnnnnnnnnnnnnnnnnnnnnnnnnnnnnnnnnnnnnnnnnnnnnnnnnnnnnnnnnnnnnnnnnnnnnnnnnnnnnnnnnnnnnnnnnnnnnnnnnnnnnnnnnnnnnnnnnnnnnnnnnnnnnnnncnnnnnnnnnnnnnnnnnnnnnnnnnnnnnnnnnnnnnnnnnnnnnnnnannnnnnnnnnnnnnnnnnnnnnnnnnnnnnnnnnnnnnnnnnnnnnnnnnnnnnnnnnnnnnnnnnnnnnnnnnnnnnnnnnnnnnnnnnnnnnnnnnnnnnnnnnnnnnnnnnnnnnnnnnnnnnnnnnnnnnnnnnnnnnnnnnnnnnnnnnnnnnnnnnnnnnnnnnnnnnnnnnnnnnnnnnnnnnnnnnnnnnnnnnnnnnnnnnnnnnnnnnnnnnnnnnnnnnnnnnnnnnnnnnnnnnnnnnnnnnnnnnnnnnnnnnnnnnnnnnnnnnnnnnnnnnnnnnnnnnnnnnnnnnnnnnnnnnnnnnnnnnnnnnnnnnnnnnnnnnnnnnnnnnnnnnnnnnnnnnnnnnnnnnnnnnnnnnnnnnnnnnnncnnnnnnnnnnnnnnnnnnnnnnnnnnnnnnnnnnnnnnnnnnnnnnnnnnnnnnnnnnnnnnnnnnnnnnnnnnnnnnnnnnnnnnnnnnnnnnnnnnnnnnnnnnnnnnnnnnnnnnnnnnnnnnnnnnnnnnnnnnnnnnnnn

SEQ ID NO: 1051 - DNA, 4000 bp, Escherichia coli
  misc_feature (458)..(458): n is a, c, g, or t
  misc_feature (1431)..(1431): n is a, c, g, or t
  misc_feature (1992)..(1992): n is a, c, g, or t
  misc_feature (3354)..(3355): n is a, c, g, or t
  misc_feature (3357)..(3362): n is a, c, g, or t
  misc_feature (3364)..(3365): n is a, c, g, or t
  misc_feature (3367)..(3378): n is a, c, g, or t
  misc_feature (3380)..(3385): n is a, c, g, or t
  misc_feature (3387)..(3387): n is a, c, g, or t
  misc_feature (3389)..(3389): n is a, c, g, or t
  misc_feature (3391)..(3391): n is a, c, g, or t
  misc_feature (3394)..(3394): n is a, c, g, or t
  misc_feature (3397)..(3398): n is a, c, g, or t
  misc_feature (3401)..(3402): n is a, c, g, or t
  misc_feature (3404)..(3405): n is a, c, g, or t
  misc_feature (3410)..(3410): n is a, c, g, or t
  misc_feature (3413)..(3418): n is a, c, g, or t
  misc_feature (3420)..(3420): n is a, c, g, or t
  misc_feature (3425)..(3428): n is a, c, g, or t
  misc_feature (3430)..(3431): n is a, c, g, or t
  misc_feature (3433)..(3443): n is a, c, g, or t
  misc_feature (3445)..(3446): n is a, c, g, or t
  misc_feature (3448)..(3450): n is a, c, g, or t
  misc_feature (3453)..(3453): n is a, c, g, or t
  misc_feature (3456)..(3459): n is a, c, g, or t
  misc_feature (3461)..(3461): n is a, c, g, or t
  misc_feature (3463)..(3463): n is a, c, g, or t
  misc_feature (3465)..(3469): n is a, c, g, or t
  misc_feature (3471)..(3471): n is a, c, g, or t
  misc_feature (3473)..(3476): n is a, c, g, or t
  misc_feature (3478)..(3478): n is a, c, g, or t
  misc_feature (3480)..(3480): n is a, c, g, or t
  misc_feature (3482)..(3485): n is a, c, g, or t
  misc_feature (3487)..(3492): n is a, c, g, or t
  misc_feature (3494)..(3497): n is a, c, g, or t
  misc_feature (3502)..(3502): n is a, c, g, or t
  misc_feature (3504)..(3504): n is a, c, g, or t
  misc_feature (3507)..(3507): n is a, c, g, or t
  misc_feature (3509)..(3514): n is a, c, g, or t
  misc_feature (3517)..(3521): n is a, c, g, or t
  misc_feature (3524)..(3528): n is a, c, g, or t
  misc_feature (3530)..(3539): n is a, c, g, or t
  misc_feature (3541)..(3542): n is a, c, g, or t
  misc_feature (3544)..(3548): n is a, c, g, or t
  misc_feature (3550)..(3550): n is a, c, g, or t
  misc_feature (3552)..(3560): n is a, c, g, or t
  misc_feature (3562)..(3572): n is a, c, g, or t
  misc_feature (3574)..(3576): n is a, c, g, or t
  misc_feature (3578)..(3582): n is a, c, g, or t
  misc_feature (3587)..(3595): n is a, c, g, or t
  misc_feature (3597)..(3597): n is a, c, g, or t
  misc_feature (3599)..(3602): n is a, c, g, or t
  misc_feature (3607)..(3612): n is a, c, g, or t
  misc_feature (3614)..(3614): n is a, c, g, or t
  misc_feature (3616)..(3618): n is a, c, g, or t
  misc_feature (3620)..(3620): n is a, c, g, or t
  misc_feature (3623)..(3627): n is a, c, g, or t
  misc_feature (3629)..(3631): n is a, c, g, or t
  misc_feature (3633)..(3635): n is a, c, g, or t
  misc_feature (3637)..(3637): n is a, c, g, or t
  misc_feature (3639)..(3643): n is a, c, g, or t
  misc_feature (3645)..(3648): n is a, c, g, or t
  misc_feature (3652)..(3669): n is a, c, g, or t
  misc_feature (3671)..(3676): n is a, c, g, or t
  misc_feature (3678)..(3678): n is a, c, g, or t
  misc_feature (3680)..(3680): n is a, c, g, or t
  misc_feature (3682)..(3682): n is a, c, g, or t
  misc_feature (3685)..(3686): n is a, c, g, or t
  misc_feature (3688)..(3693): n is a, c, g, or t
  misc_feature (3695)..(3695): n is a, c, g, or t
  misc_feature (3697)..(3702): n is a, c, g, or t
  misc_feature (3704)..(3704): n is a, c, g, or t
  misc_feature (3706)..(3706): n is a, c, g, or t
  misc_feature (3708)..(3718): n is a, c, g, or t
  misc_feature (3720)..(3720): n is a, c, g, or t
  misc_feature (3722)..(3727): n is a, c, g, or t
  misc_feature (3729)..(3730): n is a, c, g, or t
  misc_feature (3734)..(3734): n is a, c, g, or t
  misc_feature (3736)..(3738): n is a, c, g, or t
  misc_feature (3742)..(3743): n is a, c, g, or t
  misc_feature (3745)..(3745): n is a, c, g, or t
  misc_feature (3748)..(3752): n is a, c, g, or t
  misc_feature (3755)..(3755): n is a, c, g, or t
  misc_feature (3757)..(3758): n is a, c, g, or t
  misc_feature (3760)..(3763): n is a, c, g, or t
  misc_feature (3765)..(3769): n is a, c, g, or t
  misc_feature (3772)..(3773): n is a, c, g, or t
  misc_feature (3775)..(3776): n is a, c, g, or t
  misc_feature (3778)..(3779): n is a, c, g, or t
  misc_feature (3781)..(3783): n is a, c, g, or t
  misc_feature (3785)..(3786): n is a, c, g, or t
  misc_feature (3791)..(3793): n is a, c, g, or t
  misc_feature (3796)..(3796): n is a, c, g, or t
  misc_feature (3798)..(3798): n is a, c, g, or t
  misc_feature (3800)..(3801): n is a, c, g, or t
  misc_feature (3803)..(3804): n is a, c, g, or t
  misc_feature (3808)..(3812): n is a, c, g, or t
  misc_feature (3814)..(3814): n is a, c, g, or t
  misc_feature (3816)..(3818): n is a, c, g, or t
  misc_feature (3820)..(3822): n is a, c, g, or t
  misc_feature (3824)..(3825): n is a, c, g, or t
  misc_feature (3827)..(3833): n is a, c, g, or t
  misc_feature (3837)..(3837): n is a, c, g, or t
  misc_feature (3839)..(3849): n is a, c, g, or t
  misc_feature (3851)..(3853): n is a, c, g, or t
  misc_feature (3855)..(3856): n is a, c, g, or t
  misc_feature (3859)..(3859): n is a, c, g, or t
  misc_feature (3861)..(3862): n is a, c, g, or t
  misc_feature (3864)..(3866): n is a, c, g, or t
  misc_feature (3869)..(3870): n is a, c, g, or t
  misc_feature (3875)..(3881): n is a, c, g, or t
  misc_feature (3883)..(3884): n is a, c, g, or t
  misc_feature (3886)..(3888): n is a, c, g, or t
  misc_feature (3890)..(3891): n is a, c, g, or t
  misc_feature (3893)..(3897): n is a, c, g, or t
  misc_feature (3901)..(3901): n is a, c, g, or t
  misc_feature (3903)..(3903): n is a, c, g, or t
  misc_feature (3905)..(3906): n is a, c, g, or t
  misc_feature (3908)..(3917): n is a, c, g, or t
  misc_feature (3920)..(3921): n is a, c, g, or t
  misc_feature (3923)..(3925): n is a, c, g, or t
  misc_feature (3928)..(3931): n is a, c, g, or t
  misc_feature (3935)..(3935): n is a, c, g, or t
  misc_feature (3937)..(3940): n is a, c, g, or t
  misc_feature (3942)..(3942): n is a, c, g, or t
  misc_feature (3945)..(3948): n is a, c, g, or t
  misc_feature (3950)..(3952): n is a, c, g, or t
  misc_feature (3954)..(3954): n is a, c, g, or t
  misc_feature (3956)..(3958): n is a, c, g, or t
  misc_feature (3961)..(3965): n is a, c, g, or t
  misc_feature (3968)..(3972): n is a, c, g, or t
  misc_feature (3980)..(3980): n is a, c, g, or t
  misc_feature (3982)..(3982): n is a, c, g, or t
  misc_feature (3985)..(3987): n is a, c, g, or t
  misc_feature (3989)..(3989): n is a, c, g, or t
  misc_feature (3991)..(3992): n is a, c, g, or t
  misc_feature (3995)..(3995): n is a, c, g, or t
  misc_feature (3999)..(4000): n is a, c, g, or t
ccgcctccaaagccgcgtctgatcatctggtgcgcgcttaccaccatacctatggactacctaccctcacgacgaactgttctaacaactatggtccgtttcaatttccagagaaactgattcctctagtgattctcaacgcgctaaacggaaaaccaattccggtatacggagacggcgcgaacatccgcgactggctgtatgtcatcgatcattgcgaagcgatacaagctgtactggagcgtggaaacattggcgccacctacaacatcggaggtgggaacgaacgcaccaaccttgaaatcgttcgtaccatctgttcactactcgacgaacttcggccaaacgatccaatcgtgccgcacgagaacttgatcacgttcgtgaaagatcgtcctggccacgatcgacggtatgccatgaacgccgcaaagattgagtctgaaataggctggcgnccgcgagagacttttgagaccgggattcgaaagacgatcaattggtacttagcaaacgaaggttgggtcgagcaagtaacgagtggcagttatcgtcagtggatggcatcgcagtactctttgtagttcaatccgaatgacactcactccggaaaataacgttcgtttcaaaggcatcatcctggctggaggctcgggcacccggttgtatcccgtcacccacgcgatcggaaaaagcttgctgccgatctacaacaagcccttgatctattacccgctctgcacgctcatgctggccggcgtccgggagattctcatcatctcgacggcccaggacactccccgaattgaacaggttttaggcgacggatcgcgcttcggtctgtcacttcggtacgccgtgcagcccaagccggaaggcatcgcccaatcgtttttaattggagagaaatttctcgacggcgcaccttgcacgctggtccttggtgacaatattttttacggccacgatcttgcaaagagcctgcgcagtgctgcttatcaaaccaatggtgcacgcatcttcgcctatcccgtgcaagacccgcagcgttacggagtagttgaatttgattcttccggccgtgccctgagcctcgaagagaaacccaagcttccaaagtcgagatatgcggttacgggcctctacttttacgaccacgaggttgtcgacatcgcgcgaacactcaagccctcagcccgcggagaattggaaatcaccgacgtcaatcggacctatttggaccgcaagaaactcaccgtcgagttgatgggccgcggcatggcttggctcgatactggaacacacgagtcgatgatggaggcgtccttgttcattcaggcaatcgagcgccgccagggactgatggtggcctgtcctgaagagatcgcctaccgctcgggctacattacagcaagcgatatcgaaaggctngcggcgaccatgcagaacagtgggtacggcgcctatctactgcagcttctgacggaacaggtgttttgaatgaaagcgacgcccgcccgcacgccttccctcgctgtcgggagaacgaagctatccggcgtcctgcggctcgagccgcgcgtcttcaccgatgaccgtgggtttttcttcgagagttataacgaagccaccatggctgaggtcgggatcgcggcgcatttcgtgcaggacaaccactcgtcctcactgaaaaatgtaatacgtggactgcactatcagattgaacaccctcaagccaagctcgttcgtgtcgtcagtggagaaattctagacgttgcggttgacttgagacgaagttcgcctacttttggacaatctctggttgagcatctctcggcggaaaacaagaaaatgttgtggatccccgtgggcttcgcccacggttttcgcgtcctgtctgagtccgcggacgtcctgtacaaagctaccgacttttatgaccctgcctcggagcgcacgatcgcctggaatgacgttgacttggccatcgantggcgaacgacttcttctccgatagtctccgcgaaagacgcgagcggcatttcctttaaagaagctccaaaattttgatttttcgaagctcgttcatcgtctcaaaatcctttatccatttgaaatggatttcagatcaaactcttcttccgccatcttcgtaatcgcttgacctatggcaatcgatgcggtggctgctggcgacggcacgttatacacgtggagcatgttctttttccgcacgaactggaagtcgtctatcagggagccatcccttttcaatgcttgcgcgcgcacgcccgatccgtccgcgaccaagtcgctcgcttgaatttccggaaccaagcgttttagcgctcgcacgaaagccctcttgttgagcgatcgatacatttcacccgccccatagcgccaatacgttcccgccaagcgccagaaacctggaaatgcgaatgtccctgccgcatcccgaacgctaatctgattccaccgatatccctctcgcttcaatgccagaaccgcgtttgggccaacgtcgacacctccgtgaattcgccgtgtaaagtgaacgccgaggaaggggaaccgcgggtcgggcacgggatagatgagcccacggaccagatgctctcgttccggaatcagatcgtagtattcgccacggaagggaacgatcgcgacttcagggcgctctcctgccaagcggctgactcggtcgctgtggagcccagcgcaattgataacatagggcacctcaatcgagcccctgttggtttcaaccactgtcgtgttatcgcgatatacgaaccccagcaccttggtcgaggtgctaatgcttccaccgttgcgcgcgatcagctccgcatacttctcgcacacctcaacatagtcgacgattcccgtcgacggaatgtgcaggcctccgagtccgccgcaatggggttcaagttcgcgaacttgttcttgagctagcaacgtcgctcccctcagaccattagcagatgctcgacccagcagcgcttgcagtcgcggaagctcgtcctgagcggtggcgacgatcaccttgccgcaaatttcgtgtttgatcccgtgctctcgacaaaaagcgatcatcgccatcgccccttgaacgcaaagcttggccttcagagaaccgggcgggtaatagattccggaatgaatgaccccgctgctgtggccgctttggtgtcgagcaacgcgatcttctttctcgaccagcagaagacgcaagtgtgggaaggatgtgcttaatgcgagtgccgtagcgagtccgacgatacccccgccgatgacgaggatgtcgcgtcgctgatcaggcatacacctagtttactcggcccnngnnnnnnannannnnnnnnnnnntnnnnnnantnanttnggnntgnntnngttcngtnnnnnnanaaaannnngnncnnnnnnnnnnngnngnnnggncgnnnngncngnnnnnantnnnntntngnnnngnnnnnntnnnnttgantngantnnnnnntcnnnnntcnnnnncnnnnnnnnnnanngnnnnnanannnnnnnnntnnnnnnnnnnngnnncnnnnntcgcnnnnnnnnntncnnnnctcgnnnnnngngnnnanttnnnnntnnngnnngncnnnnntnnnnccgnnnnnnnnnnnnnnnnnnannnnnnancngnacnngnnnnnntncnnnnnnangntnnnnnnnnnnnangnnnnnnanncgcncnnnccgnncngcnnnnngancnncnnnncnnnnntcnngnngnncnnnannttagnnnagncngnncnnctcnnnnngngnnngnnntnnannnnnnngttnannnnnnnnnnngnnnannggntnngnnnaanngaaannnnnnncnngnnnanntnnnnnctgncngnncnnnnnnnnnnganntnnnccnnnncgcncnnnncnttnnnncnnncngnnnggnnnnnttnnnnnccgaccgnancgnnncngnncgnaagnn

SEQ ID NO: 1052 - DNA, 4000 bp, Escherichia coli
  misc_feature (624)..(624): n is a, c, g, or t
  misc_feature (1987)..(1988): n is a, c, g, or t
  misc_feature (2004)..(2004): n is a, c, g, or t
  misc_feature (2241)..(2241): n is a, c, g, or t
  misc_feature (2250)..(2261): n is a, c, g, or t
  misc_feature (2263)..(2268): n is a, c, g, or t
  misc_feature (2270)..(2270): n is a, c, g, or t
  misc_feature (2273)..(2273): n is a, c, g, or t
  misc_feature (2275)..(2276): n is a, c, g, or t
  misc_feature (2278)..(2284): n is a, c, g, or t
  misc_feature (2286)..(2291): n is a, c, g, or t
  misc_feature (2294)..(2295): n is a, c, g, or t
  misc_feature (2297)..(2300): n is a, c, g, or t
  misc_feature (2302)..(2303): n is a, c, g, or t
  misc_feature (2306)..(2306): n is a, c, g, or t
  misc_feature (2308)..(2308): n is a, c, g, or t
  misc_feature (2310)..(2312): n is a, c, g, or t
  misc_feature (2314)..(2315): n is a, c, g, or t
  misc_feature (2317)..(2321): n is a, c, g, or t
  misc_feature (2323)..(2323): n is a, c, g, or t
  misc_feature (2325)..(2339): n is a, c, g, or t
  misc_feature (2341)..(2342): n is a, c, g, or t
  misc_feature (2344)..(2350): n is a, c, g, or t
  misc_feature (2352)..(2354): n is a, c, g, or t
  misc_feature (2356)..(2357): n is a, c, g, or t
  misc_feature (2361)..(2364): n is a, c, g, or t
  misc_feature (2366)..(2387): n is a, c, g, or t
  misc_feature (2389)..(2394): n is a, c, g, or t
  misc_feature (2396)..(2404): n is a, c, g, or t
  misc_feature (2406)..(2406): n is a, c, g, or t
  misc_feature (2408)..(2410): n is a, c, g, or t
  misc_feature (2412)..(2412): n is a, c, g, or t
  misc_feature (2414)..(2417): n is a, c, g, or t
  misc_feature (2419)..(2422): n is a, c, g, or t
  misc_feature (2424)..(2430): n is a, c, g, or t
  misc_feature (2432)..(2436): n is a, c, g, or t
  misc_feature (2438)..(2455): n is a, c, g, or t
  misc_feature (2458)..(2465): n is a, c, g, or t
  misc_feature (2467)..(2472): n is a, c, g, or t
  misc_feature (2475)..(2476): n is a, c, g, or t
  misc_feature (2479)..(2480): n is a, c, g, or t
  misc_feature (2485)..(2486): n is a, c, g, or t
  misc_feature (2488)..(2491): n is a, c, g, or t
  misc_feature (2493)..(2495): n is a, c, g, or t
  misc_feature (2498)..(2498): n is a, c, g, or t
  misc_feature (2500)..(2501): n is a, c, g, or t
  misc_feature (2503)..(2505): n is a, c, g, or t
  misc_feature (2507)..(2508): n is a, c, g, or t
  misc_feature (2510)..(2511): n is a, c, g, or t
  misc_feature (2515)..(2517): n is a, c, g, or t
  misc_feature (2519)..(2519): n is a, c, g, or t
  misc_feature (2521)..(2525): n is a, c, g, or t
  misc_feature (2527)..(2528): n is a, c, g, or t
  misc_feature (2530)..(2532): n is a, c, g, or t
  misc_feature (2537)..(2539): n is a, c, g, or t
  misc_feature (2544)..(2544): n is a, c, g, or t
  misc_feature (2546)..(2548): n is a, c, g, or t
  misc_feature (2550)..(2552): n is a, c, g, or t
  misc_feature (2554)..(2555): n is a, c, g, or t
  misc_feature (2557)..(2558): n is a, c, g, or t
  misc_feature (2563)..(2564): n is a, c, g, or t
  misc_feature (2566)..(2568): n is a, c, g, or t
  misc_feature (2570)..(2570): n is a, c, g, or t
  misc_feature (2572)..(2575): n is a, c, g, or t
  misc_feature (2577)..(2579): n is a, c, g, or t
  misc_feature (2582)..(2587): n is a, c, g, or t
  misc_feature (2589)..(2589): n is a, c, g, or t
  misc_feature (2592)..(2604): n is a, c, g, or t
  misc_feature (2606)..(2606): n is a, c, g, or t
  misc_feature (2608)..(2608): n is a, c, g, or t
  misc_feature (2610)..(2612): n is a, c, g, or t
  misc_feature (2614)..(2624): n is a, c, g, or t
  misc_feature (2626)..(2627): n is a, c, g, or t
  misc_feature (2629)..(2629): n is a, c, g, or t
  misc_feature (2633)..(2635): n is a, c, g, or t
  misc_feature (2637)..(2641): n is a, c, g, or t
  misc_feature (2644)..(2647): n is a, c, g, or t
  misc_feature (2650)..(2651): n is a, c, g, or t
  misc_feature (2655)..(2656): n is a, c, g, or t
  misc_feature (2663)..(2663): n is a, c, g, or t
  misc_feature (2667)..(2669): n is a, c, g, or t
  misc_feature (2671)..(2672): n is a, c, g, or t
  misc_feature (2676)..(2677): n is a, c, g, or t
  misc_feature (2680)..(2684): n is a, c, g, or t
  misc_feature (2686)..(2687): n is a, c, g, or t
  misc_feature (2689)..(2690): n is a, c, g, or t
  misc_feature (2692)..(2697): n is a, c, g, or t
  misc_feature (2701)..(2702): n is a, c, g, or t
  misc_feature (2704)..(2705): n is a, c, g, or t
  misc_feature (2707)..(2709): n is a, c, g, or t
  misc_feature (2711)..(2712): n is a, c, g, or t
  misc_feature (2715)..(2729): n is a, c, g, or t
  misc_feature (2731)..(2732): n is a, c, g, or t
  misc_feature (2734)..(2736): n is a, c, g, or t
  misc_feature (2738)..(2745): n is a, c, g, or t
  misc_feature (2747)..(2750): n is a, c, g, or t
  misc_feature (2752)..(2752): n is a, c, g, or t
  misc_feature (2754)..(2757): n is a, c, g, or t
  misc_feature (2759)..(2759): n is a, c, g, or t
  misc_feature (2762)..(2762): n is a, c, g, or t
  misc_feature (2764)..(2764): n is a, c, g, or t
  misc_feature (2767)..(2768): n is a, c, g, or t
  misc_feature (2771)..(2772): n is a, c, g, or t
  misc_feature (2774)..(2774): n is a, c, g, or t
  misc_feature (2778)..(2778): n is a, c, g, or t
  misc_feature (2780)..(2780): n is a, c, g, or t
  misc_feature (2785)..(2788): n is a, c, g, or t
  misc_feature (2790)..(2791): n is a, c, g, or t
  misc_feature (2793)..(2793): n is a, c, g, or t
  misc_feature (2797)..(2798): n is a, c, g, or t
  misc_feature (2800)..(2800): n is a, c, g, or t
  misc_feature (2802)..(2802): n is a, c, g, or t
  misc_feature (2805)..(2805): n is a, c, g, or t
  misc_feature (2807)..(2809): n is a, c, g, or t
  misc_feature (2811)..(2813): n is a, c, g, or t
  misc_feature (2816)..(2818): n is a, c, g, or t
  misc_feature (2820)..(2821): n is a, c, g, or t
  misc_feature (2823)..(2823): n is a, c, g, or t
  misc_feature (2825)..(2825): n is a, c, g, or t
  misc_feature (2828)..(2829): n is a, c, g, or t
  misc_feature (2831)..(2831): n is a, c, g, or t
  misc_feature (2833)..(2835): n is a, c, g, or t
  misc_feature (2837)..(2841): n is a, c, g, or t
  misc_feature (2844)..(2846): n is a, c, g, or t
  misc_feature (2850)..(2858): n is a, c, g, or t
  misc_feature (2860)..(2861): n is a, c, g, or t
  misc_feature (2864)..(2866): n is a, c, g, or t
  misc_feature (2869)..(2871): n is a, c, g, or t
  misc_feature (2874)..(2874): n is a, c, g, or t
  misc_feature (2879)..(2879): n is a, c, g, or t
  misc_feature (2881)..(2882): n is a, c, g, or t
  misc_feature (2884)..(2884): n is a, c, g, or t
  misc_feature (2886)..(2886): n is a, c, g, or t
  misc_feature (2888)..(2889): n is a, c, g, or t
  misc_feature (2891)..(2892): n is a, c, g, or t
  misc_feature (2894)..(2894): n is a, c, g, or t
  misc_feature (2896)..(2897): n is a, c, g, or t
  misc_feature (2899)..(2899): n is a, c, g, or t
  misc_feature (2902)..(2907): n is a, c, g, or t
  misc_feature (2910)..(2910): n is a, c, g, or t
  misc_feature (2912)..(2919): n is a, c, g, or t
  misc_feature (2924)..(2927): n is a, c, g, or t
  misc_feature (2929)..(2929): n is a, c, g, or t
  misc_feature (2931)..(2933): n is a, c, g, or t
  misc_feature (2935)..(2936): n is a, c, g, or t
  misc_feature (2938)..(2939): n is a, c, g, or t
  misc_feature (2942)..(2943): n is a, c, g, or t
  misc_feature (2945)..(2948): n is a, c, g, or t
  misc_feature (2950)..(2950): n is a, c, g, or t
  misc_feature (2952)..(2953): n is a, c, g, or t
  misc_feature (2955)..(2955): n is a, c, g, or t
  misc_feature (2957)..(2957): n is a, c, g, or t
  misc_feature (2959)..(2959): n is a, c, g, or t
  misc_feature (2961)..(2962): n is a, c, g, or t
  misc_feature (2965)..(2965): n is a, c, g, or t
  misc_feature (2968)..(2969): n is a, c, g, or t
  misc_feature (2976)..(2980): n is a, c, g, or t
  misc_feature (2982)..(2983): n is a, c, g, or t
  misc_feature (2986)..(2986): n is a, c, g, or t
  misc_feature (2991)..(2991): n is a, c, g, or t
  misc_feature (2993)..(2993): n is a, c, g, or t
  misc_feature (2997)..(2997): n is a, c, g, or t
  misc_feature (2999)..(3000): n is a, c, g, or t
  misc_feature (3004)..(3004): n is a, c, g, or t
  misc_feature (3009)..(3009): n is a, c, g, or t
  misc_feature (3011)..(3013): n is a, c, g, or t
  misc_feature (3015)..(3017): n is a, c, g, or t
  misc_feature (3019)..(3023): n is a, c, g, or t
  misc_feature (3026)..(3037): n is a, c, g, or t
  misc_feature (3039)..(3039): n is a, c, g, or t
  misc_feature (3041)..(3041): n is a, c, g, or t
  misc_feature (3044)..(3044): n is a, c, g, or t
  misc_feature (3046)..(3047): n is a, c, g, or t
  misc_feature (3050)..(3050): n is a, c, g, or t
  misc_feature (3052)..(3053): n is a, c, g, or t
  misc_feature (3056)..(3056): n is a, c, g, or t
  misc_feature (3058)..(3062): n is a, c, g, or t
  misc_feature (3065)..(3066): n is a, c, g, or t
  misc_feature (3068)..(3070): n is a, c, g, or t
  misc_feature (3074)..(3080): n is a, c, g, or t
  misc_feature (3082)..(3082): n is a, c, g, or t
  misc_feature (3085)..(3085): n is a, c, g, or t
  misc_feature (3088)..(3092): n is a, c, g, or t
  misc_feature (3096)..(3097): n is a, c, g, or t
  misc_feature (3102)..(3102): n is a, c, g, or t
  misc_feature (3107)..(3108): n is a, c, g, or t
  misc_feature (3113)..(3113): n is a, c, g, or t
  misc_feature (3115)..(3118): n is a, c, g, or t
  misc_feature (3126)..(3128): n is a, c, g, or t
  misc_feature (3130)..(3130): n is a, c, g, or t
  misc_feature (3136)..(3139): n is a, c, g, or t
  misc_feature (3141)..(3144): n is a, c, g, or t
  misc_feature (3146)..(3146): n is a, c, g, or t
  misc_feature (3150)..(3150): n is a, c, g, or t
  misc_feature (3154)..(3154): n is a, c, g, or t
  misc_feature (3157)..(3159): n is a, c, g, or t
  misc_feature (3161)..(3161): n is a, c, g, or t
  misc_feature (3167)..(3169): n is a, c, g, or t
  misc_feature (3173)..(3173): n is a, c, g, or t
  misc_feature (3176)..(3177): n is a, c, g, or t
  misc_feature (3179)..(3180): n is a, c, g, or t
  misc_feature (3182)..(3182): n is a, c, g, or t
  misc_feature (3184)..(3185): n is a, c, g, or t
  misc_feature (3187)..(3187): n is a, c, g, or t
  misc_feature (3189)..(3190): n is a, c, g, or t
  misc_feature (3192)..(3193): n is a, c, g, or t
  misc_feature (3195)..(3195): n is a, c, g, or t
  misc_feature (3197)..(3198): n is a, c, g, or t
  misc_feature (3203)..(3203): n is a, c, g, or t
  misc_feature (3207)..(3207): n is a, c, g, or t
  misc_feature (3210)..(3211): n is a, c, g, or t
  misc_feature (3213)..(3215): n is a, c, g, or t
  misc_feature (3218)..(3219): n is a, c, g, or t
  misc_feature (3223)..(3223): n is a, c, g, or t
  misc_feature (3225)..(3228): n is a, c, g, or t
  misc_feature (3232)..(3237): n is a, c, g, or t
  misc_feature (3240)..(3240): n is a, c, g, or t
  misc_feature (3243)..(3243): n is a, c, g, or t
  misc_feature (3245)..(3245): n is a, c, g, or t
  misc_feature (3248)..(3252): n is a, c, g, or t
  misc_feature (3256)..(3258): n is a, c, g, or t
  misc_feature (3261)..(3264): n is a, c, g, or t
  misc_feature (3266)..(3269): n is a, c, g, or t
  misc_feature (3271)..(3271): n is a, c, g, or t
  misc_feature (3273)..(3274): n is a, c, g, or t
  misc_feature (3279)..(3280): n is a, c, g, or t
  misc_feature (3283)..(3285): n is a, c, g, or t
  misc_feature (3287)..(3290): n is a, c, g, or t
  misc_feature (3293)..(3293): n is a, c, g, or t
  misc_feature (3296)..(3297): n is a, c, g, or t
  misc_feature (3299)..(3299): n is a, c, g, or t
  misc_feature (3304)..(3304): n is a, c, g, or t
  misc_feature (3308)..(3308): n is a, c, g, or t
  misc_feature (3310)..(3310): n is a, c, g, or t
  misc_feature (3313)..(3319): n is a, c, g, or t
  misc_feature (3321)..(3321): n is a, c, g, or t
  misc_feature (3323)..(3323): n is a, c, g, or t
  misc_feature (3325)..(3326): n is a, c, g, or t
  misc_feature (3328)..(3328): n is a, c, g, or t
  misc_feature (3330)..(3334): n is a, c, g, or t
  misc_feature (3337)..(3337): n is a, c, g, or t
  misc_feature (3339)..(3341): n is a, c, g, or t
  misc_feature (3344)..(3344): n is a, c, g, or t
  misc_feature (3346)..(3347): n is a, c, g, or t
  misc_feature (3349)..(3349): n is a, c, g, or t
  misc_feature (3353)..(3353): n is a, c, g, or t
  misc_feature (3356)..(3356): n is a, c, g, or t
  misc_feature (3358)..(3358): n is a, c, g, or t
  misc_feature (3361)..(3361): n is a, c, g, or t
  misc_feature (3364)..(3365): n is a, c, g, or t
  misc_feature (3368)..(3368): n is a, c, g, or t
  misc_feature (3370)..(3371): n is a, c, g, or t
  misc_feature (3373)..(3373): n is a, c, g, or t
  misc_feature (3375)..(3378): n is a, c, g, or t
  misc_feature (3384)..(3385): n is a, c, g, or t
  misc_feature (3387)..(3389): n is a, c, g, or t
  misc_feature (3392)..(3393): n is a, c, g, or t
  misc_feature (3395)..(3395): n is a, c, g, or t
  misc_feature (3397)..(3398): n is a, c, g, or t
  misc_feature (3400)..(3401): n is a, c, g, or t
  misc_feature (3403)..(3403): n is a, c, g, or t
  misc_feature (3405)..(3405): n is a, c, g, or t
  misc_feature (3407)..(3407): n is a, c, g, or t
  misc_feature (3411)..(3412): n is a, c, g, or t
  misc_feature (3414)..(3414): n is a, c, g, or t
  misc_feature (3418)..(3418): n is a, c, g, or t
  misc_feature (3424)..(3424): n is a, c, g, or t
  misc_feature (3433)..(3433): n is a, c, g, or t
  misc_feature (3435)..(3435): n is a, c, g, or t
  misc_feature (3447)..(3447): n is a, c, g, or t
  misc_feature (3450)..(3450): n is a, c, g, or t
  misc_feature (3455)..(3455): n is a, c, g, or t
  misc_feature (3457)..(3458): n is a, c, g, or t
  misc_feature (3464)..(3464): n is a, c, g, or t
  misc_feature (3468)..(3468): n is a, c, g, or t
  misc_feature (3472)..(3472): n is a, c, g, or t
  misc_feature (3477)..(3478): n is a, c, g, or t
  misc_feature (3480)..(3480): n is a, c, g, or t
  misc_feature (3487)..(3490): n is a, c, g, or t
  misc_feature (3495)..(3495): n is a, c, g, or t
  misc_feature (3498)..(3502): n is a, c, g, or t
  misc_feature (3504)..(3504): n is a, c, g, or t
  misc_feature (3509)..(3510): n is a, c, g, or t
  misc_feature (3512)..(3512): n is a, c, g, or t
  misc_feature (3515)..(3515): n is a, c, g, or t
  misc_feature (3517)..(3519): n is a, c, g, or t
  misc_feature (3521)..(3522): n is a, c, g, or t
  misc_feature (3532)..(3532): n is a, c, g, or t
  misc_feature (3536)..(3536): n is a, c, g, or t
  misc_feature (3541)..(3541): n is a, c, g, or t
  misc_feature (3543)..(3543): n is a, c, g, or t
  misc_feature (3549)..(3549): n is a, c, g, or t
  misc_feature (3552)..(3552): n is a, c, g, or t
  misc_feature (3554)..(3554): n is a, c, g, or t
  misc_feature (3562)..(3562): n is a, c, g, or t
  misc_feature (3573)..(3573): n is a, c, g, or t
  misc_feature (3575)..(3576): n is a, c, g, or t
  misc_feature (3578)..(3579): n is a, c, g, or t
  misc_feature (3585)..(3585): n is a, c, g, or t
  misc_feature (3588)..(3589): n is a, c, g, or t
  misc_feature (3593)..(3593): n is a, c, g, or t
  misc_feature (3595)..(3595): n is a, c, g, or t
  misc_feature (3597)..(3597): n is a, c, g, or t
  misc_feature (3599)..(3600): n is a, c, g, or t
  misc_feature (3604)..(3604): n is a, c, g, or t
  misc_feature (3609)..(3609): n is a, c, g, or t
  misc_feature (3611)..(3614): n is a, c, g, or t
  misc_feature (3617)..(3617): n is a, c, g, or t
  misc_feature (3620)..(3620): n is a, c, g, or t
  misc_feature (3629)..(3629): n is a, c, g, or t
  misc_feature (3633)..(3633): n is a, c, g, or t
  misc_feature (3639)..(3640): n is a, c, g, or t
  misc_feature (3642)..(3644): n is a, c, g, or t
  misc_feature (3650)..(3652): n is a, c, g, or t
  misc_feature (3656)..(3656): n is a, c, g, or t
  misc_feature (3658)..(3661): n is a, c, g, or t
  misc_feature (3663)..(3666): n is a, c, g, or t
  misc_feature (3668)..(3668): n is a, c, g, or t
  misc_feature (3672)..(3673): n is a, c, g, or t
  misc_feature (3677)..(3678): n is a, c, g, or t
  misc_feature (3680)..(3681): n is a, c, g, or t
  misc_feature (3683)..(3683): n is a, c, g, or t
  misc_feature (3687)..(3687): n is a, c, g, or t
  misc_feature (3690)..(3690): n is a, c, g, or t
  misc_feature (3693)..(3693): n is a, c, g, or t
  misc_feature (3696)..(3696): n is a, c, g, or t
  misc_feature (3699)..(3700): n is a, c, g, or t
  misc_feature (3704)..(3704): n is a, c, g, or t
  misc_feature (3711)..(3712): n is a, c, g, or t
  misc_feature (3714)..(3714): n is a, c, g, or t
  misc_feature (3718)..(3719): n is a, c, g, or t
  misc_feature (3721)..(3722): n is a, c, g, or t
  misc_feature (3724)..(3724): n is a, c, g, or t
  misc_feature (3729)..(3729): n is a, c, g, or t
  misc_feature (3731)..(3733): n is a, c, g, or t
  misc_feature (3736)..(3736): n is a, c, g, or t
  misc_feature (3738)..(3742): n is a, c, g, or t
  misc_feature (3744)..(3744): n is a, c, g, or t
  misc_feature (3746)..(3746): n is a, c, g, or t
  misc_feature (3748)..(3750): n is a, c, g, or t
  misc_feature (3753)..(3753): n is a, c, g, or t
  misc_feature (3760)..(3760): n is a, c, g, or t
  misc_feature (3764)..(3765): n is a, c, g, or t
  misc_feature (3768)..(3768): n is a, c, g, or t
  misc_feature (3771)..(3773): n is a, c, g, or t
  misc_feature (3775)..(3775): n is a, c, g, or t
  misc_feature (3777)..(3777): n is a, c, g, or t
  misc_feature (3779)..(3779): n is a, c, g, or t
  misc_feature (3781)..(3783): n is a, c, g, or t
  misc_feature (3786)..(3786): n is a, c, g, or t
  misc_feature (3788)..(3788): n is a, c, g, or t
  misc_feature (3792)..(3792): n is a, c, g, or t
  misc_feature (3797)..(3798): n is a, c, g, or t
  misc_feature (3801)..(3801): n is a, c, g, or t
  misc_feature (3803)..(3803): n is a, c, g, or t
  misc_feature (3813)..(3816): n is a, c, g, or t
  misc_feature (3818)..(3819): n is a, c, g, or t
  misc_feature (3824)..(3824): n is a, c, g, or t
  misc_feature (3826)..(3826): n is a, c, g, or t
  misc_feature (3828)..(3828): n is a, c, g, or t
  misc_feature (3831)..(3832): n is a, c, g, or t
  misc_feature (3834)..(3835): n is a, c, g, or t
  misc_feature (3837)..(3837): n is a, c, g, or t
  misc_feature (3845)..(3845): n is a, c, g, or t
  misc_feature (3847)..(3847): n is a, c, g, or t
  misc_feature (3849)..(3851): n is a, c, g, or t
  misc_feature (3856)..(3856): n is a, c, g, or t
  misc_feature (3860)..(3861): n is a, c, g, or t
  misc_feature (3863)..(3865): n is a, c, g, or t
  misc_feature (3867)..(3867): n is a, c, g, or t
  misc_feature (3869)..(3870): n is a, c, g, or t
  misc_feature (3873)..(3873): n is a, c, g, or t
  misc_feature (3876)..(3876): n is a, c, g, or t
  misc_feature (3879)..(3880): n is a, c, g, or t
  misc_feature (3882)..(3882): n is a, c, g, or t
  misc_feature (3884)..(3884): n is a, c, g, or t
  misc_feature (3886)..(3886): n is a, c, g, or t
  misc_feature (3890)..(3890): n is a, c, g, or t
  misc_feature (3893)..(3894): n is a, c, g, or t
  misc_feature (3898)..(3900): n is a, c, g, or t
  misc_feature (3904)..(3904): n is a, c, g, or t
  misc_feature (3907)..(3907): n is a, c, g, or t
  misc_feature (3910)..(3912): n is a, c, g, or t
  misc_feature (3914)..(3914): n is a, c, g, or t
  misc_feature (3919)..(3919): n is a, c, g, or t
  misc_feature (3921)..(3922): n is a, c, g, or t
  misc_feature (3924)..(3924): n is a, c, g, or t
  misc_feature (3928)..(3930): n is a, c, g, or t
  misc_feature (3933)..(3937): n is a, c, g, or t
  misc_feature (3939)..(3939): n is a, c, g, or t
  misc_feature (3941)..(3941): n is a, c, g, or t
  misc_feature (3944)..(3944): n is a, c, g, or t
  misc_feature (3946)..(3948): n is a, c, g, or t
  misc_feature (3951)..(3951): n is a, c, g, or t
  misc_feature (3956)..(3958): n is a, c, g, or t
  misc_feature (3960)..(3961): n is a, c, g, or t
  misc_feature (3966)..(3966): n is a, c, g, or t
  misc_feature (3970)..(3971): n is a, c, g, or t
  misc_feature (3974)..(3977): n is a, c, g, or t
  misc_feature (3985)..(3986): n is a, c, g, or t
  misc_feature (3988)..(3989): n is a, c, g, or t
  misc_feature (3991)..(3992): n is a, c, g, or t
  misc_feature (4000)..(4000): n is a, c, g, or t
agatatctttatgacacctattttatacctaataactcaactttaattttcgttggcggggtcacaatggatgaaatgatcccgaaggttgagaactattttggtggtttagagcgcaaaccggagccgacccgctactatgggcaggaacctctcccctcaggcgaaaaaagactaatatacagagataataaattaagcccccgggttgagttaagatatcaaatccccggtgttgggcatccggacaaaccccatttcgatgttatcaaagaagttatgcggaaccgacttcagaaaaatcttgatgacaaggaaattggcggaagtgttaatgtcagtacaatggttgttcataccaataattatggacttcccagttcaatccattttgcagctatctatgaagatactgaaaaacttgatgcaagtgaggaagccatgttggcagagattaaacttctttcagaagaaaatattttagatgaagaattaaaatttgcacaaaagactctgcgcacccagtggtatagagcagcctccgaccccaaccggcttaatttccatattgggcattttgaagttatggacagctggaaaaccctgaaaccttatcttgaggcnagagacaaaacgacggtagaggatgtcaaacgtttggttaaacaatatttcatccccgataatcgcaccattggtaaagtcattccgagaggagaaggtcaatgaaacatttattgaaagcatcatgcttgattttgagtttattggcgcttccactgagcacccaagttttagcgcaagacctgacccatcctcgcgatatggaaattcctaaaagcaaatttaaaaggcccgatcctgctaaataccaagtctccctggataatggtttagttgcctatgtggcaaaagaacaccaagtaccacttgtatccttgagcgcttttataaaagctggtaaaattgatggacacaaagaaggggccgctgaagccctgtctgaagccttccttaccggccctaaaaatatgtcttcaacagcctttaaagcagctttaaagcgcatgacggcggagtattcagtaacactccataataagtggatcgagattaatttgaacgttccagccgaagatttggaagaggccttcgaactttttagcgccaccgtaatatcacccaatatcacagaagcaaatattaaagctgctgcaggaaaagcgaccaaagatattaaagtggacaaaaatggagtcattattgatggctcaagcagtgtggccgttagcaaatttcatgacattattcttaaaggcaacatcttgggtaagaagctggtatcaagtgattttgaagatctttccacccatgatgtggagagcttttacactgcttatgttgtggcaggtaacatgaccattgccgtatcaggtgatattaatgaaaaggctatccgaaaaaaactgaaagctcagttttcaagtttgattaacaaaacgcctcctaaccgcaggaatgtgccaaaaataaaacgccagaaaaacaaatatcactatttccctgctgataagctccaaacatgggtggtgataggacatcctcttgcgccggtggcctttaaggatgaaaccgcttttgaggttatgaattatattcttgctggggggcatttttggaccagaatgtttattgaaaccagagacaaatatggcctgaccaatgatgccagtggatatattgaagaccaatgggacggctctgggagttacagctttcactcgtcaagccggcatgatgtcacaaaacagctttatgataatatcatgggtgtcatttatgagatacaaaaagagttggttagcgatgaggagttaatgattgctcataacgcccttgcagacggtgtttacgaaatgaagtttaaggacggaaatgccacggccagatcatttgcaattgagaaattaagatatggcaatcatcnncactcaaaatcatatnccgcgcgggttcgttctgttacgaaaaaagacgtcttaagggtcgcaaatgaatatatgcacccggatgcattccaagtgattatagtcggggaacatataaaccttcaataatagcaacactccccttattcatgaataggggctttctattcgttgtgtgagggtttggactatttgtctatttgacggaaagaatattgtaataagataagaattaaatgaaacgcctctgggncaaataaannnnnnnnnnnngnnnnnntnttnannannnnnnntnnnnnnaanntnnnnannatnantnnntnntnnnnnanannnnnnnnnnnnnnntnnannnnnnnannntnntaannnntnnnnnnnnnnnnnnnnnnnnnnannnnnngnnnnnnnnntngnnnantnnnntnnnnannnnnnntnnnnnannnnnnnnnnnnnnnnnnaannnnnnnnannnnnnaanngannaattnntnnnnannntantnntnnnanntnnattnnntntnnnnnanntnnnattgnnnttaancnnnannnanntnnaattnnannngnannnnannntannnnnnanaannnnnnnnnnnnnanantnnnannnnnnnnnnntnntnttannncnnnnncannnntgnnaaannttaatgnaatnnntnnaatnnttnnnnntnntnnannnnnnaagnntnntnnntnnaannnnnnnnnnnnnnngnnannnannnnnnnngnnnntnannnnanaananaannatnngntaangnaaatnnnntnntntatnntnantantnnncnnnaannntnnananaannantnnntnnnnngannnttannnnnnnnntnntgnnnatnnnaanaaaananntnananngnnangnnantgnnnnnnganannnnnnnntttannnnantnnntnngnnttnnannnnantnntncncnannttntannataaatnnnnncnncanggggncntttntnnttanaaaanannnannnannnnnttnnnnnnnnnnnntntnatntnntgnannaancnnnnntgnntnnnatannnnnnnanaanatnnnnntacnnaaacnaatcnnaccantnnnncttatcannnanattttnnnngnnnntntacnaatnttnnntnttgatnnnattnatnnanntnanncnannanntntnnttttnaagnacnngnnnaannggtntnnnntttnnnnnnttntgntncannnnntaannngtnnnntnnnntnannatttnnaannnannnnccnatnngnataancctnanacnnnnnnnanantnngncnnnnnttntnnntancnntngttnttngnatnaanntantnntntnnnntgtcannannnttnntnannanntntnanatanngnaatnaatatnataaatttnanattatggtggtntgngtgtngnngcctgntagnttanataanncnaaaaatnnnnacagnatnnnnnantgaanngnctntnnntnnaataaagganaatnataangnccatantananaaatgggnaaaagcacttnanncnngtaatnaanntagnangnannactntattnannnngantanaaatttacnctanattcanntnnnaaaatnnnatcnannnntnnnntnattnnctgnngnntnagtnganatnttnatnnaganaaagttnnanttcnntnngnaaatnannnggntnnnnnanancnnncanttgtaangttnnaanatnnnantncncnnnctntnttanccttnnttncntttaaggatnnnnanntatanangnatnnanngngtgcatcnancnnnccaanatanntnnntnanncgnctntgnntnananaaangannaccnnnaatnaancannnanatttntnntntcannnttnnnnncngncangnnnatnattgnnntnnttcanactnntannnnacgatttnntnntnnattattan

SEQ ID NO: 1053 - DNA, 4000 bp, Escherichia coli
  misc_feature (16)..(16): n is a, c, g, or t
  misc_feature (298)..(298): n is a, c, g, or t
  misc_feature (331)..(331): n is a, c, g, or t
  misc_feature (340)..(340): n is a, c, g, or t
  misc_feature (418)..(418): n is a, c, g, or t
  misc_feature (424)..(424): n is a, c, g, or t
  misc_feature (433)..(433): n is a, c, g, or t
  misc_feature (439)..(439): n is a, c, g, or t
  misc_feature (469)..(469): n is a, c, g, or t
  misc_feature (496)..(496): n is a, c, g, or t
  misc_feature (604)..(604): n is a, c, g, or t
  misc_feature (625)..(625): n is a, c, g, or t
  misc_feature (739)..(739): n is a, c, g, or t
  misc_feature (742)..(742): n is a, c, g, or t
  misc_feature (748)..(748): n is a, c, g, or t
  misc_feature (766)..(766): n is a, c, g, or t
  misc_feature (784)..(784): n is a, c, g, or t
  misc_feature (862)..(862): n is a, c, g, or t
  misc_feature (865)..(865): n is a, c, g, or t
  misc_feature (883)..(883): n is a, c, g, or t
  misc_feature (895)..(895): n is a, c, g, or t
  misc_feature (934)..(934): n is a, c, g, or t
  misc_feature (1156)..(1156): n is a, c, g, or t
  misc_feature (1246)..(1246): n is a, c, g, or t
  misc_feature (1279)..(1279): n is a, c, g, or t
  misc_feature (1285)..(1285): n is a, c, g, or t
  misc_feature (1288)..(1288): n is a, c, g, or t
  misc_feature (1291)..(1291): n is a, c, g, or t
  misc_feature (1366)..(1366): n is a, c, g, or t
  misc_feature (1483)..(1483): n is a, c, g, or t
  misc_feature (1549)..(1549): n is a, c, g, or t
  misc_feature (1654)..(1654): n is a, c, g, or t
  misc_feature (1669)..(1669): n is a, c, g, or t
  misc_feature (1699)..(1699): n is a, c, g, or t
  misc_feature (1711)..(1711): n is a, c, g, or t
  misc_feature (1720)..(1720): n is a, c, g, or t
  misc_feature (1726)..(1726): n is a, c, g, or t
  misc_feature (1750)..(1750): n is a, c, g, or t
  misc_feature (1783)..(1783): n is a, c, g, or t
  misc_feature (1792)..(1792): n is a, c, g, or t
  misc_feature (1849)..(1849): n is a, c, g, or t
  misc_feature (2014)..(2014): n is a, c, g, or t
  misc_feature (2838)..(2838): n is a, c, g, or t
atcacgccttcgctcnccactgaaacgtgttggtgaacggggatctggtgaatttgaagaaatcagctgggatgaagcacttgagatagcatcaacgcgacttgcaaaagttcgggcagatgatccatctaaattggcattttttactggtcgagatcagtcacagtcattcacaagtttctgggcgcaggggtttggcacgccaaactacgcagctcacggtggcttttgttcggtgaatatggcagcggctggcatatatacaatgggtggtgcattttgggaatttggtcaaccngactgggatcacactaaaatgtttatgcttttnggtgtagcngaagatcatgacagtaacccgattaaaatgggtttaggaaaattaaagaagcgtggtgccaaagtagtaggcgttaanccaatncgaacaggntacaangcagttgctgacgaatgggttggtattacnccaggtactgatggattatttatcacngctctcattcatgaattaatgaaagcggggaagattgatcttcactatcttgctcaatacacaaacgccccagttttactggacagtgatcctgcaagtgaaagcttnggattgtttttgagagataangacagcaagcctttagtaattgatttgaattctggtaaaaaagtagcctttgataaaaaaggtattaaaccagatttaaatgggtcaatccgacaagcgggaataactcacacnacngttttncataaaatggctgagacntacatggcgcctgagcangacgccgcaaatgttgctgagcagtgtggtatttcagaagaaacaattcgacgccttgccgctgaattagcgcatgtngcntttgagcaagaaattagncttccaattgantggactgatttccgtggtgaaaagcatacaaaaatgacngggcgtccagtgtctttccacgcaatgcgaggaatttccgcgcacgcgaatggttttcagacatgtcgtgctttgcatatacttcaaattattttgggaagcgtcgaagtgcctggtgggttcaggtttaaacctccatacccaaaatcatctgaaattcacccgaagccacattatggatatgcgcccaacaaaccacttgatgggccacacttaggtttnacacatggcccagaagatcttgccttaaaggaagatggaacggccgcaagaattgataaggcatttacttgggaaaacccaatgtcatcncatggattgatgcatatggttatttcaaatgcncatgcnggnganccatataaaatagatacattgtttatgtatatggcgaatatgtcttggaactcttcaatgaacacaagtggtgtnatgaagatgctgacagataaagacgaaaatggtgactacgtcattccaaacataatttactcggatgcctactcatctgaaatggtttcatatgcagatcttgttttacctgatgcnacttaccttgaacgccatgattgtatttcacttttagatcgtccaatttgtgaagctgatggtgcngcggatgccattcgctggcctgtcatagagccagatcgagacgtacgtggtttccaatcggtcttatgtgacttgggtgcacgacttggattgccaaactttacnaatgaagatggatcncaaaaatttgctgactatgctgattatatngttaatcaccanagaaagccnggaatnggcccgcttgcaggtttccgtggngatggttcagattcaggacgaggtgatgtaaancctgatcancttgataaatatattgagaatggtggtttctttgttgaacatatcaatgaagatgcntcttattataagccttggaatatggcttaccaagaatgggcagtgaagatgggattatttgatgccccctcaccatatcttttccagctttatgtggaaccaatgcgtaaattccaattggcagcagaaggccacggtgagcgacagcctccagaacatttacgngagagagttcgagagacaatgaatcctcttccagtttggagtaattcaactgataaagattacccaattcatgcgcttactcagcgtcctatggcaatgtatcattcatggggaacacaaaatgcgtggttgagacaaattcatggtgtaaatcctttatatgtcccaacaaaaatttgggaacaaaatgactttaaagatggtgattgggcaaaggtatcatcaccacatggagaaatcactgtgccagtggcacatcaagcagcattaaatgaaaataccatatggacatggaatgcaattggtaaacgtaaaggcgcttgggcattagatgaaaaggcaccagaagcaaccaaaggctttttattaaatcatataatacatgagctaatgccagcaaaaggtgatggaatgcgatgggcaaattctgatcctattaccggacaggctgcgtggtttgatttgaaagttgcaattgaaaaagtggaagcaccagctgaatgtgagccaaatataccggcccagaaatcaccggttggtaaaggccctaaaaacttaacttggaaggtgggagcatgaccgcattaccccctaaatctgatgtaaaacttggtttagtaatcgatcttgatacttgtgttggctgccacgcatgtgttgtgtcttgtaaaggttggaatactgaaaattatggagcaccgttatctgatcaagatgcttacggtgaaaatccatcaggtacctttttaaatcgtgtccactcttatgaagtacagccagaacaaggtgctgcacagacaattcacttccctaagtcatgcctncactgtgaagatgcgccttgtgtaactgtgtgcccaactggagcaagttacaaacgtgccgaggatggcattgttcttgtaaatgaagatgcatgcattgggtgtggtctttgtgcatgggcgtgcccatacggtgcgcgtgaacttgaccaagcagctggtgttatgaaaaaatgtacactttgcgttgacaggatttacaacgaaaatttacctgaagaagatcgtgaaccagcatgtgttcgaacatgtcctgcaggtgcaaggcattttggtgacttaggtgatgcagaaagtgatgtatcaaaattagttcaagagcgtggtggtatggatttaatgccagagcttggaactaagccagtaaacaaatatttacctccacgacccaaagatcaaggaaatgaaattgatattttggcgccgttattggcacctattgcgactgaaacttctggcttcctaggatggcttgatcgtactttggagaaaatctaatgcatccagcaccatccgtaattcttttctcagttttgtctggcctaggttttggcatgttggcatggttaggaattggcaagccgccaatgacgggcatgtttgcatttgtatttttctttatagcctatgccctagcagttggaggcttgttgtccgcaacattccacttaggtaatcctaaaaattcattaaaagcatttagccaatggcgaacaagttggcttagccgtgaaggttgttgtgcagttgccgcattaatgatcatgggcgtttatgcaattggagcaatattttttgaaactcattgggttattattggaggtatcggagcgatattatcaatagttacagtattcactacatcgatgatttatgcacaattaaaaacagttccaagatggaaccattggactacaccagtattatttgtgagtttgtctgtgtttggcggtgccctcatgactggccaagtgaccgtagcaatgtatggttttgttgtagttggattaatccaagtaatcgcatggtttacaagtgataatcgctttgcaaacagtggctctacaatcgaaacagccacgggtttgggtaatattggtaaagtaagaatgtttgaaccacctcacactggcaccaattatttacttaaagaaatggttta

SEQ ID NO: 1054 - DNA, 4000 bp, Escherichia coli
  misc_feature (1542)..(1542): n is a, c, g, or t
  misc_feature (1987)..(1987): n is a, c, g, or t
  misc_feature (1989)..(1989): n is a, c, g, or t
  misc_feature (1991)..(1991): n is a, c, g, or t
  misc_feature (2317)..(2317): n is a, c, g, or t
  misc_feature (2343)..(2343): n is a, c, g, or t
  misc_feature (2481)..(2481): n is a, c, g, or t
  misc_feature (2509)..(2509): n is a, c, g, or t
  misc_feature (3478)..(3478): n is a, c, g, or t
  misc_feature (3553)..(3553): n is a, c, g, or t
  misc_feature (3568)..(3568): n is a, c, g, or t
  misc_feature (3657)..(3657): n is a, c, g, or t
  misc_feature (3883)..(3883): n is a, c, g, or t
  misc_feature (3906)..(3906): n is a, c, g, or t
  misc_feature (3915)..(3915): n is a, c, g, or t
  misc_feature (3920)..(3920): n is a, c, g, or t
  misc_feature (3946)..(3946): n is a, c, g, or t
  misc_feature (3967)..(3967): n is a, c, g, or t
  misc_feature (3969)..(3969): n is a, c, g, or t
  misc_feature (3982)..(3982): n is a, c, g, or t
gcggcgttcatcggattaatctttgaagaacagattggtgctttatttgaagggcaattactacttataggtgcaatgttagccttaacaggagtattactttttctcgcagaccgtgcgagagaaacacgtaaaagcgttcagtggattgatgcatttgtggttggattggctcaagcagtggccatcttgccgggaatctctcgcagtggagcaaccatctctacctccgtcctgcttggtatagaccgtgcgaaggcagcacgattctcttttttaatggtacttcccataatcctgggtaaagcatttttagatgcaaaagatattgtcgcaggggagaccatgggtgaagaagtcagtggttccgttttaattattggtttacttgcggctttccttagtggtattgtcgcatgtaattggatggtcgcactcgtgaagcgcagccaattgaaatatttctcttattactgtttcgtggtggctgccatcgtgttgatcagtcaactcgtctaagctttgactaaagcatcaatattggcaggggaagtcctactggtggacaaacctcttaagtggactagctttcaagcagtcgcgaaaattcggtttaccctacaaaaagaattgggccttaaaaagctcaaagtaggacatgcaggtacgcttgatccgctggccacgggcttgcttattatttgcgtgggaaaaaagaccaaagagattgccagttttatgggacaagagaaggagtatattgctgaaatcacttttggtggtaccacaccttcatatgacttagaaagtgaaattgaagccacctatccaaccgagcatatttctgccgctgcgataacggaaatactcccccagtttcaaggagaaatacaacagtatccacccattttttcagcgatcaagcaaggcggtgtgcgcatgtacgaaaaagcgcgtgctggagaagaagtgattgtggagccgcgtacggttcacattgatgaaattgaaattttatcgttttcagacaatgtcttaaagcttcgtgtactttgtggtaaaggaacctacatccgctctttagcacacgacttgggtaaggcacttcattctggagcccatttgagcgcattgcgaagaacgaaaatcgggtccttcgctgccgatggcgccaagaatccgatagaatggtctgcgtattttaagtctgccttaaggggttagtctagatagttacttttccagaggttggcattgaaatttttcattctgctaaagccgtaaagcgcagtcattgcacccgtagaaaagaccatccagaagaagaagattacacgaaggtgtaaaatggtacctgtatcctttggccctcgaataagactttccgggaagagtaaggctacggccaagcaaaagccaaatacggtcttcatgagactttcgaaatctctaaaggggtatactaaagctttgcgtaaagggtgtaaatcattaccccatttggcaagtaagtaatggtatccgccgcccatcgggacgaanagtaaagggtctttgtctttctccgctaatttgaacatgcctgcaggtgcaatcattttgaatcccttaatctcgcgaccctgagccatttcaaattccttaacagcatccaaagcttcagcggggaacgtgccgttgaaacgtttggaatctaaaaaccgaagacggtagtccacacaaagctttttgatatccgtgatgtggtagattttatccgactcaagtgcgtcaaaattcaacacttcatgatcgccattagattcgaacaggtttgctaaaattcgctcgccctcagtaggagcgttgagtaatgttttaaaaccttctagaacatctaagtgaactgaagttgtgttttttgagcgtaagccgctcaatttttcatgtagattaactcccatagtattgtatttgaatgcgtccgttcaatccatgtgtggcgagnangnttaacaaatgtcggaacggcattgtttaaaattaattggttcatataaaacttgacaaagggggtttcgaaattgtatctttgcagttcttttaatattaatttttcaaagcccgtaagctatgaaaatgaaactttcacatttcgcgtatgacctgccaaaggaacttatcgcgcaagaaccgatgattcaccgcgacgatagtcgtttaatggtagttcacaaagacactggtgaaatcgaacacaagcactttcacgaagtcatcgattattttgacgatggtgacgtaatggtcctcaacaacacaaaggtatttcccgctnggatgtggggaaataaggaaaaaacnggtgcgcgcatcgaagtttttctacttcgtgagttgaattctgaaagccgtttgtgggatgtattggttgatccggcacgtaaaattagaattggtaacaagttgtattttggagaagatgattctctagttgctgangttattgataacacgacctcacgtgggngaacgctacgattcctttttgacggaagttatgaggagttccgtgcgaagttgaaggaaatgggtgaaacgcccttaccgaagtacatcgatcgcgagcctacagaagaagatagcgaacgttaccagaccatttttgcaaaagttgaaggtgcagttgcagccccagttgctggattgcatttctcaaagcaccttatgaagcgcttagaaatcaaaggggttcacttaccggagctaacgcaccatgtgggtttaggaacttttcgcccagttgaggtggaagacttaagcaaacataaaatggacagtgaacaatattcattaccgcaaggcactgcagataccattaacaaggcattagccgaaaagcgaagagtatgtgctattggtacgaccaccgtacgaaccattgagagttctttaactacaggtggacgtgtgacgggcagtgaaggttggacaaacaagttcattttcccgccctatgaggtaaaagtaccagatgcgatggtgactaatttccatcctccaggttctactttattgatgatgaacagtgcgatgttgggtcatgatttggccatgcattcgatcaacgaagccattaaggaaaagtaccgcttcctcgcttttggagatgccatgttgatcatctaatacggatcagaatacataacaaaggccctgcagtgcaaactgtggggcttattattttaggctagcaaaggattttagatagttcttggcaacatcttcccaattaaagtgtgtcttgatgcgttcgcgagaaaggcgtgcttgctctgagcggatctccatggacggacgttgggtaagtaatcgcgttaatacttcttcgtctttccataaagcacctaatcccccaagcacgctggcgttaaaaggattttcatgtgccagtaccatggatcctgaacccatagcctctaataatgcaggatttgtnccgcctacgctgtggccgtgcagataaaaggttgcccgcgtgcggagcgcattaagaatcgttttatcgtaaatngtacccgcgtaaatnatgttcggttcgggaaaggtggctttaagttttcgaccatagcgcgtagtgtaatccccaacagtaaccagggtttctccgctgtttantgcggcatccagaatttcaaatacgtggttatcgggctgtatgcgtccaatgtggaggtggaaattatcggtcggaaagtggtgacgttgtaaaagttctttggcgtctgcaggttcctctatgatttcacttccgtaagcgatagtggaaataggtactttgtatttgctgaggtagttggcaatctctggattgtcagcaattaaaagttttgagcgtttcgcngcccgtcgctcgctccattttanaaaggaagngagtngtccggcgtatttggccctttggtgntctaaaccgtccatattcgtnancgttttatgcttnggccaaagaaaggaccag

SEQ ID NO: 1055 - DNA, 4000 bp, Escherichia coli
  misc_feature (1977)..(1977): n is a, c, g, or t
  misc_feature (1985)..(1985): n is a, c, g, or t
  misc_feature (2155)..(2155): n is a, c, g, or t
  misc_feature (3925)..(3925): n is a, c, g, or t
  misc_feature (3992)..(3992): n is a, c, g, or t
gttttctatattactgaatatgcatctttagaagatatggcagcagctggaaatgcagcattagaagatgccgcatttggtgcagaaaatagaggagactattggaaatacttccataacatatgggacaatcataccgatttaggtatttttaaaaccttcgcaccagcgaataaataatctttacataaaaagggctagtatattgctagccctttcttttaattttacaggtgaatcataagccatataaaaaccttactaattcaaaaaaagaacagatagtcacaatgtttgatcgtattgccaatacatacgatcgattaaatggactcattacttttggaatggataaaacatggcgaaaacgtgtagcaaaaatgattgctgctaacaatcctgaaattatactagatgcagcaacaggtactggagctttagcaattgatttagcacgacactcttcaggaagaataataggggtcgatatttcaggagagatgctctctattggtaaagaaaaaataaaacatctagaactagatcataagattactttggaattagatgatgctgaagcattatcgttcgactctgatacattcgatgctattagtattggatttggtgtaagaaatttcgataatttaaataagggtttatctgagatatttagagtgttaaagccgggggggcaattggtcatccttgaaacatccgtcccaaaatattttccctttaaacaggggtattattttttttcgcattggatcattcccatcttagggaagatcttttcaagagataaattagcctatgaatatctatctgattctgccagtgtctttccccatggaaaaaaatttaatggaattctaaaagaaaataagtttattactattgcagatcatcctcaaatgcttggtatcgtgactatatatacagcgtttaaataactaaaaatgtgtcatcagtgtaaggaaggtttcatttccatttccaccaaactctaatagataatttctttttagtattcgaataacaggcattaacatctcattatttttatcatcaaagctatagttggtatactgacctatcaaccatactgcagttcctttatagtctgtaatttttggtgtaaacgctaatcggacactattcttagtcgattcattaaatgaagaatactctatcatgtgcattaccataaatcttctattttcccaatccgtatgaagaccaagattatacatagatttttcagaatctatatttagcccaatacttgataaggcatagatatttgcttgataattagaggcattccatcgtttgactaataaattattattcgaggcaatataggattggtcaatgtatttgtcattaaacactctaacgccagaataaaacttctttgtgaatgttttaccaaatctaatctcagttatattgggagaatcaatcaaccagattactttaccgcccttaaaaacaacgggatgggcttgtaatagggatagaaatattgctaagagaatgatacattttttcataaacgagggtatctagccaactagtttaggaatagtctttttttcaatcttattcccgtcaaaattagtataaatagcaacggtatcatatccagcatcattaataatctggattgcttcccattcatcaatttttttagatagatctatgggtatgtagatcatttgtgtgtctaaatctatattaataccatcatccttatatactttttcatttagaaaagaaagttcagatagtccttcttgaattccaaatgcacacatagcacataccattccagatacttcgataactaattcatcttttttcacttcaagattactatcttgactgtagataaatgaaaaaaagagtatcagcgctattagggttcttttcataataggaaatttacgttacaataattaaactaggtantgaaattnagttatttatcttgcctaatattacttttattttcttgttctcaactagaagaagaaagctctaatcaaatttataatgaaccagggactccattaattttaatttcaattgatggttttcgatgggattatttagacaaagcagatactccatatttagatgagcttgnggcatccggtgcaagatctgaaggacttattccttcctacccaagtaaaacattccccaaccatcttagtattgttacaggatctcatcctaataatcatggactagttgccaatagaatgtacgatgaagtctttgatgagtattattacatcggacaaggtagtacagcagcacgagatggtaaatggattaatagagagccaatttgggttacagtagaaaaccaatcccttcgagctatgactatgttttggccagcatctgatgcagaaattaagggagtacgaccatctaattggtttacatatgatgaatccattacaaatacgcaacgcatggaacagcttttaaaatggcttgatttaaaagagagtaaacgtcctacttttctagcaagttattttagcgatgtagataatgcaggtcatgcgtatgggcctgaagcagaagaaaccaaaatagctatcagcagcattgatagtgaaattggtgtattaattaacggcttaaaagatcgtggaatttttgatgaagtaaatattatgattgtctctgatcatgggatgacagagacctatactgatcaagtcatttttttagatgactatattgatatgtcaagagttgaactagttgataaaggtccgtttgcagttatgcgagtggttatggggttagttgatggtgatgctaaaccagaagtagataatttatttccattgttagaaaatgcacatcctaatatgaaagtttataaaaaaaatgaatttccagaaaatttccatatgaccgataatcgtcgtattcaagatttaactgcagtagccgatgaccattggcgcattttaacccatgatacgtttaatccaaactattttccaaaaggagatcatggttatcacccggattatgaatcaatgcatggactttttattggtcatggaccggattttaagatagattatgttggccctagatttcaaaacattcatctgtatgaaatgatgtgtaaaataatgaacatatctccttctctaaacgatggagatatcgaagcaacagctaccttcttaaaacaataagatagttaatgaaaaaagaagagccctctataagaattatcgtattccttttaactgcttggctaatcatatttactgtactattaatttcattagcattctaaatattagtcatcttaatttttactactaatcttgtatatgagaagttatgattttttgaatattcttaaaactgcaaaataatatactatcggggcaactagccaaatgagttgaggaagaattgtcaaattgtttccattaattgttataaaaactgggttataccagttttctaaaaaaacccataattttccactgcaatttaaatcaactagaaattctgagatacttccccatataatcattattaaaagtgcattactgttaaaggtataaagatagctatcactttttagaatggtattacataaaaaaataccaattagaaaaatgagactgtctaaaaaagcataattaatattgcgaactaagggaagatcaataggccaatctactaaaattaaatggaatgaatctcctgccaatgcaaaagggatttcccaagttaatccaacacatattccaataataaataatgtgataatttttttggatacatatcccattttatacaacaaaaaaaagatgataggagaagatgaaccaataataaaagcggtccacatgatttgattagcagnaagtgaaatcatttattctttaatgatagttgtgcctgcttttccttcaattgctttttgaatattngcaatatt

SEQ ID NO: 1056 - DNA, 4000 bp, Escherichia coli
  misc_feature (1)..(4): n is a, c, g, or t
  misc_feature (6)..(7): n is a, c, g, or t
  misc_feature (9)..(9): n is a, c, g, or t
  misc_feature (11)..(11): n is a, c, g, or t
  misc_feature (13)..(14): n is a, c, g, or t
  misc_feature (16)..(18): n is a, c, g, or t
  misc_feature (20)..(21): n is a, c, g, or t
  misc_feature (24)..(27): n is a, c, g, or t
  misc_feature (30)..(33): n is a, c, g, or t
  misc_feature (35)..(36): n is a, c, g, or t
  misc_feature (38)..(41): n is a, c, g, or t
  misc_feature (43)..(43): n is a, c, g, or t
  misc_feature (47)..(52): n is a, c, g, or t
  misc_feature (54)..(59): n is a, c, g, or t
  misc_feature (61)..(65): n is a, c, g, or t
  misc_feature (67)..(70): n is a, c, g, or t
  misc_feature (72)..(73): n is a, c, g, or t
  misc_feature (76)..(81): n is a, c, g, or t
  misc_feature (83)..(85): n is a, c, g, or t
  misc_feature (87)..(87): n is a, c, g, or t
  misc_feature (89)..(90): n is a, c, g, or t
  misc_feature (92)..(92): n is a, c, g, or t
  misc_feature (94)..(99): n is a, c, g, or t
  misc_feature (101)..(101): n is a, c, g, or t
  misc_feature (103)..(107): n is a, c, g, or t
  misc_feature (109)..(110): n is a, c, g, or t
  misc_feature (112)..(113): n is a, c, g, or t
  misc_feature (115)..(118): n is a, c, g, or t
  misc_feature (121)..(122): n is a, c, g, or t
  misc_feature (125)..(129): n is a, c, g, or t
  misc_feature (131)..(131): n is a, c, g, or t
  misc_feature (133)..(142): n is a, c, g, or t
  misc_feature (144)..(148): n is a, c, g, or t
  misc_feature (150)..(164): n is a, c, g, or t
  misc_feature (166)..(167): n is a, c, g, or t
  misc_feature (171)..(171): n is a, c, g, or t
  misc_feature (173)..(173): n is a, c, g, or t
  misc_feature (175)..(178): n is a, c, g, or t
  misc_feature (180)..(181): n is a, c, g, or t
  misc_feature (183)..(184): n is a, c, g, or t
  misc_feature (186)..(191): n is a, c, g, or t
  misc_feature (193)..(199): n is a, c, g, or t
  misc_feature (201)..(216): n is a, c, g, or t
  misc_feature (218)..(219): n is a, c, g, or t
  misc_feature (221)..(222): n is a, c, g, or t
  misc_feature (225)..(228): n is a, c, g, or t
  misc_feature (230)..(234): n is a, c, g, or t
  misc_feature (236)..(236): n is a, c, g, or t
  misc_feature (238)..(239): n is a, c, g, or t
  misc_feature (241)..(243): n is a, c, g, or t
  misc_feature (247)..(247): n is a, c, g, or t
  misc_feature (249)..(255): n is a, c, g, or t
  misc_feature (258)..(258): n is a, c, g, or t
  misc_feature (261)..(263): n is a, c, g, or t
  misc_feature (265)..(265): n is a, c, g, or t
  misc_feature (267)..(271): n is a, c, g, or t
  misc_feature (273)..(276): n is a, c, g, or t
  misc_feature (278)..(279): n is a, c, g, or t
  misc_feature (281)..(282): n is a, c, g, or t
  misc_feature (285)..(286): n is a, c, g, or t
  misc_feature (288)..(290): n is a, c, g, or t
  misc_feature (292)..(296): n is a, c, g, or t
  misc_feature (298)..(300): n is a, c, g, or t
  misc_feature (302)..(303): n is a, c, g, or t
  misc_feature (305)..(305): n is a, c, g, or t
  misc_feature (307)..(308): n is a, c, g, or t
  misc_feature (310)..(314): n is a, c, g, or t
  misc_feature (317)..(319): n is a, c, g, or t
  misc_feature (321)..(321): n is a, c, g, or t
  misc_feature (323)..(324): n is a, c, g, or t
  misc_feature (326)..(330): n is a, c, g, or t
  misc_feature (332)..(336): n is a, c, g, or t
  misc_feature (338)..(338): n is a, c, g, or t
  misc_feature (340)..(342): n is a, c, g, or t
  misc_feature (344)..(346): n is a, c, g, or t
  misc_feature (348)..(348): n is a, c, g, or t
  misc_feature (350)..(350): n is a, c, g, or t
  misc_feature (353)..(353): n is a, c, g, or t
  misc_feature (355)..(357): n is a, c, g, or t
  misc_feature (359)..(365): n is a, c, g, or t
  misc_feature (367)..(367): n is a, c, g, or t
  misc_feature (370)..(372): n is a, c, g, or t
  misc_feature (374)..(374): n is a, c, g, or t
  misc_feature (376)..(380): n is a, c, g, or t
  misc_feature (383)..(383): n is a, c, g, or t
  misc_feature (386)..(386): n is a, c, g, or t
  misc_feature (388)..(388): n is a, c, g, or t
  misc_feature (390)..(390): n is a, c, g, or t
  misc_feature (392)..(392): n is a, c, g, or t
  misc_feature (395)..(398): n is a, c, g, or t
  misc_feature (400)..(400): n is a, c, g, or t
  misc_feature (402)..(404): n is a, c, g, or t
  misc_feature (406)..(408): n is a, c, g, or t
  misc_feature (410)..(410): n is a, c, g, or t
  misc_feature (412)..(412): n is a, c, g, or t
  misc_feature (415)..(417): n is a, c, g, or t
  misc_feature (421)..(421): n is a, c, g, or t
  misc_feature (423)..(429): n is a, c, g, or t
  misc_feature (431)..(434): n is a, c, g, or t
  misc_feature (436)..(440): n is a, c, g, or t
  misc_feature (445)..(461): n is a, c, g, or t
  misc_feature (463)..(464): n is a, c, g, or t
  misc_feature (466)..(467): n is a, c, g, or t
  misc_feature (472)..(473): n is a, c, g, or t
  misc_feature (476)..(478): n is a, c, g, or t
  misc_feature (480)..(482): n is a, c, g, or t
  misc_feature (484)..(484): n is a, c, g, or t
  misc_feature (486)..(487): n is a, c, g, or t
  misc_feature (489)..(491): n is a, c, g, or t
  misc_feature (493)..(493): n is a, c, g, or t
  misc_feature (495)..(497): n is a, c, g, or t
  misc_feature (499)..(499): n is a, c, g, or t
  misc_feature (501)..(503): n is a, c, g, or t
  misc_feature (507)..(508): n is a, c, g, or t
  misc_feature (510)..(510): n is a, c, g, or t
  misc_feature (512)..(512): n is a, c, g, or t
  misc_feature (514)..(521): n is a, c, g, or t
  misc_feature (525)..(527): n is a, c, g, or t
  misc_feature (529)..(529): n is a, c, g, or t
  misc_feature (531)..(532): n is a, c, g, or t
  misc_feature (534)..(536): n is a, c, g, or t
  misc_feature (538)..(541): n is a, c, g, or t
  misc_feature (543)..(545): n is a, c, g, or t
  misc_feature (547)..(547): n is a, c, g, or t
  misc_feature (549)..(549): n is a, c, g, or t
  misc_feature (552)..(557): n is a, c, g, or t
  misc_feature (559)..(561): n is a, c, g, or t
  misc_feature (564)..(567): n is a, c, g, or t
  misc_feature (569)..(569): n is a, c, g, or t
  misc_feature (572)..(573): n is a, c, g, or t
  misc_feature (578)..(578): n is a, c, g, or t
  misc_feature (580)..(580): n is a, c, g, or t
  misc_feature (582)..(583): n is a, c, g, or t
  misc_feature (585)..(586): n is a, c, g, or t
  misc_feature (588)..(590): n is a, c, g, or t
  misc_feature (592)..(593): n is a, c, g, or t
  misc_feature (595)..(599): n is a, c, g, or t
  misc_feature (601)..(601): n is a, c, g, or t
  misc_feature (603)..(603): n is a, c, g, or t
  misc_feature (605)..(605): n is a, c, g, or t
  misc_feature (607)..(609): n is a, c, g, or t
  misc_feature (611)..(616): n is a, c, g, or t
  misc_feature (618)..(623): n is a, c, g, or t
  misc_feature (626)..(628): n is a, c, g, or t
  misc_feature (630)..(630): n is a, c, g, or t
  misc_feature (632)..(632): n is a, c, g, or t
  misc_feature (634)..(634): n is a, c, g, or t
  misc_feature (636)..(639): n is a, c, g, or t
  misc_feature (642)..(644): n is a, c, g, or t
  misc_feature (646)..(646): n is a, c, g, or t
  misc_feature (648)..(652): n is a, c, g, or t
  misc_feature (654)..(655): n is a, c, g, or t
  misc_feature (657)..(660): n is a, c, g, or t
  misc_feature (663)..(663): n is a, c, g, or t
  misc_feature (666)..(667): n is a, c, g, or t
  misc_feature (669)..(670): n is a, c, g, or t
  misc_feature (672)..(674): n is a, c, g, or t
  misc_feature (677)..(677): n is a, c, g, or t
  misc_feature (679)..(680): n is a, c, g, or t
  misc_feature (682)..(682): n is a, c, g, or t
  misc_feature (684)..(686): n is a, c, g, or t
  misc_feature (689)..(691): n is a, c, g, or t
  misc_feature (693)..(695): n is a, c, g, or t
  misc_feature (697)..(698): n is a, c, g, or t
  misc_feature (702)..(704): n is a, c, g, or t
  misc_feature (706)..(714): n is a, c, g, or t
  misc_feature (716)..(717): n is a, c, g, or t
  misc_feature (721)..(725): n is a, c, g, or t
  misc_feature (729)..(735): n is a, c, g, or t
  misc_feature (737)..(738): n is a, c, g, or t
  misc_feature (740)..(742): n is a, c, g, or t
  misc_feature (744)..(744): n is a, c, g, or t
  misc_feature (748)..(749): n is a, c, g, or t
  misc_feature (752)..(752): n is a, c, g, or t
  misc_feature (756)..(759): n is a, c, g, or t
  misc_feature (762)..(764): n is a, c, g, or t
  misc_feature (770)..(779): n is a, c, g, or t
  misc_feature (782)..(786): n is a, c, g, or t
  misc_feature (788)..(792): n is a, c, g, or t
  misc_feature (794)..(795): n is a, c, g, or t
  misc_feature (798)..(799): n is a, c, g, or t
  misc_feature (804)..(805): n is a, c, g, or t
  misc_feature (807)..(808): n is a, c, g, or t
  misc_feature (812)..(815): n is a, c, g, or t
  misc_feature (817)..(817): n is a, c, g, or t
  misc_feature (819)..(820): n is a, c, g, or t
  misc_feature (824)..(835): n is a, c, g, or t
  misc_feature (837)..(839): n is a, c, g, or t
  misc_feature (841)..(845): n is a, c, g, or t
  misc_feature (847)..(847): n is a, c, g, or t
  misc_feature (849)..(849): n is a, c, g, or t
  misc_feature (853)..(859): n is a, c, g, or t
  misc_feature (862)..(866): n is a, c, g, or t
  misc_feature (868)..(868): n is a, c, g, or t
  misc_feature (871)..(871): n is a, c, g, or t
  misc_feature (874)..(874): n is a, c, g, or t
  misc_feature (876)..(876): n is a, c, g, or t
  misc_feature (879)..(896): n is a, c, g, or t
  misc_feature (898)..(901): n is a, c, g, or t
  misc_feature (903)..(903): n is a, c, g, or t
  misc_feature (905)..(905): n is a, c, g, or t
  misc_feature (907)..(907): n is a, c, g, or t
  misc_feature (909)..(913): n is a, c, g, or t
  misc_feature (917)..(918): n is a, c, g, or t
  misc_feature (920)..(920): n is a, c, g, or t
  misc_feature (922)..(922): n is a, c, g, or t
  misc_feature (926)..(927): n is a, c, g, or t
  misc_feature (929)..(934): n is a, c, g, or t
  misc_feature (937)..(937): n is a, c, g, or t
  misc_feature (940)..(947): n is a, c, g, or t
  misc_feature (949)..(949): n is a, c, g, or t
  misc_feature (954)..(959): n is a, c, g, or t
  misc_feature (961)..(961): n is a, c, g, or t
  misc_feature (964)..(964): n is a, c, g, or t
  misc_feature (966)..(966): n is a, c, g, or t
  misc_feature (971)..(971): n is a, c, g, or t
  misc_feature (973)..(977): n is a, c, g, or t
  misc_feature (979)..(980): n is a, c, g, or t
  misc_feature (984)..(984): n is a, c, g, or t
  misc_feature (987)..(987): n is a, c, g, or t
  misc_feature (994)..(994): n is a, c, g, or t
  misc_feature (996)..(1001): n is a, c, g, or t
  misc_feature (1004)..(1006): n is a, c, g, or t
  misc_feature (1008)..(1008): n is a, c, g, or t
  misc_feature (1012)..(1013): n is a, c, g, or t
  misc_feature (1016)..(1020): n is a, c, g, or t
  misc_feature (1023)..(1025): n is a, c, g, or t
  misc_feature (1027)..(1028): n is a, c, g, or t
  misc_feature (1030)..(1031): n is a, c, g, or t
  misc_feature (1033)..(1033): n is a, c, g, or t
  misc_feature (1035)..(1037): n is a, c, g, or t
  misc_feature (1039)..(1040): n is a, c, g, or t
  misc_feature (1044)..(1045): n is a, c, g, or t
  misc_feature (1047)..(1048): n is a, c, g, or t
  misc_feature (1050)..(1052): n is a, c, g, or t
  misc_feature (1055)..(1057): n is a, c, g, or t
  misc_feature (1059)..(1061): n is a, c, g, or t
  misc_feature (1063)..(1063): n is a, c, g, or t
  misc_feature (1065)..(1065): n is a, c, g, or t
  misc_feature (1067)..(1067): n is a, c, g, or t
  misc_feature (1069)..(1069): n is a, c, g, or t
  misc_feature (1071)..(1073): n is a, c, g, or t
  misc_feature (1078)..(1080): n is a, c, g, or t
  misc_feature (1082)..(1084): n is a, c, g, or t
  misc_feature (1086)..(1087): n is a, c, g, or t
  misc_feature (1089)..(1092): n is a, c, g, or t
  misc_feature (1094)..(1094): n is a, c, g, or t
  misc_feature (1096)..(1096): n is a, c, g, or t
  misc_feature (1099)..(1100): n is a, c, g, or t
  misc_feature (1102)..(1107): n is a, c, g, or t
  misc_feature (1110)..(1111): n is a, c, g, or t
  misc_feature (1113)..(1116): n is a, c, g, or t
  misc_feature (1119)..(1119): n is a, c, g, or t
  misc_feature (1122)..(1124): n is a, c, g, or t
  misc_feature (1126)..(1127): n is a, c, g, or t
  misc_feature (1130)..(1137): n is a, c, g, or t
  misc_feature (1139)..(1144): n is a, c, g, or t
  misc_feature (1146)..(1147): n is a, c, g, or t
  misc_feature (1149)..(1150): n is a, c, g, or t
  misc_feature (1152)..(1153): n is a, c, g, or t
  misc_feature (1155)..(1155): n is a, c, g, or t
  misc_feature (1159)..(1161): n is a, c, g, or t
  misc_feature (1163)..(1163): n is a, c, g, or t
  misc_feature (1166)..(1166): n is a, c, g, or t
  misc_feature (1169)..(1169): n is a, c, g, or t
  misc_feature (1171)..(1174): n is a, c, g, or t
  misc_feature (1177)..(1177): n is a, c, g, or t
  misc_feature (1183)..(1183): n is a, c, g, or t
  misc_feature (1185)..(1189): n is a, c, g, or t
  misc_feature (1191)..(1193): n is a, c, g, or t
  misc_feature (1196)..(1197): n is a, c, g, or t
  misc_feature (1202)..(1204): n is a, c, g, or t
  misc_feature (1206)..(1207): n is a, c, g, or t
  misc_feature (1209)..(1210): n is a, c, g, or t
  misc_feature (1212)..(1213): n is a, c, g, or t
  misc_feature (1215)..(1216): n is a, c, g, or t
  misc_feature (1218)..(1219): n is a, c, g, or t
  misc_feature (1221)..(1223): n is a, c, g, or t
  misc_feature (1225)..(1228): n is a, c, g, or t
  misc_feature (1230)..(1231): n is a, c, g, or t
  misc_feature (1237)..(1237): n is a, c, g, or t
  misc_feature (1239)..(1240): n is a, c, g, or t
  misc_feature (1242)..(1243): n is a, c, g, or t
  misc_feature (1245)..(1246): n is a, c, g, or t
  misc_feature (1248)..(1248): n is a, c, g, or t
  misc_feature (1250)..(1250): n is a, c, g, or t
  misc_feature (1253)..(1255): n is a, c, g, or t
  misc_feature (1257)..(1261): n is a, c, g, or t
  misc_feature (1263)..(1270): n is a, c, g, or t
  misc_feature (1272)..(1273): n is a, c, g, or t
  misc_feature (1276)..(1276): n is a, c, g, or t
  misc_feature (1278)..(1279): n is a, c, g, or t
  misc_feature (1281)..(1283): n is a, c, g, or t
  misc_feature (1286)..(1287): n is a, c, g, or t
  misc_feature (1290)..(1290): n is a, c, g, or t
  misc_feature (1294)..(1294): n is a, c, g, or t
  misc_feature (1296)..(1298): n is a, c, g, or t
  misc_feature (1301)..(1302): n is a, c, g, or t
  misc_feature (1304)..(1304): n is a, c, g, or t
  misc_feature (1307)..(1310): n is a, c, g, or t
  misc_feature (1312)..(1312): n is a, c, g, or t
  misc_feature (1314)..(1314): n is a, c, g, or t
  misc_feature (1316)..(1316): n is a, c, g, or t
  misc_feature (1320)..(1321): n is a, c, g, or t
  misc_feature (1323)..(1323): n is a, c, g, or t
  misc_feature (1327)..(1328): n is a, c, g, or t
  misc_feature (1331)..(1331): n is a, c, g, or t
  misc_feature (1334)..(1340): n is a, c, g, or t
  misc_feature (1342)..(1343): n is a, c, g, or t
  misc_feature (1345)..(1347): n is a, c, g, or t
  misc_feature (1351)..(1352): n is a, c, g, or t
  misc_feature (1354)..(1357): n is a, c, g, or t
  misc_feature (1360)..(1360): n is a, c, g, or t
  misc_feature (1362)..(1369): n is a, c, g, or t
  misc_feature (1371)..(1377): n is a, c, g, or t
  misc_feature (1379)..(1381): n is a, c, g, or t
  misc_feature (1383)..(1383): n is a, c, g, or t
  misc_feature (1385)..(1385): n is a, c, g, or t
  misc_feature (1387)..(1387): n is a, c, g, or t
  misc_feature (1389)..(1389): n is a, c, g, or t
  misc_feature (1392)..(1394): n is a, c, g, or t
  misc_feature (1396)..(1398): n is a, c, g, or t
  misc_feature (1400)..(1400): n is a, c, g, or t
  misc_feature (1403)..(1405): n is a, c, g, or t
  misc_feature (1407)..(1409): n is a, c, g, or t
  misc_feature (1411)..(1411): n is a, c, g, or t
  misc_feature (1413)..(1431): n is a, c, g, or t
  misc_feature (1433)..(1434): n is a, c, g, or t
  misc_feature (1436)..(1437): n is a, c, g, or t
  misc_feature (1439)..(1442): n is a, c, g, or t
  misc_feature (1444)..(1447): n is a, c, g, or t
  misc_feature (1452)..(1457): n is a, c, g, or t
  misc_feature (1459)..(1459): n is a, c, g, or t
  misc_feature (1463)..(1463): n is a, c, g, or t
  misc_feature (1467)..(1468): n is a, c, g, or t
  misc_feature (1474)..(1474): n is a, c, g, or t
  misc_feature (1477)..(1478): n is a, c, g, or t
  misc_feature (1480)..(1481): n is a, c, g, or t
  misc_feature (1484)..(1484): n is a, c, g, or t
  misc_feature (1486)..(1487): n is a, c, g, or t
  misc_feature (1489)..(1489): n is a, c, g, or t
  misc_feature (1995)..(1995): n is a, c, g, or t
nnnntnntnantnntnnnannaannnnaannnntnntnnnnantttnnnnnntnnnnnntnnnnntnnnnannaannnnnntnnnantnntnannnnnntnannnnntnnannannnnaannaannnnntnannnnnnnnnnannnnntnnnnnnnnnnnnnnngnnaaancnannnnannannannnnnnannnnnnnannnnnnnnnnnnnnnnannannttnnnntnnnnnantnnannntttncnnnnnnnttnaannnangnnnnnannnncnnannaannannnannnnnannnanncnannannnnnaannnancnnannnnntnnnnnantnnntnnnancnaantnnncnnnnnnntnccnnntnannnnnaanttnantnanttnnnntnannnannnantnaannntttnannnnnnntnnnntnnnnnaaaannnnnnnnnnnnnnnnncnncnnttttnnttnnnannnantnntnnntnannntngnnntttnnantnannnnnnnnaaannntnannannntnnnnannntncnaannnnnngnnnttnnnntnaannttttnantnnanntnnntnntnnnnntnancntnnntnnnnnntnnnnnnaannntngnantnnnnaannnantnnnnnannannnnccnaanncnntnnnttngnnantnnnaannnannngnntttnnngnnnnnnnnnannaaannnnntttnnnnnnnannannntnaaannaantttnnnnaannntttttnnnnnnnnnnttnnnnntnnnnntnnttnnttttnncnnaaannnnantnnaaannnnnnnnnnnntnnngnnnnnantnaaannnnnnnttnnnnntnggnttnanttnnnnnnnnnnnnnnnnnnannnnantncntnnnnnaaannangnaaannannnnnnaanttnnnnnnnnanttttnnnnnnanttnanttttnannnnntnntttnaanttttttnannnnnnaannnantttnnttnnnnnaannncnntnntnannnanngggnnannannnaannntnnngncnangntnnnttttnnnannntnntnnnntnanttnntnnnnnnaanntnnnnaanttnnncnnaannnnnnnnannnnnntnnannannantttnnngnaanttnannnnaantttttnannnnnannnggnnttttnnntnntnntnntnntnntnnntnnnntnntttttnanntnntnntngnaannntnnnnnannnnnnnntnnaantnntnnnaannaantttnannnttnntnaannnntnantnaaannantttnnaanttnnnnnnntnntnnntttnncnnnnaantnnnnnnnntnnnnnnnannngntngnanttnnncnnncnttnnntnnntnannnnnnnnnnnnnnnnnnncnntnntnnnntnnnnttttnnnnnntnaaantttnntttttnaannannaantnntnaaaaaaaaaattagaatattgataaattatttatttaaattttttatagattaatttattttattgacatatcacttaatacaaagtaaaataaaatattggaaattattctttccttaaataataatacatattttattaaattattattctttattttttattttatttcattttatttttttcatttcatttcattttatttcattttattttatttattttttttttattattattatttttcccttcgacttgaatttgtattaattttttttcataaaaggatttagtttaatttataattttcatgttttaacattcattttcaatccatttttaaaattattatatatctatttgaatttgccatgttaatttattacttatatagaatatattcaaaatccttacgttaaaaattaaaaagatttccttctatttatttattaatttcaataaattatttattgacaataatttatttttttttttagtttgtaatnattaaaaaaaaaaaaaaaatttttttttacttaaaacaataaaaaataatatttacattataatctaatatatttattcatttactatatatataaatgatatatataattgtagtgtaactatacatttaattttttattattataatctgattatggttggactttattaagccaatcattttgcttaaatctttttttatttaaaattttaataaaatatgtatacattaaattacattttatgtatacagattttaatatgttatattttatattatattataaaaagttaataataataataaaataataataaaaattataaaaaataaaaaaaaaaataataattagaatttaatattagtacgtatgatatttgaataatctttataaaatattaagtatataaataatatagaagcttatcttaaaaatgataaagaagaggtcatgaaatattttgtaatagacatagatggtgatattaaactaattatcatgaataaactttatgagatacttcaattcaataaaaggaagattaatagaaatgtcaaactctttaatgcaaggcgtgcaggtatattaataggagatgaacttttagaatttcacaactatagttatcatcgaaggacatgtgataaggacttagaaccgagttggaactttaatcttcttggaaacgaatataatagtgtaacagataaaactgcagatgatgttgtaagatttatagaagaattagcaggctattataaggacaatccggaatatgaagctaatttatgctttacggaagaatgtgataattttcatttcttttgtcacaattatcatgatttcgtttgttatataaaccctaagatagacgaagtttttctctaaaaaaatggaaaagtatttgtagtaatgcttttcgcatctattgatggaagtattattaaaggatgggcagatactttagcagttaacaatataacatttaatgaaatgatagagtgaacggcagactcaattgttgaagcatatgaatgttcaattaaaaataatctaaagaaaattaagagaaaccttgagaatgcggtatatgaagttacttgctttggtaaacctgtaatttatgctgttttagataatgtatttgaaagtaatgatttacaaattagtaattaggagaaaaaactatacaataaataatctttacaatagtatcgatgattatacggaaaatcattaccattattatgaaagtcaatgttataacgaactaaatgatgattaatattatagtaataatgaagaagataacgatgattcagatggaattgttaaacccttacatgttcctctcttaaatttttcattatgttagcatctatcatgattttacaacctcatattatattttagaatttttaatatttattgaatataaagaattatttcatatgtcacttcataaaatatccatttaaattactatatatttaattctatactcaaaactattaatatttgtggatagagaaaagaaaagaaacatagaatttgtaaatatcatgtattaatatatataataatatatatcctacttaaagaggttaatcacacacgcacacgttacatctacttatatttcaaaataatagtagaatataaaacattaatttatagttaacttagaattaatatataataaattacttataaatgaaaaaaattattattaatttaaggttaattattttcccaaaaatattgcacaaatatataatatattattaaacagtgaaacacacacatatacttaattttatccgaagatactgaatagttactgcttaactagaaagcggatattcaaaggaggatgtcacaaaatactaattaacattagaataagtacatatacataaattaaatagagatgcttagaatgaaatgagcatattctacaattttaaaaagaaggacgtcatatttatgaaagaaatgctta

SEQ ID NO: 1057 - DNA, 4000 bp, Escherichia coli
  misc_feature (278)..(278): n is a, c, g, or t
  misc_feature (426)..(426): n is a, c, g, or t
  misc_feature (429)..(429): n is a, c, g, or t
  misc_feature (3452)..(3452): n is a, c, g, or t
  misc_feature (3578)..(3578): n is a, c, g, or t
  misc_feature (3581)..(3581): n is a, c, g, or t
  misc_feature (3590)..(3590): n is a, c, g, or t
  misc_feature (3593)..(3593): n is a, c, g, or t
  misc_feature (3596)..(3596): n is a, c, g, or t
  misc_feature (3599)..(3599): n is a, c, g, or t
  misc_feature (3602)..(3602): n is a, c, g, or t
  misc_feature (3611)..(3611): n is a, c, g, or t
  misc_feature (3620)..(3620): n is a, c, g, or t
  misc_feature (3623)..(3623): n is a, c, g, or t
  misc_feature (3627)..(3629): n is a, c, g, or t
  misc_feature (3631)..(3632): n is a, c, g, or t
  misc_feature (3639)..(3640): n is a, c, g, or t
  misc_feature (3642)..(3642): n is a, c, g, or t
  misc_feature (3645)..(3648): n is a, c, g, or t
  misc_feature (3650)..(3662): n is a, c, g, or t
  misc_feature (3664)..(3666): n is a, c, g, or t
  misc_feature (3670)..(3672): n is a, c, g, or t
  misc_feature (3674)..(3678): n is a, c, g, or t
  misc_feature (3681)..(3682): n is a, c, g, or t
  misc_feature (3684)..(3685): n is a, c, g, or t
  misc_feature (3687)..(3691): n is a, c, g, or t
  misc_feature (3693)..(3703): n is a, c, g, or t
  misc_feature (3705)..(3705): n is a, c, g, or t
  misc_feature (3707)..(3714): n is a, c, g, or t
  misc_feature (3716)..(3719): n is a, c, g, or t
  misc_feature (3722)..(3729): n is a, c, g, or t
  misc_feature (3731)..(3733): n is a, c, g, or t
  misc_feature (3736)..(3736): n is a, c, g, or t
  misc_feature (3738)..(3742): n is a, c, g, or t
  misc_feature (3744)..(3751): n is a, c, g, or t
  misc_feature (3753)..(3753): n is a, c, g, or t
  misc_feature (3755)..(3761): n is a, c, g, or t
  misc_feature (3763)..(3764): n is a, c, g, or t
  misc_feature (3766)..(3768): n is a, c, g, or t
  misc_feature (3770)..(3770): n is a, c, g, or t
  misc_feature (3773)..(3777): n is a, c, g, or t
  misc_feature (3779)..(3780): n is a, c, g, or t
  misc_feature (3782)..(3782): n is a, c, g, or t
  misc_feature (3784)..(3787): n is a, c, g, or t
  misc_feature (3789)..(3796): n is a, c, g, or t
  misc_feature (3800)..(3800): n is a, c, g, or t
  misc_feature (3803)..(3808): n is a, c, g, or t
  misc_feature (3810)..(3811): n is a, c, g, or t
  misc_feature (3815)..(3820): n is a, c, g, or t
  misc_feature (3822)..(3822): n is a, c, g, or t
  misc_feature (3824)..(3829): n is a, c, g, or t
  misc_feature (3831)..(3842): n is a, c, g, or t
  misc_feature (3844)..(3850): n is a, c, g, or t
  misc_feature (3852)..(3853): n is a, c, g, or t
  misc_feature (3856)..(3864): n is a, c, g, or t
  misc_feature (3867)..(3867): n is a, c, g, or t
  misc_feature (3870)..(3874): n is a, c, g, or t
  misc_feature (3876)..(3880): n is a, c, g, or t
  misc_feature (3882)..(3892): n is a, c, g, or t
  misc_feature (3896)..(3898): n is a, c, g, or t
  misc_feature (3900)..(3901): n is a, c, g, or t
  misc_feature (3903)..(3910): n is a, c, g, or t
  misc_feature (3912)..(3913): n is a, c, g, or t
  misc_feature (3915)..(3915): n is a, c, g, or t
  misc_feature (3917)..(3922): n is a, c, g, or t
  misc_feature (3925)..(3926): n is a, c, g, or t
  misc_feature (3929)..(3930): n is a, c, g, or t
  misc_feature (3932)..(3932): n is a, c, g, or t
  misc_feature (3935)..(3935): n is a, c, g, or t
  misc_feature (3937)..(3939): n is a, c, g, or t
  misc_feature (3941)..(3942): n is a, c, g, or t
  misc_feature (3944)..(3944): n is a, c, g, or t
  misc_feature (3946)..(3949): n is a, c, g, or t
  misc_feature (3952)..(3952): n is a, c, g, or t
  misc_feature (3954)..(3956): n is a, c, g, or t
  misc_feature (3958)..(3967): n is a, c, g, or t
  misc_feature (3969)..(3976): n is a, c, g, or t
  misc_feature (3979)..(3987): n is a, c, g, or t
  misc_feature (3989)..(3990): n is a, c, g, or t
  misc_feature (3992)..(3993): n is a, c, g, or t
  misc_feature (3995)..(3997): n is a, c, g, or t
  misc_feature (4000)..(4000): n is a, c, g, or t
tagtatttaaccgcaccaacaacgactagcatctcattgggagatagcgcttttgcgtttagcgttattgataataataaaattgtcagtattttgttcatggtgcacattataccacaatctatattataaatcaataatatagatttgacacacagttaattgctgtagtggcataggtaattaacactaacatcgtcttctaatttatagactttggtgaatggattgtaggtcattccaatcatgccttttagggttaatgctgagtttctagnccactcatccatctcactaggctggatgaatttatcccaatcatgagtcccttgaggcaggagtttgagaacatattctgcaccaacaatagcaaataagtaagattttggattgcggttaatggtggagaaaaacacctggccaccnggntttactagcttggcacaagctttaataatagagcttggatcaggcacgtgttctaacatttcaaggcaggtgactacgtcaaatttaccagcatgtttttcggcaaactcttctacagggattttttgataatccacatcaaggcctgattcaagcaggtgtaatttagcgacttcgagcccagcttccgccatatcaataccagtgactttggcgccttcagccgccatagactcacttaagataccaccaccacagccaacatctaaaacagctttgtcttttaatgagccattacagcgctctttaatataatttagacgaagagggttgatgtcatgtaatggcttgaactcagagtttttgtcccaccagcgtgaagccagctgggcaaacttatcaacttcgtcaaaatctacattactcatagtgcttgtactacagctaatacttcatcaacatgaccaccaacggcaaccttgtcccaagatttaaggatatcaccatcagggctaataatgaaagttgagcgaacaatacccattttttcttcaccatttcttttcttgagttgccaagcgccaaatgcttcacatagtgtgccatcttcgtcagcaattaattcaaatgggaatgattgatttgctttaaatttttcatggcttgccatgtcgtctttcgagacaccatagataacagtattggcgtcaatgaacgcttggtagttatctctaaaatcttgaccttcaagcgtacaacctgatgttgcatctttagggtagaaatacagaacaatattgcgcccctgatcatcagggatattggcgcttaaattgcttgttgctttgcagctggttgtttgaactttactcataacgatcaatgtttaatttattaaataaagggtttattttatcatagagactgaacggcttctaagacctcgttaacatggtttttaactctaactttatcccaagattttaagatatcaccattagggctaataataaaagttgagcgtacgatacccatgtattctctacccataaatttttttaactgccatacaccaaatacttcacacagcttgccatcttcatcagaaatcagttcaaacggaaacgcttgcttagctttaaatctttcatgctttttcatgtcgtctttcgagacgccatagacaactgagtttgcatcaacaaatgcttgatgattgcctctaaaatcttgcccttctgtggtgcagcccggggttgcgtctttagggtagaagtacagaacaatattacgtccttttgtgtctggaatactaacgtctaaattactagtcgcagtgcaggtaatgggttgaactttattcattgcttgtataatgtcgtgtttaaaatcttgattttatcactaccatgaagaacatccgtaatttttcaattattgcccatattgatcatggtaaatcaaccattgccgatcgatttattcagttttgtggtggtttgagtgatcgtgagatgtcatcccaagtgctagattcaatggatattgaaaaagagcgcggtatcactatcaaatcccaaagtgtgacattagattacaatgctaaaaatggtgaaacttaccagttaaattttatcgatacaccggggcacgtagatttctcttacgaagtctctcgctcactctcggcctgtgaaggtgctttgcttattgtagatgcctcccaaggggttgaggcgcaaacagtggctaattgttatactgcactcgatcaaggcttagaagtagtatcagtcttaaataaaattgacttgccagcagctgatcctgagcgagtcgtggatgaaattgaagatgttatcggtgttgaggcgcacgatgccgtgcatgctagtgcaaaatctggcattggaatcgaagacatattagagcaaattgttgagaaaatcccagcacccgaaggcaaggtcgatgcacctattaaagccttgattattgactcttggtttgacaattatctgggcgtggtgtcactggttcgtgtgattgatggtgagattaaagccaaaactaaaatcaaaatattctcaaatggtaatgaacatttggttgacgaagtgggtgtctttacgcccaaacgtaaaaaaactgaaagtttaaaagcaggcgaggttggcttcctaattgccagtattaagaatattgatggcgcgccagtaggtgatacgattaccagtgctaaaaatccagtaacagagcctttagaaggttttaagccggtacaaccaagagtatttgcaggcttatttccaatctctggtgaggattatgaaaaattccgtgatgcgttagcaaagttgcgtttgaacgatgcggcactacagtatgagcctgaaaactcggatgctctaggctttggtttccgtattggcttcttgggcttgttgcacatggagattgttcaggaacgcttagagcgtgaatacgaccttgatcttattaccacggcgcctaccgtaatttatgaaatcttagataccaaaggcaatattcatcatgtagacagcccttcaaaaatgcctgataatcaagcgattgcagaatttagagagccgattatcactgctaatattttagtaacggatgagtttgttggtgcggtaattagcctttgtgttgaaaaacgtggcatgcaaaaaagcctaacttacatgggtaggcaagtacagttagtttatgaattaccactgaatgaggtcgtgcttgatttcttcgacagactcaaatcagtgtcgcgaggctttgcttcgatggattatcagtttgaacgctatcaagaatccgacttgattcgcctagacattatgatcaatcaagagccagtggatgctttggcactcattattcaccgagaggattcagtgcgtaaaggcagagagattgccgagaaaatgaaagagctgattcctcgccaaatgtttgatgtggcgattcaggcctgtattggtgttaagattatttcncgtgccaatgtaaaagcactaagaaagaatgtaactgctaagtgttatggtggtgatgtttcacgtaagcgtaaactacttgataagcagaaaaaaggtaaaaaacgtatgcgtagtgttggtagngtngatataccncangangcnttnctagccgtnttgcatatngantaannnannagccttnncnaannnnannnnnnnnnnnnntnnnccannncnnnnntannanngnnnnntnnnnnnnnnnnantnnnnnnnntnnnncgnnnnnnnnannnatntnnnnnannnnnnnntntnnnnnnnannannnangcnnnnnannanannnntnnnnnnnnaatnagnnnnnncnnaaannnnnnancnnnnnngnnnnnnnnnnnngnnnnnnntnncgnnnnnnnnnaanaannnnntnnnnnannnnnnnnnnncaannntnncnnnnnnnncnnangnnnnnnctnnttnntnaancnnntnntntnnnnagnannnannnnnnnnnntnnnnnnnntannnnnnnnnanngnnannnagn

SEQ ID NO: 1058 - DNA, 4000 bp, Escherichia coli
  misc_feature (1688)..(1688): n is a, c, g, or t
  misc_feature (1991)..(1991): n is a, c, g, or t
  misc_feature (2006)..(2006): n is a, c, g, or t
  misc_feature (2024)..(2024): n is a, c, g, or t
  misc_feature (2039)..(2039): n is a, c, g, or t
  misc_feature (2525)..(2525): n is a, c, g, or t
  misc_feature (2677)..(2677): n is a, c, g, or t
  misc_feature (2683)..(2683): n is a, c, g, or t
  misc_feature (2717)..(2717): n is a, c, g, or t
  misc_feature (2721)..(2721): n is a, c, g, or t
  misc_feature (2725)..(2725): n is a, c, g, or t
  misc_feature (2878)..(2878): n is a, c, g, or t
  misc_feature (3244)..(3244): n is a, c, g, or t
  misc_feature (3328)..(3328): n is a, c, g, or t
  misc_feature (3471)..(3471): n is a, c, g, or t
  misc_feature (3736)..(3736): n is a, c, g, or t
  misc_feature (3739)..(3739): n is a, c, g, or t
  misc_feature (3763)..(3763): n is a, c, g, or t
  misc_feature (3805)..(3805): n is a, c, g, or t
  misc_feature (3826)..(3826): n is a, c, g, or t
  misc_feature (3874)..(3874): n is a, c, g, or t
agaaccaattgaaactgcatctgctccaagagccattgctttagcaacatctgcaccatttctaattccaccagatataattaactgaacttttctatgttggtctaaatcttgaagtgcatctacagcaggtctaatacatgctaaagttggttgacctacattttctataaatacttcttgagtagcagccgttccaccttgcattccatctaaaacaacaacatctgcaccagctttaacagcaagagcagtatcataatatggtcttgcccctgcaactttaataaatattggaactttccaacctgttatttctcttatttctaaaattttgatctttaaatcatcaggacctgtccagtcaggatgtctacatgcagacctttgatctatacccttaggtaaagttctcatttctgcaactcgatcactaattttttgacctaataacattcctccaccacctggttttgcaccttgacctataacaatttcaatggcgtctgcttttctaaggtcatcaggattcattccatatctagaaggtaaaagttgatagactaaatttttagactgacctctctcttctggtgtcattccaccatcaccagtagttgtagatgtaccagccatacttgccccacgccctaaagcttctttagctctccctgataatgcaccaaaactcattccagcaattgtaataggaatatctaactccaaaggtttttttgcataacgtgttcctaaagttacttttgtattacaggtttctctatatccttctaaaggatatctagacattgaagcaccgagaaaaagtaaatcatcaaagtgaggaagctttcttttagatcctccacctctaatatcataaattcctgttgctgctgctcttcttatttctgaatttgtatactcatcaaaagtccatgatatacgaggatgagtttttttattatctgacattattaatagcttgatacattatcgatgttaaagttatatagttttcgtgctgaaccatatctcttaaaactatctggtttaatattttttatttcacttttttttaaaagagctgaaattttatttaaatgcttcttttccatttttttttctatgcaatctgcacctaaagatttaactgatcctttgacaaaaatatcagtttcataaagactatcacccaaagcctcacctgcgtcaccacaaactaacatcgttccagattgagccataaatgcagacatgtgaccaacagaacctttaaccacgatatcaattcctttcattgaaataccacaccttgagctagcatctccatcaattacaagtaatccgccatgagcagttgcgccagcagattgtgaagcattacctttaacatgtactgttccagacatcatattttcagcaacacctgtaccaacatttccatctattgttacatgtgctttttggttcattcctgcacaataatagccaacatgacctttgattaaaactttcatttcctgatttaatccagcacataatgcatgacttccttcaggatttataatcacaaagtctctatcattttttttattatctaaattttgtaaagtattattaatttctcttaatttctttttttttaaatctaatttcattaattcccccacgagtaaacaatacctggntcaggttcaaaaatttttgcattatttacatctggtaaatgtgccatggcttgaaactctgatgctattgcaacatagttttttgtttctgctattaccgcaggtttacatgctatttcatctctaacaactgcaaagccctttctagttcctgtaataaatgtataaaaaccatctaaatctttaagacccgatgtaagcgtatcttttaaagatttattatttgataaactgttagaaacatatcctgctgcaacttcagtatcattttcagagttaaagacactaccttttttagtgagntctcttcttaaattnttatgatttgataatganccattatgaaccaancattcatcttcaccagtagagtaggggtgagatccatcagtagttattgcactttctgtagccattcttgtatgacctattccatgagtaccactaaaactatctaatttaaatttttttactacatctttaggattaccaacttgtttaaatatttctattgatcggccatacccaactatagatactttaggaaaattcgaattaattatctcaatcactttctttggctgctcaagagtttttagaattacatgatctgagatttgagtaagtttggcttttttaagttttttagatatttctttcttaaaactattaaagtttaaatcattaatacataaagaaaacttgtatagttttttactttcatctttataaatagcaaagccagcactgtctggtccacgagattccatattattaagcataccagatagcatctttcctaaatttttttcaaattttttattttttaagtagatnccaacaattccacacataaatttttttaagtttattttattaaagacagtagaaaatctttatagtagaaaatatttcctactacaatgatgataatagccgctatcactccatactttgcttttggaaaaacgacacctctcattttactnggtctnagatcttcgttattatttctatccatgattgtanaatntttntaaaaaaaaagggcgccacaattaagtagcgcccaaatttttaattgatattaccagtcggtaatattgctcttatgatcattagcgccatgtctctttcttgctaatcttgaaagtttttcactttcagatctagcagttaaaacatgccanccgatccaaaaaactacaccaagaaaaactagtaaagtttcagtggatccagcccccggataaactgctccgacaacctcttttgcacttaaatgatctatccagtttgtaactgtagccatattttttctcctttacctagttgaagaggcgaccgctttttcagcttctctatcgtcctccattatttcatagtctagtcctgctatttcaacttcacgcggtattcttaatttaccaaaagcgcttagtactctagcaataacgtaacctggtaacattccaagaactccgaacattataattgctccaaggaattgtcccagtggattgattgatgcataagttgatccgtcccacatagcnccaacactgtatccagatgaaggatagccatttaaaacaaatccacaaattacaagaccaacaaatcctgcgtaaccatgtacngctactgcaccaactgcatcatcaattttgaacttacgttcaacccagtaatgcattttgtatgctataacaacaccgatcgcaccaataagcattgcttgtatcgggtgatacaaatcattacctgcagatgcacagatgancccagctagtccacttgagtaagtccagaatggatcacctttagcgaccacgtatccagccaataatccacccgataatgacatcaggaagttataggttattccactcagggtggttggggttacatatatgtttgttgctgtccagtacgttacaccttccattccatactcaggtccaagatcaaatatcggtatattacatgccgcataaaatccccagaaaccagtatagattaaaaataatccaactgtaactagccanggntttcttggtcctatatttcttggntcaccacttgatgagaactttccaattctaggtcctaaaacnattagaacacctaaagcaaanccacccgcaattgcgtgaattactcctgatgcgtaagcgtcatgatancctaaaattttaagcatccatccatcaaagtgccatccccaagcagcatcaattacccagaagcacgaaccaattgcaattgctaaaataccaaatgcaaaagttgtaattctttcaatgattgct

SEQ ID NO: 1059 - DNA, 4000 bp, Escherichia coli
  misc_feature (672)..(672): n is a, c, g, or t
  misc_feature (708)..(708): n is a, c, g, or t
  misc_feature (990)..(990): n is a, c, g, or t
  misc_feature (1992)..(1992): n is a, c, g, or t
  misc_feature (2039)..(2039): n is a, c, g, or t
  misc_feature (2205)..(2205): n is a, c, g, or t
  misc_feature (2258)..(2258): n is a, c, g, or t
  misc_feature (2271)..(2271): n is a, c, g, or t
  misc_feature (2283)..(2283): n is a, c, g, or t
  misc_feature (2307)..(2307): n is a, c, g, or t
  misc_feature (2334)..(2334): n is a, c, g, or t
  misc_feature (2337)..(2337): n is a, c, g, or t
  misc_feature (2394)..(2394): n is a, c, g, or t
  misc_feature (2423)..(2427): n is a, c, g, or t
  misc_feature (2457)..(2457): n is a, c, g, or t
  misc_feature (2541)..(2541): n is a, c, g, or t
  misc_feature (2553)..(2553): n is a, c, g, or t
  misc_feature (2569)..(2569): n is a, c, g, or t
  misc_feature (2593)..(2593): n is a, c, g, or t
  misc_feature (2724)..(2724): n is a, c, g, or t
  misc_feature (2796)..(2796): n is a, c, g, or t
  misc_feature (2871)..(2871): n is a, c, g, or t
  misc_feature (2877)..(2877): n is a, c, g, or t
  misc_feature (2922)..(2922): n is a, c, g, or t
  misc_feature (2928)..(2928): n is a, c, g, or t
  misc_feature (2931)..(2931): n is a, c, g, or t
  misc_feature (2982)..(2982): n is a, c, g, or t
  misc_feature (2988)..(2988): n is a, c, g, or t
  misc_feature (2997)..(2997): n is a, c, g, or t
  misc_feature (3039)..(3039): n is a, c, g, or t
  misc_feature (3081)..(3081): n is a, c, g, or t
  misc_feature (3168)..(3168): n is a, c, g, or t
  misc_feature (3198)..(3198): n is a, c, g, or t
  misc_feature (3221)..(3221): n is a, c, g, or t
  misc_feature (3362)..(3362): n is a, c, g, or t
  misc_feature (3419)..(3419): n is a, c, g, or t
  misc_feature (3431)..(3431): n is a, c, g, or t
  misc_feature (3434)..(3434): n is a, c, g, or t
  misc_feature (3446)..(3446): n is a, c, g, or t
  misc_feature (3473)..(3473): n is a, c, g, or t
  misc_feature (3551)..(3551): n is a, c, g, or t
  misc_feature (3566)..(3566): n is a, c, g, or t
  misc_feature (3584)..(3584): n is a, c, g, or t
  misc_feature (3609)..(3610): n is a, c, g, or t
  misc_feature (3622)..(3622): n is a, c, g, or t
  misc_feature (3634)..(3634): n is a, c, g, or t
  misc_feature (3661)..(3667): n is a, c, g, or t
  misc_feature (3670)..(3670): n is a, c, g, or t
  misc_feature (3674)..(3676): n is a, c, g, or t
  misc_feature (3678)..(3678): n is a, c, g, or t
  misc_feature (3683)..(3685): n is a, c, g, or t
  misc_feature (3692)..(3697): n is a, c, g, or t
  misc_feature (3701)..(3705): n is a, c, g, or t
  misc_feature (3707)..(3707): n is a, c, g, or t
  misc_feature (3713)..(3721): n is a, c, g, or t
  misc_feature (3725)..(3725): n is a, c, g, or t
  misc_feature (3728)..(3729): n is a, c, g, or t
  misc_feature (3732)..(3732): n is a, c, g, or t
  misc_feature (3737)..(3739): n is a, c, g, or t
  misc_feature (3742)..(3743): n is a, c, g, or t
  misc_feature (3746)..(3746): n is a, c, g, or t
  misc_feature (3748)..(3748): n is a, c, g, or t
  misc_feature (3751)..(3786): n is a, c, g, or t
  misc_feature (3788)..(3794): n is a, c, g, or t
  misc_feature (3796)..(3825): n is a, c, g, or t
  misc_feature (3827)..(3830): n is a, c, g, or t
  misc_feature (3832)..(3838): n is a, c, g, or t
  misc_feature (3840)..(3842): n is a, c, g, or t
  misc_feature (3845)..(3847): n is a, c, g, or t
  misc_feature (3849)..(3896): n is a, c, g, or t
  misc_feature (3898)..(3908): n is a, c, g, or t
  misc_feature (3910)..(3918): n is a, c, g, or t
  misc_feature (3920)..(3922): n is a, c, g, or t
  misc_feature (3924)..(3927): n is a, c, g, or t
  misc_feature (3929)..(3941): n is a, c, g, or t
  misc_feature (3943)..(3943): n is a, c, g, or t
  misc_feature (3945)..(3946): n is a, c, g, or t
  misc_feature (3948)..(3981): n is a, c, g, or t
  misc_feature (3983)..(4000): n is a, c, g, or t
aaccactctgaaacaaagccatttactggaggtaaagctgcgatacccatgatacctataaacataccaaggcttgtccatggcatctttttagcaagaccaccaaggatgtccatattttgtgtatgagtagcgtggataactgaaccagcgcaaaggaaaagcagacctttaaatatagcgtggttaactacgtggtagcaacctgctagaaaacctactgctgcaagtgttaaatttccagctgcaacgccgtagataccagtaccaagacctagcaagatgatgcctatgttctcaactgagtggtaagcaagcaaagctttgaagtcgtgttggcaaagagcgtataaaacaccaaatagtgagctagctgcaccaagagcgagtattgtaagaccaaaatatgtgctaagtggtaggtaaagtgtaaatttaactagtgtaaatagagcaactttaatcataacgcctgacataagggctgaaacgtttgatggtgctgctgggtgagcttgtggaagccaaacgtggaatggccacataccagctttactaccaaagccgaccaagaatagtataaatacagcagcagaagcgccaaatggcatcttaacacccataaatgcgctaaattcaaagcttcctgcatagtaagctgtgataagcaanccacaggttatacaaaatgcaccgatttgtgcgatnccaagatataccataaccgctttaagtgtatttttaccgtcattgacgatgataagaaatgatgatacaagagtcataagctcccataaaacaacaaagcaaaatacattatcagcgctgattactagaagcattgaaaggatgaatgtgttaaacaaacatgcaaacacaccaacatttgctttttttatgtactcttctgcatagctcataccataaacactacttgcaaatccgatgaaaacaacgacaaagctgaagaaatttccaagtggatttagngcaaattttggcgaatacaaaaagccatccataagagcaaagctatcacttactcccatatttgcaacgaagtgacacatcgcataaaagcagcttatagcacttagtccaaaaccaactttaacagcggcttttggagcgcagtagagcaagatactaacgacggcacttacaagaaatagcatataaaccgtagtcatcttatgctccttgtccgtttaaaattttagtagcaaatttattcgctgcatcgtagtctatcctcttgccaagcttatgtttgccctcttctggatctaccattataagagcgcttgttgggcatacatcaacgcaagctggtccattttcacggccaaagcacatatcacattttactgcgatgttttttgcgcctgattgtgactctacttcaagatagtattttggctcgacagcgtaatttactgaaggcataagctctgcacttgagcttatcgcaccataagggcaagcgatcgtgcacatcttgcaacctatacaaatttcctcgtgaagctcgatgcaattatcgttaaatcgcaacgctccagttgggcatacatttgcgcaagggccatcgtcgcattgtctgcactgagtcggcataacaccgctagcttctcttaagacgcttagccttgcacgtgatagtttgccgcgttcataagcacttttaaaacatgcagccatacaggtcgcacatcctatgcagcgtttagaatcggcaatcacaaatttatgttttttcataaattcctcctaaaaaacaaggcaagaccgccctgctcactaatagagtgattgttaatcacatgaatagagatagttaaatttttatttaacatctcaaacgctccttcctgaaatttttgaaacaattctataacttctggcgattaaattccgtcagctatctgacaaattttgtatttttgaaattaaatttttattttatattagtttaagatatgctattaaacngcgttattatcgtgtgattaatcaaaaaagattaatatttcataacngataattagtaaaaagagtaaaattatcttaattaagtttaaatttaaaaattagttttttaagcttgggttaattaaatgaaactgaaatttaaaaatctaaaatataatccaacctttaaatttaaaagggttattgatggaaatttttatagtcatagttttntttatcgcttcagtttttgcttttatgaaatttgcccctgtttttggcggcanaccagatgccaanagccaaaagctnatagaggcttcgccaaattttaanggcaaagtttttataaatttagagccnacnattgatatggtaaagaaaaatccgcaagcgtctatgttaaattacgtccctcaagcnctctttccaccaaaaggcaagctaccaannnnncctttgccaaatttaaaatttgacgcaaangccctcaaaaatggcgagtttatctggcttgggcacgttagcctaatctgcaagcttgatggcaaaaccatcatcacagacccngttttgcaccgngcattccctctcccanttggcggcaagccctttgcctacnagcacgccatcaccgctagcgactacccagaggtgatcgacatcgccctcatctcgcacgaccactacgaccatcttgaccataaaacgatccttgagctaaaggataggatagccaaatttctagtgccncttggcgtcaaggctcacctcgtaaaatggggcgtggatgaaggcaaaatttacgagtttgactggtttaangagcaaaagataggaaatttaaacttcactttttgcccctcaaggcactttagcgggcgcacatttaaaagaaanaccacnctttggggcggctgggcggtagaggaggctggctttagcttttantttagnggngatggcggatatggcaagcattttaagatgataaatgagaaatttggcggntttganctagttttnatagaaaatggcgcttacagcgatggctggccttacgtgcanatgaagccagaggagtcagcgcaagcgctaaaagatcttggngcaaggcttggcgtgccggtgcattggggtaaatttgatctttcttatcacgcttgggatgagccgatcaagcgttttgaaaaggcngctacaaaacttgagctaaactacgcaacnccgatgatcggagaggttttcancgtgcaaaatccacctagaaaaaagtggtgggatgaaatttaggaataaaatttgctctaaattttaaaatccaaaaggaagtgcagatgaaaatttctgaaaatttatcaaatttaaaaaatgccatcgacaaggcagcnaaaaacgaccttgatgcaagcgctactggaagctttttgcaaaatttagaaaaagcnaacaaagagacnganaagatctacganaagcttgaaaaagagctaaagagcgangcgcagatgtttaagcagtttgacttcatgcagatgatgacaaagcttcaatacggcaacctaaaatcaagcgagcgngaagagctgataaanaaaatgagcaaaatcgcnaaagaaatttagccgtttagtgtgnntttacggcgagntaaatttggctnttttgcgtaaatttatgtggttttttnnnnnnnaantttnnnanaaaannnaaatttnnnnnnttannnnntnttaatnnnnnnnnntttnccnnatnttttnnnaannacntnttnnnnnnnnnnnnnnnnnnnnnnnnnnnnnnnnnnnnannnnnnnannnnnnnnnnnnnnnnnnnnnnnnnnnnnnannnnannnnnnnannnaannnannnnnnnnnnnnnnnnnnnnnnnnnnnnnnnnnnnnnnnnnnnnnnnnannnnnnnnnnnannnnnnnnntnnntnnnnannnnnnnnnnnnnantnnannnnnnnnnnnnnnnnnnnnnnnnnnnnnnnnnnannnnnnnnnnnnnnnnnn

SEQ ID NO: 1060 - DNA, 4000 bp, Escherichia coli
  misc_feature (90)..(90): n is a, c, g, or t
  misc_feature (450)..(450): n is a, c, g, or t
  misc_feature (1054)..(1054): n is a, c, g, or t
  misc_feature (1986)..(1986): n is a, c, g, or t
  misc_feature (1991)..(1991): n is a, c, g, or t
  misc_feature (1994)..(1994): n is a, c, g, or t
  misc_feature (2002)..(2002): n is a, c, g, or t
  misc_feature (2129)..(2129): n is a, c, g, or t
  misc_feature (2441)..(2441): n is a, c, g, or t
  misc_feature (3131)..(3131): n is a, c, g, or t
ccaatcctaaagctggaaaatatgaacatgccaacagcaacataaaacaaggacagttcctttgacagtatagcagatcctataattccncctactacagtgatcaaccacaacgcatttccaaaaaatgacatgtgcagtgattttgaatactccttatgttttgtaaaacgtgaatctaagtactgtgtagcaagtaatacagctacaacagctggcagatgataaagtatttcataattctgaatatagttattaaaactaagaaaagaaattatagacgcaatagcgatagatgcagtcagtgaaacgtagaatgatgatggatttattagcgtgaacgaataccgtttgtgaatgttttgaatgtcatttgaatctgacatgatatttatggaattaaaagcagatctataacccacgagactacaataatgcttattggcatanaaatgatgatttttggatcaatcttaaatccttttgtttcatcctcaaagaatcttagcagacctgcgctagatgctggcagtggtgcgtttttctttttatcagccatacttagtattgaaaacagaatggtaaagataaaaacttttttaattcgactttaattttgctataatatctattagcaaatcaatggattttatcaattcctgctgttttgctggcttgttttccttttcaagttgagtagataatttttcaagtttctgctctagtgtttttagagtagaaatagactttttttccttggtctgtgtttttgttggtttttgttcaggttctcttccacaatttacacacaatgcatggccatctttcataactcttacacccttacagtatggacagggctcgcttagtaaagtgccaccgctaagtatcatcttaattgctttttgtgttaaatcgtttggcaatgatataacgttaaattagtttgtaaaaaatactgggatcttgtgaatttactttattttatatcgataaggcttaataatatgttagagcatcaaatttagaaataatggcggttatttgtaatacntgtggacttcctgatgacttgtgcgcctgtggtgatcttgacaaagatagtactcatattataatacgtcttgagactcgacgttttaggaaaaagggaacaatgattgagggacttgatcctaagattaacaacctaggtaatgttgcaagagagctaaaacacaaatatgcgtgtggtggaacggcaaaagatggctatgtatttttgcagggtgatcatagagatacaattaaagatacattggtaaagcttggctttgctgaagaaacgatagaattacactgaaaaaaagtgtcatcacaaaacaaaattttacaagggctagcgataccgcacactgccttaatatcagtaattttttgtttgatggttttatcatttcccactggggcatatctggttttcaattcagaaattggagatgatgtaacatacgagtatcctatggatagcttaagcatttttcttgcaggaataggttttgaagttccagtaaaatttgagttaggagatgggtttgttgtaatatggtgtacttacttgattctctttacagctgcaatattaggtccaaaaaaaaattttgttgctgtattacaatcaatgatttctgaagggagatataaaattcaagataactatatcgttaccgtcatcaaatggttttctattttagtgattgtatcaggtagtataattagtgttcaggaatttattgggatttccgttgaacagccggaagcgccaaaccagctaatacaattttttgatatatcgcttgcaccaataatagaagagtttggttttagggttgtactgatagggctaccgctttttacgttgtattcgcacaaattatcctttaaatttcttgtaaaatcactgtggtggccatggcaaaatcttcgcaatgtaaatatgaaaaaggngttgntgntgattgtnatagtaggagtacttttcggtgcagcacatattttttcagatgaagcgtggagtactggtaaattggcacaggcaatcgctagtggaattataattggatgggtatatttcagatacggtcttgttnctgctattctaattcattgggcaacgaactatttcgttttttcttatggatatattgtagctgatatcaaccagatttctataggtgatgcattttcacattctctgctaaacacacttgagttaatgctaattgtaacaggaataatctcagttacagttttggtgttaaattatgtgtactcaaaaaggcatacgctagaagcataattcaatttttttacaaaaatcctgcttgtcattttgttttagcatgaatgcaagatcaaattcgtcatcaatatcaagcatcattctacgaatcagtgcaacngatatattttcagttttagttcttgcaacgtccatttgaaatgtgtaactgccctcatcatatcttgtctccattatgttagcaggacatctaactagtgcatttgtcccgttaaattgtctggagggaacgatgattacagatcttttataccttacaaagcctaacaagttatcgatatcggaagacgtcattataggtatatcctgtggaaagataaccgagcaatcaaatttcttatcagaaagatattggtctgctaaactgatagcatcattaacgccagattcgttatcaaaaatttctatggtatcaaattgcctaccaagctttaatgctacctcatcctttgacaccagaactattttgctaataagtttgcaattcgatactgtattaagaacttcttgcaacattagactgcatatcttttctttacactcttgctgtaagtttagtctttttttagccttagaaaatgtcttaactggaattatcgctgaagttttcaacttaggaagaatattgttttagaatggatgccgcaagtacatcttcagattgcttgtttgtcattctaatttttgtctcatgcacattgatattcaatgcctcaatttcttttgtttgcatacgatctttagtatctataactaaatttgaacagacatgtgcatacatctttgcaangcccaacgctgagacttccattccagctgcctccatgtattttccagcgggtccactaatagaagaatttccaattatagggcttatagctaccactttgtttttcttttttgccaactctttccgtatgcccttgattgctaaaattggacctatactggtgagagggttgcctggagcaataattacaagactagaatcatgaattgcatttacagcatctgggtttggacgagccttgtctgcacctttatattcaattccttcgactgaatccaggcctctatgcttaacccaaaactcttgaatgtgcattgcacccttatttgttataattctagtttcaatcgcattatcagtaactggtattaatttaatttcaattgcaaatttttcacacatccattttgtaatatcgctcagacttttgccgttttttaacatattagttctggtaagatgagtagcagtgtccctatcacctatcctaaaccatgtttcttctccaaaaatttccatctgccgtaaaaatccaaatgtatctttttttatgccccagcctttatcatgatccagtaaatcagcaagtccataagtaatggtatcaatgtcagggcagatatacatcccataaagccaataattatcccccacattggtaatcacgttaatatctgtccgatgagaagcaaaccctctcacaagtttaactgaaccggagccaccggcaagtatagtaatcaatttttttctcctagaacaatttagtagagtaatgctaccaatattactttatcatttttatggtaattttttaggtaaaattaattaactatataataagtgagatttcgtgccaagaaaaacta

SEQ ID NO: 1061 - DNA, 4000 bp, Escherichia coli
  misc_feature (336)..(336): n is a, c, g, or t
  misc_feature (338)..(338): n is a, c, g, or t
  misc_feature (345)..(345): n is a, c, g, or t
  misc_feature (353)..(353): n is a, c, g, or t
  misc_feature (517)..(517): n is a, c, g, or t
  misc_feature (526)..(526): n is a, c, g, or t
  misc_feature (2007)..(2007): n is a, c, g, or t
  misc_feature (2052)..(2052): n is a, c, g, or t
acttgatctttgtaggaattgaaaccaatatttttggatgataggagttctttgatttcttgatctctttgaattgcatagggctcgtagtcatgattgcagaacactgaatcaatttcgtgtttttttgacaaagcggaaaaaacttctttaggcctcccaatacaaacagttagtgaacttccaatttcgttaagttgcttattgatgttttctaactcctgatgaatgtaggatattcgagcatcgtctttcggaagcttattgagaatttcttgatcgaatataaaaataggaagtacctctttgtccgctattaaagcttcatacaatccncnattatcntttaatcngaggtctctcctaaaccaaaagatgttcctttttttattcattatcataggttccaaaaagtgctattaattttttttgtctgtgggcaaaaatttcttctaattttggtttgaccagaaatggatgtacaatttgacccaaaatacccataggtactttatantcaataatntcttccatctctacaccgccatcaatttttttaataaaatgtttgtggtgccagagtgcatagggtccaaaccgctgttcatctacaaaatattctccctctttcacatgcgtgatttctgtgacccattttgttttaattccaagaattggggttactatatattgaattatttgtcctgcaaacatgggtttttctgctccagaaataatattaaaactcatatactctggagtaattgtttttaaatttctagggttcgataaaaacttccaggcttcctctagggagattggtaatttttgttttctatgaaatgtatagattttcattttaattgtgaattagaatgtaaaggtttaatgatgtcgcaatacaaagccataacatgtagggtaggagtaggtatttgtaatacgaagcttttccttctttgaagaagtaataacaaatgagagctgttaataaaatgaggatgattaatccgaataaaattagatgctgattgaagaaaaaatagttccaactcacattcaaaataaaatgaacacaaaaaataaggattaattttaaacgattctgttttacaaataactgtcctaaatatactgagaaacaaatcatgatgattgtccatgcagctccaaagacccagccttcaggagtccaaggggcttgatttaagtttgtgtaccaagaggatgtaggtccattattcattaaccaacttccgatagctaaaccaccaaaattgataaacagaaataaaacagttaattttaattgtttcatttgtttatgattttgactgtaactcctcaattttttttaaaacgtcgtctgcatcctgatacttatgatcactttgacttctattaatcgattgcaatttaaatgcttcctccatcaattttttgtacaattcctgtaatttctctacctctgttttctttttgaataaaccaaacatcattttaagattttaagtgttttgtaatttttgaactcattggtgttgtaattgaataataataatcgatgagtttgccttctggagagactaaatatttttgaaaattccatttcacagaagaactttttttattatttaattctcttgaggttagccagttgtatagtgggtgttgttctttacctttcacatcaattttttcagtgattaagaaagaaacgccatagttgactttacagaattcttcaatttcgtcattgtttccgggttcttgttttccaaattgattgcaaggaaccccaataacgactaagttattcgcatgtgtattgtataatttttccaattctttatattgaggggtaaaaccacatttagatgctacatttacaaaaagcaggtgtttccctttaaaatctgataaatgaatagggttattctggagactcttaatctcaatatcatatatagtcattctttttttttaaattaaattttaaatgttacnattccgcagtctaattcaaaaatttgacctgagattgaagttgcnttatcagagattaaaaagctagccatgtcagcaacttcttttggatgtagatactttttcaaaggatgacgttctgtaatattttcgatcatacgttcattgcgtaataattttgacgccaacgtagtgtctgttacagtgggagcgatcgcattgacacgaattgagggtgctagttctgcccctaatgattttgtcaaaccttcaacagcagactttgcagctgcaacgctggcatgaaaaggcattcctaatttagcagctactgtgctaaagagtaaaatatttggatcggttcccttttttagcgagggtaggtaatgttgaattgtttttacggcaccgatgacattgatttcaaaatcatttctaaaatcatccaattttagacgtgatatcggctttagattaatgctacctggacaatagattaaggaatctattttttcaatttcaggtaactcatctgtcaaaacattacaatcaatatgtgtgagattctgatgggtaattaaaggagaagttctactcaagtttacaattaaattttcatcaatcagggatttcatgattgcatttccaattcctttacttcctcctataattaagattttattcatatgctttaaggtcttcctttcaagcgcttttcgattttttgtttaacagcagtcaagcgcttcatttgatccatgatttctggatctttttcttgtttgtatatctcgttgagctctaatattaaagctttcacctctcttgaggctataattcgatcacttgtagttttgaatgagaattttctgttctcaaattctatagccctttctaataattccatttttttttaattatattctatatttttcgaatataaatataaaagttagaaaagcaactaaaatatgaattttttatgcggttaagggttttcccttcaaacgtttttcaatcttttgtttgattgttgttagtcgtttcatgatatccataatctgggagtctttattttttttataaatctcgttcaatcccaaaattaacgatttggcttttcttgcggccatgattcggtcgctggtcgtaggaaatctcatcttttttgtttcaaactctaatgcttcgtttagtaagtccataagttaatattttaatgtgttttgcaattctactattttttcttgtgtgttaaattttccgccaaaataagaggtaacggttgaagatgtctcatctttaatccctcttgaagaaacacaaaggtgttttgcatctatgataacagcgacatcttcagtttgtaaaatttcttttaattcttctgcaatttggttggtcaatcgttcttgaacttgaggtcttttggcatagtattgcacaattcgattcaattttgacaatccaataacttttcccgaagaaatgtaagcaacatgagctttaccaataatcggaacaaaatggtgttcacagtttgaataaaaagtaatgtttttttctaccaacatttgattgtattggtatttgttatcaaacaaagcaatttttggtttgttgacaggatttaatccggaaaagatttcttctatgtacattttagcaactctcttaggagttccttttaaagaatcgtcggttaaatccaaacccattacatccataatttctgtaaataagctttctatcttgtcttttttttcttcatctgagagtttaaaagcatcttttttcatgggggtttgtaatcccgtgtaaagatggtcatctccaacttcttcaaatgataatctgtttaattcttcggtaacttcttttagttttagttctgtaatcattttgtatcttttttatgtgctgtcatagactattgtctttaagcaaagcacggtttatctttttgatatagagttatttgatattgatcgttgtctcgaacatttaaatcttc

SEQ ID NO: 1062 - DNA, 4000 bp, Escherichia coli
  misc_feature (817)..(817): n is a, c, g, or t
  misc_feature (1524)..(1525): n is a, c, g, or t
  misc_feature (1789)..(1789): n is a, c, g, or t
  misc_feature (1985)..(1985): n is a, c, g, or t
  misc_feature (1989)..(1990): n is a, c, g, or t
  misc_feature (1996)..(1996): n is a, c, g, or t
  misc_feature (3369)..(3369): n is a, c, g, or t
  misc_feature (3648)..(3648): n is a, c, g, or t
  misc_feature (3702)..(3702): n is a, c, g, or t
agaaatgctatacagccttaggatgagggcagagcttgaaggaaagcatgtatctggggcagaaagaataataaatgctgaagagattgaaaaaaccataaaagagcttttaaagaggcctaagctttatgataagatggttataaccattgaaaacattaaagatgtggagtatataccaaaggccttacctatttatagctacgattttaaaagcgtaaaagatgctcataactttgcccttagtatgcttatgaaggagggagtaaaggaagaagtagccttaaagggcttggagcttttaaagaagggtcctaatccaaagggtggcaatatgaggggtgcggtgcttatggatatggaatctggtgagaggcttgaactagaccaagagagaggcataagaactgtgcgctttgattggaaggacagaaggcttataaaaaggcttttgaaagaaaggggaataaaaaggttctaccttgagaggcttttggatgccttagctttggctacaaagaatatacactgcggggttgtggcagagctatgctggagcgatgacccagattatacaacgggctatgtggctgggaaaaacataggctatgtaaggataaaaccaatgaaagaggagggagtccccataggtggaagggtttattttgtcaaaagagaagattttgaaaacttggtagaatgccttgaaaagagagtagtcctaatagaagaattatgatattcttaaatccttatataatgcaagcttaattaactataaactctttgaattgcatttaaagatttttgtttttangattacagggaggaaattttgtaagggaggtaaaaagatgagaaaggtgttggctggaacagccctttttgcacttgcaggactttcctttgccaccaacggagacaaccttataggtgtttctccagcctcaaggggtatgggtggcataggtgtaggtatgcccgtaggacccaccgacagcatctttagaaaccccgcatggatgagccagtacaaaggctttaacctgagctttggtggaatactctttatgcctgaagtaaaggcaaaggttgattttggcggtggtccagtttccggaaaaagtaaagcagacctttttgtagtgccggaagtgggtatagttcatcagataaacaatcaattgacctttggtataggagcttttggagtctccggtatgggtgtggattataggaatcaagacccttcattctccaatatgaacacaaccttccagtttatgaggattataccagcactttcatataagataaacgatgccatttctgtttctggtgctttacatcttgcttacggctctttagatatggaagctgttggattaggcggaggtcaatcccaaacctatggcctaggcttccaacttggtgcagcttataacatgggcgactttgtatacgcaggtcttacctatcaaagcccaatttctatgacctataagagagtttttgactccgatnntgatggaacatatgaagacctcaaacttacccagcctcaagagcttgcctttggtttgggtgtaaagcccatggataacctaaaggtgggtatggatataagatggataaactggaagaatgcaaagggttataaagagttccagtggaaggaccaatgggtaattgccataggtggtgagtacaaacccatacccaagcttgccctaagggctggttataactatggaaagtctcctataaggggtggagcaaaggatcctantaatgccaacactattccaaaccttgcagcgccctttagcgattttcatatagcctacttcaacctcataggcttcccagctataacagaacagcatataacccttggtttgggctatgagtttacaaagacatttagtgtagatttggcatacaaacatgcctttaagaaaactgtaaaggctacagataatttngggnnaggttngcaaatagaagcctccaacgctcaaaacgccatatccataggcctcaactggaagttctaaaaaactccttgggagggctcttcctcccctccttaaaaggtgataagtctcatacaaaattccaaaggcttctggtagaatactctcaaaacttcttaggaggtaatcaatggagtttaggcatgtctttatatgtgttaatcaaaggcctccgggccatcccatgggttcctgtgcagaaaagggaagcagagagctataccaagcctttatggaaaaggttcagatggacccagagctttttatgagtactgctataacaccaacgggctgtcttggtccctgtgggttgggtcccaccatagtggtctacccagatgccgtttggtatggcaatgtaaaaccctccgatgtggaggagatagtgcaaagccacctcaagggtggaaagccagtagaaaggcttgtggtctcaaaagggaagccaccgggtatgttttaaaaggttgggggctatacagcccctggcactccttcttcttcaaactctatttccatcctttctgcgggtattatagtggttatggcatgcttataaacaagggtttgttgacggccatcttccataagtatagtgtataggtcaaaagaccttatccttccctgaagcctcacaccgttgataagataaatagttacctttacccttcttttccttgctgtgttcaaaaaggcctcttgcaacctgtaagccatcttttagctcctcctttccaaaaattccatagttgtctggtaaagtttttctgctaaagaaatataatactgggaattttccaaattttcaagaagttctaatgggaaaacccacaggccaccgtaggcacctacaaaggaccccaaaaggtatcctatggcgtctatgtctccacccaccataccacaggcattaacacctctccaaaaggcctcaagaggctcctctatataccttaaaaagaggaaaattgacaaaggtagggcttcaaagacaaaggtggagtttcctatttcccttatggcttcttcttcatctgcaccagaatccaaaagctttgccaccttatcaagataaaccttgtttttatcatgctttataaaggtctttaggctttcaatgagtgccagcctatccctcaaatctctcaagtcaaagctctcaaggaccaaaaaagaaataagggcagaaactatggcgcttgcatcgtaaatttctttactcctgtgtgttataaggcttacaagcctaccagcctccgcagagaggtaaggattatagtaatggaaaaggcctgttattgtgcaacgaagcacaccttctactgaagagganacaaggcctgcatcatcaaggcccacgccggaggatataaggtctatggctgttataagggtagggtcggggtatctgtggatctcttcttttcctgcccattcctttagcttactaaaaaagtgatgaggctcaaggctttttttctccactatgctttctgcaagcagtatacttatagtggtttcatccgtggtttgctctggctccaagcccaccgatggactgtgaggatgaggctccacaaagccccttacagccccaccgtaaaagcttatnacctcctcaaaaggcacatcttcaaggcttttaccaatagcatctccaagggcnccacccaaaagggttcctttaaacttttcaaggattgtatccatggttttttaaaattatacctccccggaatatatttaaaaacatggtggaaaagataaaaagcataagcaaagaagagctaaaggagctttatgataaggattttcccctgtgggcggagattaacttagagcttcttaaagaaaaggcttatgatttggtggattgggagaacctcttggaggaaatagaggatatagcaaggtcagatttaaaggcttgcaccagtcaccttgcaacgattttagaacaccta

SEQ ID NO: 1063 - DNA, 4000 bp, Escherichia coli
  misc_feature (171)..(172): n is a, c, g, or t
  misc_feature (293)..(294): n is a, c, g, or t
  misc_feature (1067)..(1067): n is a, c, g, or t
  misc_feature (1988)..(1988): n is a, c, g, or t
  misc_feature (2405)..(2405): n is a, c, g, or t
  misc_feature (2747)..(2747): n is a, c, g, or t
  misc_feature (2969)..(2969): n is a, c, g, or t
  misc_feature (2981)..(2981): n is a, c, g, or t
  misc_feature (3317)..(3317): n is a, c, g, or t
  misc_feature (3346)..(3346): n is a, c, g, or t
  misc_feature (3373)..(3373): n is a, c, g, or t
  misc_feature (3406)..(3406): n is a, c, g, or t
  misc_feature (3412)..(3412): n is a, c, g, or t
  misc_feature (3415)..(3415): n is a, c, g, or t
  misc_feature (3443)..(3443): n is a, c, g, or t
  misc_feature (3475)..(3475): n is a, c, g, or t
  misc_feature (3531)..(3531): n is a, c, g, or t
ggcgctccccggactgttgttgctgctgagccccgccctgacgccggcgtggggtgcggatgcgcccgccgccacgcactacgtcctcgatccgtccaagagcacgctggaattcaatttctcgcaggcgggcgcgcagaacaagggcaagttcaagcagctcgcggcgannttcgacttcgcccccgacaacctggcagccagcaggctcgacgtcacgatcgaggtcggctcgctggacaccggtgaccaggaacgcgatgacaccctgcgctccgcggatctgttcgcgnncagcaaattcaaacaggcgcgcttcagcgccacgcagatcgccaagaccgccaccggctacgaggccatcggcaagctcaccatccgtgacgtgacccgcgaggcgcgcgtcccttttgccctgcgtaccgccgccgagaatggcgccagcgtcgtttacatgaccggcaagaccagtgtgcgccgcctcgattacggtgtcgggcagggcgactggaaggcgacggatcaggtcggcaacgatgtcggcgtgaccttcaccctgcggtacgcgccacgctgagccgcggcattcaaagcggcgtgccgtcgcctcgggtcatcttgccgcgggcgtgcggcggactccacatgaggtccacgtcggcgtccgcgtagtacgcggtgtcctgcgggtcgcgattgctgatgacgaggtaggacgccgggcggtcgctgcggttcacgaactgatgcccatcctcggtgccggcgacgaagcccgcgcacatgccggcactgagcagctgctcgccgccgttggtgcgcagcagcagctcgccctgcagcacgtagacgaactcgtcctcgtgcgtgtgccagtgacgcatggaggattccttgccgggcagcagagtcgccacgttaaccccgatccgcgtcagccccagcgcctcccccagcctgcgcacctcacgcggtagcacgcgcgcgcggtacggttccgggtagctgctgcgcgagatggccggcaccgtctgcggatcgagagccggtttcctcagtaacatggngcgctccgggtggtggcgcggttgactcgtgccgctgccttcagggagcatgccataagctgcatgcctgaaatacttgatgacgtcggcaactgcgtcgatgcggtgctgcgccgtatagggccgcgcatcgtgctcgcgctgccgctgggtattggcaagcccaatcccctcgtcaacgagttctaccggcgcgcggcgcgtgatcgcacgctcgacctgaccatcatcacggcgctgtcgctgctgaagcccgtggcacacggggccctcgagcggcgcctggtggaaccgctcgcggaacgtatcttcggcagctatgtcgagccggagtacgcgcgcgcgctgcaggcgaatgcgttgccggcgaacattcgcgtcatcgaattcttcctcaccccgggtgcgttcctcaactgcccgccggcacagcacaactacctcagcgccaactacacgcacgtggcgcgcgaggtgctggcccggggagtcaacgtcatcgcccacctggtcgcccggcgcacgctcaacgggcagctgcagctgagcctggggtcaaatccagacgtcaccgtggatctgttgccgcggatcgagcaggcgcggcgtgaaggtcgcgacatcgtcctgatcggcgagacgcacgcgcagatgcccttcatggcaggccaagcgcagctggagccggagcgcttcgattacctcgtggaccacccgcgctacgactacgacctctttgggccgccgaacgcgccgctcagcagcgccgcgcacgccatcgggctgtatgcgagcgccctggtgcgcgacggcggcacgctgcaggtcgggatcggggagctcggggatgcgctcatctatgcgctgctgctgcgccaccagcagaacgaggcgtggcgcggcgcgctggccgcgctggcngccggccgcgccgccgaatccattggcgccagcggcggggaggcgcccttcacgcacggcctgttcgcggccagcgagctgttcgtcgaccagctgctggaactgtaccgcgcgggcgtgctgcgacggcgcgcctatgacagcctgccgatcgagcggctgctggcgggcggggagccggagcgcttcgacgcgacgctgctacccaagctgctcgccgccggcgtcgggccgctgctgaatgaggcgcagttcacggacctcaagcgccacggcgtgtttcgcgaggaggtggagttcgacggcggccgcgtgcgcgcgcgcggcgggcagtggatcaacgcggacctgagcgatgccgggagctgcgcgcgcatggcagcggagtgcctggggcgcgaactgcgcaacggccangtgctgcacgcgggattcttcctgggcccgcgcagcttctacgccgcgctgcgggagctgccggaggatgaacgcgcgcagttctccatgcgcggcgtgggctacgtcaatcagctgtatggccaggaccaggagctgcgcatgctgcagcggcgcggcgcgcgctgcatcaatacggcgatgatggtgacgctgctgggagctgccgtctcggatgcgctcgagagcggccaggtggtgagcggcgtggggggccaatacaacttcgtggcgatggcgcacgcgctgccggacgcgcgctcgatcctgtgcgtgcgcgccacgcgcacccgccacgggcanaccacgtccaacatcgtgtggagctacggtcacgagaccatcccgcggcacctgcgcgacatcgtcatcaccgaatacggcatcgcggatctgcgcggcgcaacggacgccgaagtgatcgccgcgctgctgaacgtcgccgactcgcgtttccagccgcagctgctggcgcgcgcccaggcggcgggcaagatcggcgcggattacgcgatcccgcaagcncaccgccacaancttccgcaacgcctggcccgcgcgctcgagactcaccggacgcggggattcttcagcgaatatccgtttgggaccgacctcacgacagaggagatcgcgctggcgcgcgccctgaaattcctggacgcccgcaccagctcgctcgccgcgcgcctgcgcaccgtgggcgcggcgctgctgcacggtaaaccggcggcatcccacgcggcggcactgcggcgcatgggcctcgagcgcccgcgcggcgccgccgagcgcctgcagcagcgcctggtggtactcggcctggatgcgactgcggcgccgtcgccgggcgcctgagccctcagcgcctgnccggccgtcgccgcgcgcgcttcgccggngcgcggcgcgtgaccttgcgtgccatnttggcgcgcatcttgcggctggcggccgcgcgncgcacnttngctggcttggcccggccgcgcttggatnccggggcttgcttgcgcggggtgcgcttcgcnggtcgtttcttcctggccggggccttgcgggcctttttcctggccggcggccttgncgccttggcgctgtccgtgccgcgcagctgatcgaggatcgccgggttctccagcgtcgagacgtcctgggtgatctcctcgccgcgcgccaccgacttcagcaggcgccgcatgatcttgcccgagcgcgtcttgggcaggttgtcggcaaagcggatgtcgtcgggcttggcgagggcgccgacctgttcggccacccaatcgcgcagctccttcaccagcgcgctggtgtcgccggtgggtcgctggccgcggcacacgacgaacgcgaataccgactcgcccttgatctcatgcggcttgccgacgacggcagcttccgccacccgcgggtgcgccaccagcgcggactcgacctccatcgtgcccaggcggtgaccggcgacgttcagcacgtcatcgatgcgccccatgatccacaagtagccgtccttgtcgcggcgggcgctgtcgcccgcaacatagaag

SEQ ID NO: 1064 - DNA, 4000 bp, Escherichia coli
  misc_feature (1311)..(1311): n is a, c, g, or t
ctgattggagtaaaattacagagttagttgagcatctagcaccaactggtgtaccagtacttggcaatggtgatatttggtctggattagatgcgataaacatgatctcccaaactggttgcgcaggtgttgtagttggtcgtggttgcctaggacggccctggttgtttgcagatttagttgcagcatttaatggcgagcaaagtagggtaaatccaaatttatttgaggttagaaaagttatgttgcgacatggtcaattattagttgagtactttgaaaatgaggatcgagcaatgcgtgatattagaaaacatatggcttggtatttaaaaggtttctcagttcctcgtgagattagatcaagccttggcatggtttcatccttagatgagatggagaaattactctctggggttagcgatcagccatatccgcaggcggtaggggatgcaccccgcgggcgcagcagccatggccggccagtatcactacctgatggttggcttaatgatccagatgagtttgccactatcacaatcgatgatgctatttcaggtggataaataattgtttttatttaaattaattagaagagttatctcatttgtgttactactaataattgttattccactttatatagctggaagcatttggtatacaggcagaaatagcgagctagttaaaggtgatgtaattttagtaatgggagcagcccaacttgatggccgaccaggtgatattttgctagccaggcttaagcaaagcaaagcaatatttaaattagatatggcccctcgtatctatacagttggcgcaggtgcgcctggagatcgcacaactgaggcagcagctggcagagattggttaattaaaaatggtattaccaaagccaacgttttagctattgcaaaggggcgcgataccttaagtagtacacaggcttatgcgcagcagatgaagaaagtgaagttatcctcagtaattattgttaccgatccataccattgttatcgcgcaattaaaatggcgcaggatttaaatctaaaagctatctgctccccagttatggccggacctggttcaattacaaactctagttttaagtacttaggtagagagactggtgcctatcttgcctatataactgttggcaggctggggattaagttaagtgatcgggttaatttagccagcagataggattactaaatggttttacgagcagcagctgaacaccctggctacacaccagcggatcgagaaagattttttgatgaaccagcaaagcgtggcgggcgaactgantttgctagagatcgcgccagaattattcactcatttgcactgcgccgccttgctgcaaaaactcaggttgcagttccatgggcaaccgattttccacgaaccagactttctcactcacttgagtgcgctcaagtaggacgggagttaggcgctgcacttggcgctgaccctgatttaatggagggtgcatgtttagctcatgacatcggacatccaccatttggtcataatggtgaagaggttttaaatcaattagctcactcctgtggcggctttgaaggaaatgcgcaaagtctaagattattaataagacttgaagcaaaaacagttttagtagatggtaaatctgttggtttaaatctcacccgggcatccctggatgcagctacaaagtatccctggagcagagttgttaatgctaaaaagtttggtgtctatgaggatgatcttgagatctttaattggtatcgaagtggagttgaatctggcaaaacctctatcgaggcacagatcatggattggtcagatgatgtggcatatagcgtgcatgatatggaggattcacttgtatctggtcaaatcaaattagatcaattaagtaatgatctaccaaaattatttaaggttgccaaagatatgtatctggaagatattaccgaggctgagatggtaatcgcgctcactgcgctacaaaagatctcctgttggccccgttactacgatggcacccaccgctcacttgctcgacttaaagatttagcaagccaattaataggtagatttgcccaagccgcagaggtggcaactcaagaaaaatatggtgattctaatttaaccagatatagcgcaaatttagttgtgccacgtgcgcaacgagttgaggtggcactacttaaatcaatggctggacattatgtaattaatgccgatacttcacagattcgatatggcgagcaacaaaaacttcttactgaattagttgaagcgatactagctagcgccccagcaacactagaaggcttcttcttgcaggattggcagcgggcagaaaatgatcaacaaagagttcgggtagtaatagatcaggttgcctccctgaccgatccgggggcgatagcgctgcataatcgcttaatcaacaggtgagtaattcaaactgtcggtttggaaactaggataggaagtatggccgggcgaattaaagatgaggatgtgacatacatccgcgagcactcaccaattgatgatgtagtcggtgattatgtgcaattaaaaggtgcaggtggtggccagaaaaaaggcttatgcccatttcatgatgaaaaatcgccctcatttcatgtcacccctagcaagggatatttccactgctttggttgtcaggttggtggggatgtaattgcatttattatgaagttagagcacttaacatttatagagacggttgagcgcctagctgatcgaattggttacacaattaagtatgaaacaagtggcgccagcaatagcggtccatcaattaatcgctcaagattagttgcagcaaatactgcagcctcaattttttatcaggagcagttacaacttccagccgcccaacatgggcgagatttcttaactaagcgtggatttgatcgtgatgctgctaaaaactttaatgttggctacgcccccgatgagtgggatggtttatttaaacatctaactggtaaaggctttaccagtgaagagttaaatctagctggtttagttaaagagggtacaaaaggaatgattgatcgatatcgaaaccgtttaatttggccagttaaagatatctcaggtgatgtagttggttttggtgctagaaaacttgccagtgatgaggttgataccgggcctaagtatttaaattcaccagagacgccggtttataaaaagaatcaaattctttatggtcttgatatggcaaagaaggagattgcaaaaaatcgtcaagtggtaattgttgagggttataccgatgtaatggcagctcaccttgctggtgtcaccaccgctgttgccacttgtggcaccgcctttggtgaggagcacataagaattatcagaagacttttaatggatgcggatgcatttcgcggtgaggtgatatttacctttgatggagatgccgcagggcagaaggcggcgcttcgcgcatttgaggatgatcaaaagtttgtagctcagacatttgttgcagttgagccaaatggtatggatccatgtgaacttcgccaagcccatggtgatgatgcagttcgtaacttagttgcaagaagagtgccactatttgagtttgcaattaaatcagtaattgctaattacgatataacagctgctgaaggaagagttaatgcacttaatcaggttgcgccactaattgggcggatcagagatgcctcactgcgaccagagtatgtccgcttacttgccggctggcttggtatggaggttgatattgtctcaactgcagttaaacgaagtggcaaaacaggtgaaatacaaagtgcgcccagagttaatttaacagatccagttttagtcttagagcgtgaggtattaaaggttaaattacaactgccagaacttgccagcagttgggttgatttagaagcagctgccttttcatttccactttataaccaattgcgcgtactaattgata

SEQ ID NO: 1065 - DNA, 4000 bp, Escherichia coli
  misc_feature (221)..(221): n is a, c, g, or t
  misc_feature (228)..(228): n is a, c, g, or t
  misc_feature (404)..(404): n is a, c, g, or t
  misc_feature (426)..(426): n is a, c, g, or t
  misc_feature (550)..(550): n is a, c, g, or t
  misc_feature (706)..(706): n is a, c, g, or t
  misc_feature (721)..(721): n is a, c, g, or t
  misc_feature (742)..(742): n is a, c, g, or t
  misc_feature (766)..(766): n is a, c, g, or t
  misc_feature (791)..(791): n is a, c, g, or t
  misc_feature (802)..(802): n is a, c, g, or t
  misc_feature (804)..(804): n is a, c, g, or t
  misc_feature (1132)..(1132): n is a, c, g, or t
  misc_feature (1379)..(1379): n is a, c, g, or t
  misc_feature (1581)..(1581): n is a, c, g, or t
  misc_feature (1997)..(1997): n is a, c, g, or t
  misc_feature (2710)..(2710): n is a, c, g, or t
  misc_feature (2752)..(2752): n is a, c, g, or t
  misc_feature (2870)..(2870): n is a, c, g, or t
  misc_feature (3628)..(3628): n is a, c, g, or t
  misc_feature (3642)..(3642): n is a, c, g, or t
  misc_feature (3646)..(3649): n is a, c, g, or t
  misc_feature (3695)..(3695): n is a, c, g, or t
  misc_feature (3702)..(3704): n is a, c, g, or t
  misc_feature (3708)..(3708): n is a, c, g, or t
  misc_feature (3715)..(3715): n is a, c, g, or t
  misc_feature (3718)..(3719): n is a, c, g, or t
  misc_feature (3723)..(3725): n is a, c, g, or t
  misc_feature (3728)..(3729): n is a, c, g, or t
  misc_feature (3732)..(3735): n is a, c, g, or t
  misc_feature (3738)..(3738): n is a, c, g, or t
  misc_feature (3741)..(3741): n is a, c, g, or t
  misc_feature (3747)..(3751): n is a, c, g, or t
  misc_feature (3754)..(3758): n is a, c, g, or t
  misc_feature (3762)..(3762): n is a, c, g, or t
  misc_feature (3764)..(3765): n is a, c, g, or t
  misc_feature (3771)..(3772): n is a, c, g, or t
  misc_feature (3775)..(3783): n is a, c, g, or t
  misc_feature (3786)..(3787): n is a, c, g, or t
  misc_feature (3791)..(3800): n is a, c, g, or t
  misc_feature (3804)..(3808): n is a, c, g, or t
  misc_feature (3813)..(3822): n is a, c, g, or t
  misc_feature (3825)..(3825): n is a, c, g, or t
  misc_feature (3828)..(3830): n is a, c, g, or t
  misc_feature (3835)..(3835): n is a, c, g, or t
  misc_feature (3841)..(3842): n is a, c, g, or t
  misc_feature (3848)..(3854): n is a, c, g, or t
  misc_feature (3857)..(3863): n is a, c, g, or t
  misc_feature (3868)..(3869): n is a, c, g, or t
  misc_feature (3873)..(3875): n is a, c, g, or t
  misc_feature (3878)..(3879): n is a, c, g, or t
  misc_feature (3884)..(3888): n is a, c, g, or t
  misc_feature (3891)..(3891): n is a, c, g, or t
  misc_feature (3893)..(3901): n is a, c, g, or t
  misc_feature (3904)..(3906): n is a, c, g, or t
  misc_feature (3909)..(3915): n is a, c, g, or t
  misc_feature (3920)..(3922): n is a, c, g, or t
  misc_feature (3925)..(3925): n is a, c, g, or t
  misc_feature (3930)..(3941): n is a, c, g, or t
  misc_feature (3944)..(3946): n is a, c, g, or t
  misc_feature (3949)..(3953): n is a, c, g, or t
  misc_feature (3957)..(3963): n is a, c, g, or t
  misc_feature (3966)..(3966): n is a, c, g, or t
  misc_feature (3972)..(3974): n is a, c, g, or t
  misc_feature (3977)..(3982): n is a, c, g, or t
  misc_feature (3985)..(3991): n is a, c, g, or t
  misc_feature (3994)..(3995): n is a, c, g, or t
  misc_feature (3998)..(4000): n is a, c, g, or t
tgagccactacctgattgagaaactcaccgccgcaggatacgagatgatcgaccacggccccaccgaatatgacccgctggatgattaccccagcttctgcattaacgcggctctcgcggtgaaacgtgaccgtgacgccgggcttgattctcttggcattgtgcttggcggctccggtaacggggagcagatggcggctaataaggttgagggtatccgngcagccntagcctggaaccacactacggcggcgctcgcacgcgatcataataatgcgcaagtggttgctgtgggtgggcgccagcattcaccggatgaggcgttggaaatcattaaagttttcctcagcaccccctggagcggagaggaacgccacgcccgtcgtattgggcagcttggcgantatgagcagaccgggaagatcnctggcaaacatattgacgaataaataagtcccgccccacttttgcccctaccgctaaggagaagcgcgtgcctgaaggccactctattcaccgtatagcccgccaattcaacgatgtgtttacnggggagcgggtgcgtgttactagcccgcagggccgctacgctgaaggggctgcgctggttgatggggcacgtattgcccaggcgtttgcgcacggtaagcatctttttgttgggttcgacaacgaattgacgttgaacgtgcacctggggatttanggcaactggagtttnggcggggacgaatcgttcacnggcgcctcaagtattggggcgccncgcaagattggtgagaaagaatacngtggtggggancnccccgagtattctggccctcctcagccaaaagcaactactcgctgccgtatcgtctcggagcatggttgggctgaccttgtgggccccactgtttgccgcactctcaccccggacgaggttgctgtggtgcgtgggaagctggggccagatccgctgaacgctgatgctgacccggggcagttctaccgtgccgccgctaaaagcagccgcccgatcggggtgattctcatggatcaggcagctatttccggggtgggtaatatttttcgtgccgaatcgctgtaccgccagaaaattgacccgttacgccccgggaagacactcagngatgatgagctgcgccgcctgtgggacgataataagcatctgctcaccattggtgtgcgtgtgggcagaatcattaccaccgagcagcaggatcgtcccggtatccctgaaactgaggcgtggcctgatcacgcaaactatgtgtatatgcgccacgggcagaagtgcccgcgatgcagtgccaccatccgcatggaagaaatcgccgggcgtaaactttactggtgccctgggtgccagaaataantcgtatgttcggggtggttttgggtagaacttgacagcttcaaacatatgccgctaatctaagtgagttctttggggatgtagcttaatggtaaagcctcagtcttccaaactgatgacgcgggttcgattcccgtcatcccctcactcaaagagacccaaaggtttttacctttgggtctctttgtgctttgagaagtagnttaaaaattacctgcccctggcttggggcagggacgaagccgctgatttttgctaacttgctgaaataacctgtgacaagggctaatgccgttaacgtcaaagaagcgggcgggctagatcaccagccgcaccccaaaatttccgggttccagcccggtggcacgggagatagcttctgtggctgctaaaagaataccgctaaagttagttggctgcccggctgtttctagctcaggcacgtcaacaacccacccggttccttcccggtgggcaatagcgtcatatgttttcaggttcatgcttacctccgtgtctttatatatgctagggctgagagcctcaaaacacaaggtcttaacgtgaggtttaatataaaaaccgttgtcagcggcctgttggggccgctgtggccgcncaggaacataaatatgcggcccctgttaggcatttacccaaatacccgctaaacttgtgtgttgggtatgcgaaaagtaccttacggggcgtggcgtagcttggctaacgcgcctgctttgggagcaggagatcgcaggttcgaatcctgtcgccccgacggaaataggctcacccagcgcctttttcagacaccatgagcggttcagagaacgttccgccaccgaactacttacgaggagatcaacggacgtgaagaccgccgtcgagaagctcaacccgaccctggcaaaaattgaggtcgaggttcctttcgccgagttcaagccttacctggaccgcacctacaagaaccttgccgagcagattagcgtccccggtttccgcaagggcaagctgcctaagcagctgattgagcagcgtgcgggcttcgactacattgttgaggcttctctgaatgaggctctgaacgatttttacgcccaggctcttggtgagaatgaactgtcgccgctggctcagccggaactgaacgtgcagtctcagcccaccgtgcaggagcgcgaagctgatgttaagctcaccattgaggtgactgtgcgacccgagatcgaacttcccaagtatgaggggattgaggttgaggttgatgacgttgaggtaaccgccgacgacgagaaggaagcccttgacgggctgcgtgagcgtttcggntctttgaagactgttgagcgtcccgcagcagataacgacttngtaaccattgacattgcggccgaaattgacggcgagcaggtggacgctgccaacgacctgtcataccagatcggttcgggcaccatgcttgagggtattgatgaggccctgctgggcntgtcggctggtgaggacgcaacgttcgagaccaagctttctggtggggatcacgccggtgagcaggctgttattaaggtgaagctttccgccgtgaaggagcgtgaacttcccgaagctgacgacgagttcgcccagctggcctctgagttcgacaccattgatgagctgaaggaagacattaagaagcaggtctccgaggctaaggtcgccgatcagggttcgcaggcacgcgataaggtgctggctaagctcgttgagatggttgagattccggttcctgagaaggttattgaggaccagctggagcagcacttcaacaacccgaacgctgaggctgaccacgacactgaggagcaccgcgctgaggttcgtgagaacaccaagaccgcgtttaagaacgagatggtgcttgatgctatcgccgacgccgaagaggttgaggttaaccagaacgagatgatcgagtacatcatcacgatgagctcccagtacggcatggacccgaaccagtttgctcagatgctggatggctccggccaggcgggtatgctggtgggcgaggttcgccgctccaaggctttggctgaggtgctgaagaaggctgtggtgaaggactccaagggtaacgttgtggacctgtcctcataccttgaggacaacaaggaagaagaggctaagtagcagcctcgttactcccgctggctgaacaggcctaacctcatattgtgggcgcatccaaccgctaggtttgggtgngcccacaatatttnaaannnnctggtgaagaacaagacttagcgggtggcgctggcgcggggtctgnggcttcnnngggngtaaccnttnncccnnnggnnaannnnggnaanaacccnnnnnccnnnnngggnanngggggnnttnnnnnnnnnaannaaannnnnnnnnncccnnnnnggggnnnnnnnnnnccnccnnnttaanaaaaanngggaannnnnnnggnnnnnnnccccnncccnnnggnnccggnnnnnccncnnnnnnnnnggnnnccnnnnnnnttggnnnccnggaannnnnnnnnnnnaannnccnnnnnaaannnnnnnttntttggnnnggnnnnnnggnnnnnnnttnnaannn

SEQ ID NO: 1066 - DNA, 4000 bp, Escherichia coli
  misc_feature (1066)..(1066): n is a, c, g, or t
  misc_feature (1949)..(1949): n is a, c, g, or t
  misc_feature (1981)..(1981): n is a, c, g, or t
  misc_feature (1988)..(1988): n is a, c, g, or t
  misc_feature (2007)..(2007): n is a, c, g, or t
  misc_feature (2040)..(2040): n is a, c, g, or t
  misc_feature (2666)..(2666): n is a, c, g, or t
  misc_feature (3444)..(3444): n is a, c, g, or t
  misc_feature (3572)..(3572): n is a, c, g, or t
  misc_feature (3600)..(3600): n is a, c, g, or t
  misc_feature (3798)..(3798): n is a, c, g, or t
  misc_feature (3871)..(3872): n is a, c, g, or t
gaaaaatttattccttcaaaagctatggctattccctatgaactatcaaaagtgtcagcgcaaaaagatgaaagtagaactcactcttattttgaagatggcgacgacccggatgagctactaaagctaccacaagatatcattgataccattattcagcttaactccatacatcacacagggtgtataatatttgaagcattgccaactcacctcaaaattcacaattactatacgttgctcgatcatagtcaagagcagcggtttaaaaccctgttagcaaagcttgtcaaacaaattcctaacataaaagggctaggcatatcagggtttatgaagttaccctataaagatacacgcttttttgagcacaaagcaaaattgcccgagaagtattatccgcgaaaccccaaagcagttattgaagagaacgtacaacatgtctgaaattaaactatcgtcactatttgaactcgaaacagtggaagctggcatctatcggggtcagagctgggatttaggctttagagctttatttggcgggcaggttttggggcaagcactggcggcagcctatgagacagtatcaccagacagagtggcgcactcatttcatacctacttcttattgccaggcgatactaaaaaaccggttgtttacgatgttgaaatagtacgcgacggaagaagcttttcagcgcgtcgagtgaaagcgatacaagatggcagaaatattttttacatgacggcatctttccaggtgccacaagatggtatggagcatcaaaaccccaccatgccagacgttccggcgcctgaagacgttcagtctgacatagagttttacgaagcgaacttcaacaaaattgcgcgtcctatgcaagaagcattgagctaccataaaccggtagatattcgcactgtagatgctgctaattcatatcactcagctaagcgtgagcctactcgttatatttggctaaaagcaagagacacaatggatgcgcaattagccgtgcaccaagctgcacttgcttacgcgtcagattaccactttcttagcacntcgctacagccacacggcgttgcagtgaccgataagtctcttcgaattgcaaccattgatcatgctatgtggtttcatcgcccaattagcatgaatgaatggatgttatatgcaatggaaagtccttttagtggtggttctagaggcttggttagaggtcaaatatttaaccaaagtggtgaacttattgcctcaaccatgcaagaagggttaatgagaaaagtagatgaatagggagataggcatgcgttataagttaggttcagaaacacctgatgttcataaaagcgtatttattgcgccgggcgcccacgttattggtaatgttgaactgaaaaaaggcgctagcgtctggttcaatgccgtaatacgcggggatatggacaagataacagtgggtgaaaacactaatatacaagacggtagtgtgcttcatacagacgcgggtattccactagctcttggtaccggtgtaactgttgggcacaaagtcatgcttcacgggtgtgaaattggcgattattcgctggtgggcatcaatgctgttgtgctgaacggcgctaaaattggcaagtattgtattattggcgcgaacgcactaatcaccgaaaacatggaaattcccgattacagtttagttgttggctcacccggaaaagtaatcagaagtttcgatagtagcgtagagcctaaactacaagcgtcggcggcgcattatgttgagaacgctaaaaactatctagcgtcactaacgttaataaacgagtagtatcttttaacttaactttcgcgtaccccataaaaaatgcccagaacaaacgttccgggcctaggggaatggctcattgctgagccgtgcgctaacttttactgggagagttanaacaaaatcttccaaacagaatttaattatanaatacgnctggatattttttaaacantttttgtgtgaattttatcttacacaccttaanttaggctaattgtagtactaaacctatgcttatcaagtgactacaatctggtcggatgtgcttcgctcaacggctatttcactacccatttgctatctacttttatttagcgcttcttacttagtgttctatatatacgatttagaatctataaccaatttcccattcatgttatttatcttgggaacaggtggttgttcctttttattaacattgtagtatgtcgaaagttatcgtaactatggattacgatattaatattataaacacgccttacatcgctaagaggatggattatgcaatcgctatctacttttattccccctgaacgcaccttgatgggacctggaccgtccgacgttaaccctcgcatactgaatgctatggcaaggccaacacttggtcatttagacccgttgttcattgaattaatggaccaaaccaaacaactacttcagtacgcttttaaaaccgagaatgcgttaacaatgccaatttccgcgcctggttcggcgggaatggaagcgtgttttgtgaaccttgtagagccaggcgataaagtcctggtttgcataaacggcgtgtttggcatgcgcatggtcgaaaatgttgaacgctgtggcggngtagcgataaccgtcaacaatacatggggcgagcaaaccgatttaaatgcagtagaagatgcgttaaaagcagaccctgctatcaaggtacttgctttcgtacacgccgaaacgtccactggcgtacgtaatgaagcccaggcactttgtgctctcgctaaacagtacgactgcctaagtatcgttgatgccgttacttcgttaggtggtattgagttagatgtagacggttgggaaattgatgcaatttattcaggttcacaaaaatgtttgagctgcgttccaggtatttcacctgtttcatttagtgaaagagcagtgaacgttatacagaaccggaaaaccaaagtacaaagctggtttttagatatgaaccttattgttggctattgggggcaaggcgctaagcgcgcttatcaccacacggcaccagtaaatagtatgtatgccatgtatgaagcgcttcttattttaagagaagagggattagaaaatgcgtggaagcgccatgccaatggccatgctaagctggctgctggtctacatgatttaggattagatttaaccgtagatagcaactaccgtttacctcagttaaacgtagtaaaaattccagaaggcatagacgatgcttcggttcgcaagcaactgttggaagacttcaacctagaaataggcgctggcttgggtgaacacgcaggcaaagtatggcgcattggtttaatgggatacgcgtgcaagccgcgtaacatcgaccactgccttgctgcgcttcganctgtattaaagtaaagccccaatgcacaggcttttgtctcgtaagcttaagcgtcggtgttcacccgcttgtgaacaccgacgctaggaccagttggttgcctaaggggcaactattttcatcgcttnccggcgcccttaccgtataaaaactacntttcaccgacgtatcagataacctagctcatattcagtgttactatgcggttagcccgagtattcataaactattcagttataaacgcttatccttggtatttagtaatcattgtcatttaagtctgatgagacctaagatgattacattaaataacaccatcaataaggaaaccctatgaaacgactttcgcttaanaaaaatgcaataccttcaaaagcgcttatagcatcagcgttcttggcgttattaacgccatttgtctgtgcgnncgccgccgagagcgctagcataagtgtacaaggggtaggtgccatagaggtgacgcccaacgcttactctgtaacgcttgttgtggaagagcagggcaacacggtaggcaaactcaatacccagctcg

SEQ ID NO: 1067 - DNA, 4000 bp, Escherichia coli
  misc_feature (1)..(1): n is a, c, g, or t
  misc_feature (3)..(7): n is a, c, g, or t
  misc_feature (9)..(10): n is a, c, g, or t
  misc_feature (14)..(14): n is a, c, g, or t
  misc_feature (16)..(16): n is a, c, g, or t
  misc_feature (19)..(23): n is a, c, g, or t
  misc_feature (26)..(26): n is a, c, g, or t
  misc_feature (28)..(28): n is a, c, g, or t
  misc_feature (30)..(31): n is a, c, g, or t
  misc_feature (33)..(34): n is a, c, g, or t
  misc_feature (36)..(38): n is a, c, g, or t
  misc_feature (40)..(46): n is a, c, g, or t
  misc_feature (50)..(50): n is a, c, g, or t
  misc_feature (52)..(53): n is a, c, g, or t
  misc_feature (55)..(56): n is a, c, g, or t
  misc_feature (59)..(61): n is a, c, g, or t
  misc_feature (64)..(68): n is a, c, g, or t
  misc_feature (70)..(70): n is a, c, g, or t
  misc_feature (73)..(73): n is a, c, g, or t
  misc_feature (76)..(77): n is a, c, g, or t
  misc_feature (80)..(86): n is a, c, g, or t
  misc_feature (88)..(88): n is a, c, g, or t
  misc_feature (90)..(97): n is a, c, g, or t
  misc_feature (100)..(101): n is a, c, g, or t
  misc_feature (103)..(107): n is a, c, g, or t
  misc_feature (110)..(110): n is a, c, g, or t
  misc_feature (112)..(112): n is a, c, g, or t
  misc_feature (115)..(121): n is a, c, g, or t
  misc_feature (123)..(124): n is a, c, g, or t
  misc_feature (126)..(126): n is a, c, g, or t
  misc_feature (128)..(130): n is a, c, g, or t
  misc_feature (132)..(133): n is a, c, g, or t
  misc_feature (135)..(136): n is a, c, g, or t
  misc_feature (139)..(139): n is a, c, g, or t
  misc_feature (141)..(142): n is a, c, g, or t
  misc_feature (144)..(149): n is a, c, g, or t
  misc_feature (151)..(151): n is a, c, g, or t
  misc_feature (153)..(155): n is a, c, g, or t
  misc_feature (157)..(160): n is a, c, g, or t
  misc_feature (164)..(168): n is a, c, g, or t
  misc_feature (170)..(172): n is a, c, g, or t
  misc_feature (175)..(175): n is a, c, g, or t
  misc_feature (178)..(189): n is a, c, g, or t
  misc_feature (191)..(195): n is a, c, g, or t
  misc_feature (197)..(200): n is a, c, g, or t
  misc_feature (203)..(204): n is a, c, g, or t
  misc_feature (206)..(210): n is a, c, g, or t
  misc_feature (212)..(212): n is a, c, g, or t
  misc_feature (215)..(216): n is a, c, g, or t
  misc_feature (218)..(221): n is a, c, g, or t
  misc_feature (223)..(223): n is a, c, g, or t
  misc_feature (226)..(231): n is a, c, g, or t
  misc_feature (233)..(233): n is a, c, g, or t
  misc_feature (235)..(235): n is a, c, g, or t
  misc_feature (237)..(240): n is a, c, g, or t
  misc_feature (242)..(242): n is a, c, g, or t
  misc_feature (244)..(251): n is a, c, g, or t
  misc_feature (255)..(256): n is a, c, g, or t
  misc_feature (259)..(263): n is a, c, g, or t
  misc_feature (266)..(268): n is a, c, g, or t
  misc_feature (272)..(274): n is a, c, g, or t
  misc_feature (276)..(281): n is a, c, g, or t
  misc_feature (283)..(283): n is a, c, g, or t
  misc_feature (285)..(287): n is a, c, g, or t
  misc_feature (289)..(289): n is a, c, g, or t
  misc_feature (291)..(293): n is a, c, g, or t
  misc_feature (297)..(303): n is a, c, g, or t
  misc_feature (305)..(306): n is a, c, g, or t
  misc_feature (308)..(310): n is a, c, g, or t
  misc_feature (313)..(314): n is a, c, g, or t
  misc_feature (317)..(317): n is a, c, g, or t
  misc_feature (319)..(326): n is a, c, g, or t
  misc_feature (328)..(331): n is a, c, g, or t
  misc_feature (334)..(340): n is a, c, g, or t
  misc_feature (342)..(350): n is a, c, g, or t
  misc_feature (354)..(357): n is a, c, g, or t
  misc_feature (359)..(364): n is a, c, g, or t
  misc_feature (368)..(368): n is a, c, g, or t
  misc_feature (371)..(375): n is a, c, g, or t
  misc_feature (379)..(382): n is a, c, g, or t
  misc_feature (386)..(386): n is a, c, g, or t
  misc_feature (388)..(389): n is a, c, g, or t
  misc_feature (391)..(391): n is a, c, g, or t
  misc_feature (393)..(394): n is a, c, g, or t
  misc_feature (396)..(396): n is a, c, g, or t
  misc_feature (398)..(398): n is a, c, g, or t
  misc_feature (400)..(406): n is a, c, g, or t
  misc_feature (409)..(413): n is a, c, g, or t
  misc_feature (416)..(419): n is a, c, g, or t
  misc_feature (421)..(422): n is a, c, g, or t
  misc_feature (424)..(426): n is a, c, g, or t
  misc_feature (428)..(428): n is a, c, g, or t
  misc_feature (430)..(433): n is a, c, g, or t
  misc_feature (435)..(436): n is a, c, g, or t
  misc_feature (439)..(442): n is a, c, g, or t
  misc_feature (444)..(444): n is a, c, g, or t
  misc_feature (446)..(446): n is a, c, g, or t
  misc_feature (448)..(448): n is a, c, g, or t
  misc_feature (450)..(453): n is a, c, g, or t
  misc_feature (455)..(460): n is a, c, g, or t
  misc_feature (462)..(463): n is a, c, g, or t
  misc_feature (474)..(474): n is a, c, g, or t
  misc_feature (642)..(642): n is a, c, g, or t
  misc_feature (810)..(810): n is a, c, g, or t
  misc_feature (897)..(897): n is a, c, g, or t
  misc_feature (903)..(903): n is a, c, g, or t
  misc_feature (924)..(924): n is a, c, g, or t
  misc_feature (1041)..(1041): n is a, c, g, or t
  misc_feature (1116)..(1116): n is a, c, g, or t
  misc_feature (1206)..(1206): n is a, c, g, or t
  misc_feature (1209)..(1209): n is a, c, g, or t
  misc_feature (1221)..(1221): n is a, c, g, or t
  misc_feature (1310)..(1310): n is a, c, g, or t
  misc_feature (1419)..(1419): n is a, c, g, or t
  misc_feature (1464)..(1464): n is a, c, g, or t
  misc_feature (1515)..(1515): n is a, c, g, or t
  misc_feature (1533)..(1533): n is a, c, g, or t
  misc_feature (1551)..(1551): n is a, c, g, or t
  misc_feature (1611)..(1611): n is a, c, g, or t
  misc_feature (1689)..(1689): n is a, c, g, or t
  misc_feature (1695)..(1695): n is a, c, g, or t
  misc_feature (1734)..(1734): n is a, c, g, or t
  misc_feature (1794)..(1794): n is a, c, g, or t
  misc_feature (1803)..(1803): n is a, c, g, or t
  misc_feature (1812)..(1812): n is a, c, g, or t
  misc_feature (1866)..(1866): n is a, c, g, or t
  misc_feature (1875)..(1875): n is a, c, g, or t
  misc_feature (1878)..(1878): n is a, c, g, or t
  misc_feature (1881)..(1881): n is a, c, g, or t
  misc_feature (1949)..(1949): n is a, c, g, or t
  misc_feature (1968)..(1968): n is a, c, g, or t
  misc_feature (2692)..(2692): n is a, c, g, or t
  misc_feature (2698)..(2698): n is a, c, g, or t
  misc_feature (2793)..(2793): n is a, c, g, or t
  misc_feature (2822)..(2822): n is a, c, g, or t
  misc_feature (2828)..(2828): n is a, c, g, or t
  misc_feature (2870)..(2870): n is a, c, g, or t
  misc_feature (2954)..(2954): n is a, c, g, or t
  misc_feature (2963)..(2963): n is a, c, g, or t
  misc_feature (2966)..(2966): n is a, c, g, or t
  misc_feature (2987)..(2987): n is a, c, g, or t
  misc_feature (2996)..(2996): n is a, c, g, or t
  misc_feature (3032)..(3032): n is a, c, g, or t
  misc_feature (3053)..(3053): n is a, c, g, or t
  misc_feature (3095)..(3095): n is a, c, g, or t
  misc_feature (3137)..(3137): n is a, c, g, or t
  misc_feature (3161)..(3161): n is a, c, g, or t
  misc_feature (3164)..(3164): n is a, c, g, or t
  misc_feature (3173)..(3173): n is a, c, g, or t
  misc_feature (3185)..(3185): n is a, c, g, or t
  misc_feature (3215)..(3215): n is a, c, g, or t
  misc_feature (3230)..(3230): n is a, c, g, or t
  misc_feature (3281)..(3281): n is a, c, g, or t
  misc_feature (3302)..(3302): n is a, c, g, or t
  misc_feature (3341)..(3341): n is a, c, g, or t
  misc_feature (3353)..(3353): n is a, c, g, or t
  misc_feature (3404)..(3404): n is a, c, g, or t
  misc_feature (3464)..(3464): n is a, c, g, or t
  misc_feature (3533)..(3533): n is a, c, g, or t
  misc_feature (3584)..(3584): n is a, c, g, or t
  misc_feature (3593)..(3593): n is a, c, g, or t
  misc_feature (3617)..(3617): n is a, c, g, or t
  misc_feature (3650)..(3650): n is a, c, g, or t
  misc_feature (3695)..(3695): n is a, c, g, or t
  misc_feature (3713)..(3713): n is a, c, g, or t
  misc_feature (3722)..(3722): n is a, c, g, or t
  misc_feature (3770)..(3770): n is a, c, g, or t
  misc_feature (3785)..(3785): n is a, c, g, or t
  misc_feature (3797)..(3797): n is a, c, g, or t
  misc_feature (3858)..(3858): n is a, c, g, or t
  misc_feature (3863)..(3863): n is a, c, g, or t
  misc_feature (3881)..(3881): n is a, c, g, or t
  misc_feature (3920)..(3920): n is a, c, g, or t
  misc_feature (3947)..(3947): n is a, c, g, or t
  misc_feature (3977)..(3977): n is a, c, g, or t
  misc_feature (3992)..(3992): n is a, c, g, or t
  misc_feature (3995)..(3995): n is a, c, g, or t
ntnnnnntnnaaancnaannnnnttncngnntnntnnnannnnnnnaaantnncnnaannnttnnnnncnaanttnnaannnnnnncnannnnnnnnaanntnnnnnttnanttnnnnnnnanncnannntnnannaantnntnnnnnngnannntnnnnaaannnnngnnnaanttnnnnnnnnnnnncnnnnncnnnnccnncnnnnncnaannannnnanttnnnnnntnancnnnntnannnnnnnngggnnttnnnnnccnnnaaannntnnnnnngntnnngntnnnaaannnnnnncnncnnnggnnaantnnnnnnnntnnnnttnnnnnnnannnnnnnnnaaannnncnnnnnncccnaannnnncccnnnnaaantnncnanngntnannnnnnnccnnnnnaannnngnngnnnantnnnnannccnnnnantnantnnnntnnnnnntnntccaaaaaacnaaaaataatcggtgcattatagcggtaacttaatgttttgtcagtaaatggtgtttacgaacacccaagagcaccaatacgcctaaataaacgaccgcagccagtccaattaaccaaaccaaccaatagatacgcattaaaaatgtcatggctgcccattcttgaatngacgggcagttataccaaaccaaaccgcccatggctaaggctgcacctaaaactttcagaaaaaagaccgcacttttacgtgaaaaatggtatacatcctctttagctaaaccacgataaagcaaataagcatttaaggttgctgacatggcagaagcaatcgctaancccacataactaaatggaatcgccaatacgttaaagcccatattgctcaccatggcgatgatcccgattttcacgggcgttttggtntcttgncgtgcgtaatagccattagcnaggatcttaatcagcataaagctaagcaaaccggcattgaatgcccataaagaataagaggctgcatgcacatctgttaaggtaaaactgccacgcataaacaataccagtaacatnggttgggctaacacggcaataccaatcgcggcaggcacgccgagtaataaaatcattcgtacgccccagtccatngtgttgcgaaaatcaaccgcactttgggaagaattatcttctcgattcacatgatggcgagcaagcgtcggtaaaatcacagtggaaatngcnataccaaatagnccaagtggaaactctaatagacgatcagaataataaagccaactaatagatcccgtcattaagaaactggcaatgaccgtatcaagcancaagttgatttgacttacggaaaccccgaacaaggcaggaatcatcaatcgacggattttggctaccccttcatcatgccatgcccattttggttttacgagcaagccngctttcttcaagaaagggatttggaataaaaattgtaataaaccncctaagaagatcccgatagcaagggcaagatcaggattgtctaatcttggngcgaggaaaagtgcggtngcaatcatggcgatattnagtaaaacaggcgaaaacgacatcacgccaaatttgcctatcgtatttaaaatcgcgccngaaagtgccacaaaggtgacaaaccataaataaggaaaagtaatttttaagagtaaagacgcttgttcaaatttgtgngcatcnggtccgtcatttagccaatcggtaaaccagcccatcccnaagatcgccgccacaacaggtgatcccaccatagcaagcaaggtgacaatactgactaanccgcctagngtacccganactttcccgataaattctcgcgttttagaaagatcgcccgatttttgatattcngctaatacnggnacnaaagcctgagaaaatgccccttccgcaaataaacgacgtaaaaagtttgggatacggttagcgaatanaaacacgtctgccgccgcncctgcaccgattaaatgggcaatcaccacatcgcggactaaacctaacacacgggacactaatgtcatcccactcacgataatgccggattttaaaagtcgtttactcaaaataggggtctcttcaaaaaaatttgccttaattgtatagaatttttgtttttacgctatattccaacgaaaaaaactgataaaatcctgcccacatcgtttgtgtgagccaatagaaagcgctttttttaaataacgatgcttactttcggttgtgtctcaccgaaatcaacacaaattattcattgacaaaagtataaaaaatcggcatattctacgcccttattttgtcataatcatctaacagaaattttaggagtttgaccttggctaatatcaagtcagcaaaaaaacgcgcggttcaatctgaaaaacgccgccaacacaacgcaagccaacgctctatgatgcgtacttacatcaaaaaagtatatgctcaagtagcagcaggtgaaaaagcagcagctgaagcagcattcgttgaaatgcaaaaagttgttgaccgtatggcttctaaaggcttaatccacgctaacaaagcagcaaaccacaaagctaaattagctgctcaaatcaaaaaattagcgtaattaaagcattaaaacagcttaaaaataaaaccgcactttggtgcggtttttgtttgccgtaaaccgtcctgccacaaacgcccnataacnagcttgcattcccccctttaacctgtaaactaccccacaacttaaaaattaatcataaaataaacaataaatgaccaaaaaatcttttaaaaaancggatccgaattatcaaaaagaattagcnaaatanggtaatccgatcccaagcagagactacattctgcaaattatncgtgaaaataatgccccgatgagtcgggaagaaattctgaccgcactttcaattaaaagtgacgaacaacaagaagccatgcgncgccgcttncgngccatggaaaatgatggacanttagttttnactaaacgtaaacgctatgccttgcctgaaaaattngatttattcaaaggcatggtnattggccatcgcgaaggctatggctttttacaagtcgaaggnaaaaaagaggatctctttattcctaatcaccaaatgcaacgngtaatgcatggtgattttgtattngcncaacctgcnggcttggatcgncgtggtcgtcgtgaagtccgtattgttcgngtacttgaaagtcgnaaaaaacaaattgtcggccgtttcttcttagaaaatggttttagctatgtngtgcctgatgatagccgtatnggacgagatattttagtccctaatgaacaccgcaatggngcccgaatgggncaagttgtcgtggttgaattgcaagaacgatctgcctcctttactcaaccngttggcatcatcaccgaaattctgggtgacaatatggcaaaagggatggaagtggagatngcccttcgtaatcatgacattcctcaccaattcccaagtgcggtcgaaaaatacgttaaaaaattcacngaagaagtgcctgaagaagcaaaaaaaggccgtgtggatttacgcaatctnccactggtnaccattgatggcgaagatgcacgngattttgatgatgccgtatattgcgaaaaaagnggtaaaggctggaaactttgggtggcaattgccgatgtcagctantatgtgcgtttacgttcngcattaganactgaagcttataaccgaggtaactccgtttacttcccaaatcgtgtngtgccaatgctgccngagattttatcnaacggattgtgttcactgaatccacaagttgatcgcttgtgtatggtgtgtgaaatgcacntttcngccaaaggtaaactcacngactatcgtttttatgaagcggtaatgaattctcatgcncgtttaacctatacgaaagtcgcggcnattttagacggcgatgatgagctccgcacncgttatcaagggctngtnccaca

SEQ ID NO: 1068 - DNA, 4000 bp, Escherichia coli
  misc_feature (1)..(1): n is a, c, g, or t
  misc_feature (3)..(4): n is a, c, g, or t
  misc_feature (6)..(13): n is a, c, g, or t
  misc_feature (15)..(15): n is a, c, g, or t
  misc_feature (17)..(23): n is a, c, g, or t
  misc_feature (25)..(25): n is a, c, g, or t
  misc_feature (27)..(29): n is a, c, g, or t
  misc_feature (31)..(32): n is a, c, g, or t
  misc_feature (34)..(40): n is a, c, g, or t
  misc_feature (42)..(44): n is a, c, g, or t
  misc_feature (46)..(48): n is a, c, g, or t
  misc_feature (50)..(54): n is a, c, g, or t
  misc_feature (56)..(56): n is a, c, g, or t
  misc_feature (58)..(58): n is a, c, g, or t
  misc_feature (60)..(63): n is a, c, g, or t
  misc_feature (65)..(70): n is a, c, g, or t
  misc_feature (72)..(74): n is a, c, g, or t
  misc_feature (76)..(76): n is a, c, g, or t
  misc_feature (78)..(79): n is a, c, g, or t
  misc_feature (81)..(84): n is a, c, g, or t
  misc_feature (89)..(96): n is a, c, g, or t
  misc_feature (98)..(102): n is a, c, g, or t
  misc_feature (104)..(105): n is a, c, g, or t
  misc_feature (107)..(107): n is a, c, g, or t
  misc_feature (109)..(109): n is a, c, g, or t
  misc_feature (112)..(117): n is a, c, g, or t
  misc_feature (119)..(131): n is a, c, g, or t
  misc_feature (133)..(133): n is a, c, g, or t
  misc_feature (135)..(143): n is a, c, g, or t
  misc_feature (145)..(145): n is a, c, g, or t
  misc_feature (147)..(163): n is a, c, g, or t
  misc_feature (167)..(167): n is a, c, g, or t
  misc_feature (171)..(174): n is a, c, g, or t
  misc_feature (176)..(179): n is a, c, g, or t
  misc_feature (181)..(181): n is a, c, g, or t
  misc_feature (183)..(183): n is a, c, g, or t
  misc_feature (186)..(192): n is a, c, g, or t
  misc_feature (194)..(195): n is a, c, g, or t
  misc_feature (197)..(204): n is a, c, g, or t
  misc_feature (206)..(210): n is a, c, g, or t
  misc_feature (212)..(212): n is a, c, g, or t
  misc_feature (214)..(217): n is a, c, g, or t
  misc_feature (219)..(220): n is a, c, g, or t
  misc_feature (222)..(223): n is a, c, g, or t
  misc_feature (225)..(228): n is a, c, g, or t
  misc_feature (230)..(231): n is a, c, g, or t
  misc_feature (233)..(236): n is a, c, g, or t
  misc_feature (238)..(239): n is a, c, g, or t
  misc_feature (243)..(249): n is a, c, g, or t
  misc_feature (251)..(252): n is a, c, g, or t
  misc_feature (254)..(256): n is a, c, g, or t
  misc_feature (258)..(264): n is a, c, g, or t
  misc_feature (266)..(267): n is a, c, g, or t
  misc_feature (269)..(274): n is a, c, g, or t
  misc_feature (276)..(277): n is a, c, g, or t
  misc_feature (280)..(286): n is a, c, g, or t
  misc_feature (288)..(290): n is a, c, g, or t
  misc_feature (292)..(300): n is a, c, g, or t
  misc_feature (303)..(306): n is a, c, g, or t
  misc_feature (308)..(310): n is a, c, g, or t
  misc_feature (312)..(312): n is a, c, g, or t
  misc_feature (314)..(322): n is a, c, g, or t
  misc_feature (324)..(326): n is a, c, g, or t
  misc_feature (328)..(333): n is a, c, g, or t
  misc_feature (335)..(337): n is a, c, g, or t
  misc_feature (339)..(339): n is a, c, g, or t
  misc_feature (341)..(344): n is a, c, g, or t
  misc_feature (346)..(346): n is a, c, g, or t
  misc_feature (350)..(353): n is a, c, g, or t
  misc_feature (355)..(355): n is a, c, g, or t
  misc_feature (357)..(373): n is a, c, g, or t
  misc_feature (375)..(380): n is a, c, g, or t
  misc_feature (382)..(382): n is a, c, g, or t
  misc_feature (384)..(384): n is a, c, g, or t
  misc_feature (386)..(386): n is a, c, g, or t
  misc_feature (388)..(389): n is a, c, g, or t
  misc_feature (391)..(391): n is a, c, g, or t
  misc_feature (393)..(394): n is a, c, g, or t
  misc_feature (396)..(397): n is a, c, g, or t
  misc_feature (400)..(402): n is a, c, g, or t
  misc_feature (404)..(414): n is a, c, g, or t
  misc_feature (416)..(422): n is a, c, g, or t
  misc_feature (424)..(424): n is a, c, g, or t
  misc_feature (426)..(429): n is a, c, g, or t
  misc_feature (431)..(433): n is a, c, g, or t
  misc_feature (435)..(473): n is a, c, g, or t
  misc_feature (475)..(476): n is a, c, g, or t
  misc_feature (479)..(482): n is a, c, g, or t
  misc_feature (484)..(484): n is a, c, g, or t
  misc_feature (486)..(497): n is a, c, g, or t
  misc_feature (499)..(503): n is a, c, g, or t
  misc_feature (505)..(505): n is a, c, g, or t
  misc_feature (507)..(518): n is a, c, g, or t
  misc_feature (520)..(527): n is a, c, g, or t
  misc_feature (529)..(530): n is a, c, g, or t
  misc_feature (532)..(542): n is a, c, g, or t
  misc_feature (545)..(551): n is a, c, g, or t
  misc_feature (553)..(561): n is a, c, g, or t
  misc_feature (563)..(563): n is a, c, g, or t
  misc_feature (565)..(573): n is a, c, g, or t
  misc_feature (575)..(575): n is a, c, g, or t
  misc_feature (577)..(581): n is a, c, g, or t
  misc_feature (583)..(588): n is a, c, g, or t
  misc_feature (590)..(593): n is a, c, g, or t
  misc_feature (595)..(598): n is a, c, g, or t
  misc_feature (601)..(605): n is a, c, g, or t
  misc_feature (608)..(610): n is a, c, g, or t
  misc_feature (612)..(616): n is a, c, g, or t
  misc_feature (619)..(625): n is a, c, g, or t
  misc_feature (628)..(629): n is a, c, g, or t
  misc_feature (631)..(636): n is a, c, g, or t
  misc_feature (638)..(640): n is a, c, g, or t
  misc_feature (643)..(647): n is a, c, g, or t
  misc_feature (650)..(651): n is a, c, g, or t
  misc_feature (653)..(658): n is a, c, g, or t
  misc_feature (661)..(662): n is a, c, g, or t
  misc_feature (664)..(666): n is a, c, g, or t
  misc_feature (669)..(673): n is a, c, g, or t
  misc_feature (677)..(683): n is a, c, g, or t
  misc_feature (685)..(695): n is a, c, g, or t
  misc_feature (697)..(702): n is a, c, g, or t
  misc_feature (705)..(705): n is a, c, g, or t
  misc_feature (707)..(707): n is a, c, g, or t
  misc_feature (709)..(714): n is a, c, g, or t
  misc_feature (716)..(721): n is a, c, g, or t
  misc_feature (723)..(726): n is a, c, g, or t
  misc_feature (728)..(738): n is a, c, g, or t
  misc_feature (740)..(743): n is a, c, g, or t
  misc_feature (745)..(749): n is a, c, g, or t
  misc_feature (751)..(754): n is a, c, g, or t
  misc_feature (756)..(759): n is a, c, g, or t
  misc_feature (761)..(761): n is a, c, g, or t
  misc_feature (763)..(764): n is a, c, g, or t
  misc_feature (767)..(767): n is a, c, g, or t
  misc_feature (769)..(774): n is a, c, g, or t
  misc_feature (776)..(790): n is a, c, g, or t
  misc_feature (792)..(811): n is a, c, g, or t
  misc_feature (813)..(813): n is a, c, g, or t
  misc_feature (815)..(816): n is a, c, g, or t
  misc_feature (818)..(819): n is a, c, g, or t
  misc_feature (821)..(821): n is a, c, g, or t
  misc_feature (824)..(825): n is a, c, g, or t
  misc_feature (827)..(831): n is a, c, g, or t
  misc_feature (834)..(835): n is a, c, g, or t
  misc_feature (837)..(845): n is a, c, g, or t
  misc_feature (847)..(855): n is a, c, g, or t
  misc_feature (858)..(859): n is a, c, g, or t
  misc_feature (861)..(865): n is a, c, g, or t
  misc_feature (867)..(868): n is a, c, g, or t
  misc_feature (870)..(880): n is a, c, g, or t
  misc_feature (882)..(885): n is a, c, g, or t
  misc_feature (887)..(889): n is a, c, g, or t
  misc_feature (891)..(892): n is a, c, g, or t
  misc_feature (894)..(903): n is a, c, g, or t
  misc_feature (905)..(951): n is a, c, g, or t
  misc_feature (953)..(978): n is a, c, g, or t
  misc_feature (980)..(1004): n is a, c, g, or t
  misc_feature (1006)..(1037): n is a, c, g, or t
  misc_feature (1039)..(1042): n is a, c, g, or t
  misc_feature (1044)..(1052): n is a, c, g, or t
  misc_feature (1054)..(1077): n is a, c, g, or t
  misc_feature (1079)..(1083): n is a, c, g, or t
  misc_feature (1085)..(1089): n is a, c, g, or t
  misc_feature (1091)..(1094): n is a, c, g, or t
  misc_feature (1096)..(1096): n is a, c, g, or t
  misc_feature (1098)..(1099): n is a, c, g, or t
  misc_feature (1101)..(1102): n is a, c, g, or t
  misc_feature (1104)..(1104): n is a, c, g, or t
  misc_feature (1106)..(1106): n is a, c, g, or t
  misc_feature (1112)..(1115): n is a, c, g, or t
  misc_feature (1117)..(1117): n is a, c, g, or t
  misc_feature (1119)..(1119): n is a, c, g, or t
  misc_feature (1122)..(1125): n is a, c, g, or t
  misc_feature (1127)..(1127): n is a, c, g, or t
  misc_feature (1132)..(1142): n is a, c, g, or t
  misc_feature (1144)..(1148): n is a, c, g, or t
  misc_feature (1153)..(1153): n is a, c, g, or t
  misc_feature (1155)..(1158): n is a, c, g, or t
  misc_feature (1160)..(1161): n is a, c, g, or t
  misc_feature (1164)..(1166): n is a, c, g, or t
  misc_feature (1168)..(1173): n is a, c, g, or t
  misc_feature (1176)..(1182): n is a, c, g, or t
  misc_feature (1185)..(1188): n is a, c, g, or t
  misc_feature (1190)..(1196): n is a, c, g, or t
  misc_feature (1198)..(1203): n is a, c, g, or t
  misc_feature (1205)..(1205): n is a, c, g, or t
  misc_feature (1207)..(1211): n is a, c, g, or t
  misc_feature (1213)..(1215): n is a, c, g, or t
  misc_feature (1217)..(1224): n is a, c, g, or t
  misc_feature (1226)..(1226): n is a, c, g, or t
  misc_feature (1228)..(1232): n is a, c, g, or t
  misc_feature (1234)..(1234): n is a, c, g, or t
  misc_feature (1238)..(1240): n is a, c, g, or t
  misc_feature (1245)..(1245): n is a, c, g, or t
  misc_feature (1248)..(1256): n is a, c, g, or t
  misc_feature (1260)..(1265): n is a, c, g, or t
  misc_feature (1267)..(1269): n is a, c, g, or t
  misc_feature (1271)..(1271): n is a, c, g, or t
  misc_feature (1273)..(1277): n is a, c, g, or t
  misc_feature (1279)..(1284): n is a, c, g, or t
  misc_feature (1286)..(1295): n is a, c, g, or t
  misc_feature (1297)..(1302): n is a, c, g, or t
  misc_feature (1304)..(1313): n is a, c, g, or t
  misc_feature (1315)..(1327): n is a, c, g, or t
  misc_feature (1329)..(1329): n is a, c, g, or t
  misc_feature (1332)..(1338): n is a, c, g, or t
  misc_feature (1340)..(1340): n is a, c, g, or t
  misc_feature (1342)..(1344): n is a, c, g, or t
  misc_feature (1346)..(1347): n is a, c, g, or t
  misc_feature (1349)..(1349): n is a, c, g, or t
  misc_feature (1351)..(1354): n is a, c, g, or t
  misc_feature (1357)..(1358): n is a, c, g, or t
  misc_feature (1362)..(1363): n is a, c, g, or t
  misc_feature (1367)..(1367): n is a, c, g, or t
  misc_feature (1371)..(1373): n is a, c, g, or t
  misc_feature (1396)..(1396): n is a, c, g, or t
  misc_feature (1985)..(1985): n is a, c, g, or t
  misc_feature (1990)..(1990): n is a, c, g, or t
  misc_feature (1995)..(1995): n is a, c, g, or t
  misc_feature (2005)..(2005): n is a, c, g, or t
  misc_feature (2012)..(2012): n is a, c, g, or t
  misc_feature (2223)..(2224): n is a, c, g, or t
  misc_feature (2229)..(2231): n is a, c, g, or t
  misc_feature (2234)..(2234): n is a, c, g, or t
  misc_feature (2237)..(2238): n is a, c, g, or t
  misc_feature (2246)..(2248): n is a, c, g, or t
  misc_feature (2254)..(2254): n is a, c, g, or t
  misc_feature (2259)..(2259): n is a, c, g, or t
  misc_feature (2261)..(2264): n is a, c, g, or t
  misc_feature (2268)..(2275): n is a, c, g, or t
  misc_feature (2280)..(2280): n is a, c, g, or t
  misc_feature (2283)..(2283): n is a, c, g, or t
  misc_feature (2285)..(2287): n is a, c, g, or t
  misc_feature (2292)..(2292): n is a, c, g, or t
  misc_feature (2296)..(2296): n is a, c, g, or t
  misc_feature (2299)..(2299): n is a, c, g, or t
  misc_feature (2301)..(2301): n is a, c, g, or t
  misc_feature (2303)..(2303): n is a, c, g, or t
  misc_feature (2307)..(2307): n is a, c, g, or t
  misc_feature (2309)..(2309): n is a, c, g, or t
  misc_feature (2311)..(2313): n is a, c, g, or t
  misc_feature (2315)..(2316): n is a, c, g, or t
  misc_feature (2319)..(2319): n is a, c, g, or t
  misc_feature (2322)..(2322): n is a, c, g, or t
  misc_feature (2325)..(2325): n is a, c, g, or t
  misc_feature (2327)..(2329): n is a, c, g, or t
  misc_feature (2331)..(2331): n is a, c, g, or t
  misc_feature (2364)..(4000): n is a, c, g, or t
ntnnannnnnnnnanannnnnnnanannnannannnnnnnannnannnannnnnananannnnannnnnnannnanannannnnataannnnnnnnannnnnannananaannnnnnannnnnnnnnnnnnanannnnnnnnnanannnnnnnnnnnnnnnnnaaanaaannnnannnnantnaannnnnnnannannnnnnnnannnnnanannnnanntnnannnnannannnnannaaannnnnnnannannnannnnnnnannannnnnnannaannnnnnnannnannnnnnnnnaannnnannnanannnnnnnnnannnannnnnnannnantnnnnantaannnnanannnnnnnnnnnnnnnnnannnnnnanananannananntnnaannnannnnnnnnnnnannnnnnnantnnnnannnannnnnnnnnnnnnnnnnnnnnnnnnnnnnnnnnnnnnnntnnatnnnnanannnnnnnnnnnnannnnnantnnnnnnnnnnnnannnnnnnnannannnnnnnnnnnaannnnnnnannnnnnnnnanannnnnnnnnanannnnnannnnnnannnnannnnaannnnnaannnannnnnaannnnnnnaannannnnnnannnaannnnnaannannnnnnaannannnaannnnnaatnnnnnnnannnnnnnnnnnannnnnnatnanannnnnnannnnnnannnnannnnnnnnnnnannnnannnnnannnnannnnanannaanannnnnnannnnnnnnnnnnnnnannnnnnnnnnnnnnnnnnnnanannannanaannannnnnaannannnnnnnnnannnnnnnnnaannannnnnannannnnnnnnnnnannnnannnannannnnnnnnnntnnnnnnnnnnnnnnnnnnnnnnnnnnnnnnnnnnnnnnnnnnnnnnnannnnnnnnnnnnnnnnnnnnnnnnnntnnnnnnnnnnnnnnnnnnnnnnnnntnnnnnnnnnnnnnnnnnnnnnnnnnnnnnnnntnnnnannnnnnnnnannnnnnnnnnnnnnnnnnnnnnnnannnnnannnnnannnnanannannananaaaaannnnananaannnnanaaaannnnnnnnnnnannnnnaaaanannnnannaannnannnnnnaannnnnnnatnnnntnnnnnnntnnnnnntnannnnntnnntnnnnnnnncntnnnnntnattnnnttaanaannnnnnnnntaannnnnntnnntntnnnnnannnnnntnnnnnnnnnnannnnnnannnnnnnnnntnnnnnnnnnnnnnanaannnnnnnanannnannanannnnaannaaannaaanaaannnaaaaaaaaaaaaaaaaaaaaaanaaaaaaaaaaaaaaaaaaaaaaaaaaaaattaaaatattaaaaaatgcaataaagcggactatctactaggaatcgaaattgaaggaaataatttcaattacactattttacaaacacaactaattaatgacattttacaaaaaattcaaagtaacaaatattagaaaaacaaaacaaaacaaaacaaaaaaaaaaaaacaccatgttcaggaattaataaattattaaccaacaaaataagaaattttatataaaagtgccgtaggatcacttacatatttagcacattataccagaccagacatagcttatgtcacaaggtaaagttgcaagacattccgaaaatcctacaatggataactggaaacgaaagtaataaatattttaaaatacctaaactataaaaaagattacaaaatcaccatataaaggttaaagtgaaatactagcttatacagactcggattatgttgatgaattaaacaacatgtacagtaacaaaggtaatggaaatagtgaataaaatttttaaactaacccaaccataataggatacaaaatggtttttttttttttttttaaccacanaaaanacaanaattataaanaaaaaanaaaaaataaaaaaataaaataaaataaaataaaataaagtaaaataaaaggcacgacttataactagaggatttcaataaaatttccttggaacaggataggacttggctttgtgggtgaaaaaaaaaaatttattcacctaccatgaaaatatatgaaatataatacatactaaaaaaaaaaaaaaaaaaaaaaaaaaaaaaaaaaaaannaaaannnaanaannaaaaaatnnnaaaaanaaaanannnnaaannnnnnnnaatanaanannnaaaangatnaanangnagananannnannaanaantanannnanaattaattaattaattaattaattaataaatannnnnnnnnnnnnnnnnnnnnnnnnnnnnnnnnnnnnnnnnnnnnnnnnnnnnnnnnnnnnnnnnnnnnnnnnnnnnnnnnnnnnnnnnnnnnnnnnnnnnnnnnnnnnnnnnnnnnnnnnnnnnnnnnnnnnnnnnnnnnnnnnnnnnnnnnnnnnnnnnnnnnnnnnnnnnnnnnnnnnnnnnnnnnnnnnnnnnnnnnnnnnnnnnnnnnnnnnnnnnnnnnnnnnnnnnnnnnnnnnnnnnnnnnnnnnnnnnnnnnnnnnnnnnnnnnnnnnnnnnnnnnnnnnnnnnnnnnnnnnnnnnnnnnnnnnnnnnnnnnnnnnnnnnnnnnnnnnnnnnnnnnnnnnnnnnnnnnnnnnnnnnnnnnnnnnnnnnnnnnnnnnnnnnnnnnnnnnnnnnnnnnnnnnnnnnnnnnnnnnnnnnnnnnnnnnnnnnnnnnnnnnnnnnnnnnnnnnnnnnnnnnnnnnnnnnnnnnnnnnnnnnnnnnnnnnnnnnnnnnnnnnnnnnnnnnnnnnnnnnnnnnnnnnnnnnnnnnnnnnnnnnnnnnnnnnnnnnnnnnnnnnnnnnnnnnnnnnnnnnnnnnnnnnnnnnnnnnnnnnnnnnnnnnnnnnnnnnnnnnnnnnnnnnnnnnnnnnnnnnnnnnnnnnnnnnnnnnnnnnnnnnnnnnnnnnnnnnnnnnnnnnnnnnnnnnnnnnnnnnnnnnnnnnnnnnnnnnnnnnnnnnnnnnnnnnnnnnnnnnnnnnnnnnnnnnnnnnnnnnnnnnnnnnnnnnnnnnnnnnnnnnnnnnnnnnnnnnnnnnnnnnnnnnnnnnnnnnnnnnnnnnnnnnnnnnnnnnnnnnnnnnnnnnnnnnnnnnnnnnnnnnnnnnnnnnnnnnnnnnnnnnnnnnnnnnnnnnnnnnnnnnnnnnnnnnnnnnnnnnnnnnnnnnnnnnnnnnnnnnnnnnnnnnnnnnnnnnnnnnnnnnnnnnnnnnnnnnnnnnnnnnnnnnnnnnnnnnnnnnnnnnnnnnnnnnnnnnnnnnnnnnnnnnnnnnnnnnnnnnnnnnnnnnnnnnnnnnnnnnnnnnnnnnnnnnnnnnnnnnnnnnnnnnnnnnnnnnnnnnnnnnnnnnnnnnnnnnnnnnnnnnnnnnnnnnnnnnnnnnnnnnnnnnnnnnnnnnnnnnnnnnnnnnnnnnnnnnnnnnnnnnnnnnnnnnnnnnnnnnnnnnnnnnnnnnnnnnnnnnnnnnnnnnnnnnnnnnnnnnnnnnnnnnnnnnnnnnnnnnnnnnnnnnnnnnnnnnnnnnnnnnnnnnnnnnnnnnnnnnnnnnnnnnnnnnnnnnnnnnnnnnnnnnnnnnnnnnnnnnnnnnnnnnnnnnnnnnnnnnnnnnnnnnnnnnnnnnnnnnnnnnnnnnnnnnnnnnnnnnnnnnnnnnnnnnnnnnnnnnnnnnnnnnnnnnnnnnnnnnnnnnnnnnnnnnnnnnnnnnnnnnnnnnnnnnnnnnnnnnnnnnnnnnnnnnnnnnnnnnnnnnnnnnnnnnnnnnnnnnnnnnnnnnnnnnnnnnnnnnnnnnnnnnnnnnnnnnnnnnnnnnnnnnnnnnnnnnnnnnnnnnnnnnnnnnnnnnnnnnnnnnnnnnnnnnnnnnnnnnnnnnnnnnnnnnnnnn

SEQ ID NO: 1069 - DNA, 4000 bp, Escherichia coli
ttctcgaactccttagcgaacttgttgatctgctgcatgatctcagcagccgttcgttcggtatgaaaactgtcggtcgcctggcgaatcacgacgaggaaggcgtagagcgtgagcggtgagcacagcaccaccttgcgttcgagtgcccagtcgatcaacgtcgggtctgcctcgtggacaaaccccgagatgctctcgttcggcacaaacatcaacacgtagtcgaccgcgtcgtcggtgctttggtcgatgtagtcgcgtttggcgagtgcttcaacatggctgcgcaccgcacgaacgaattcgcttctggtggtcgcgcgtgtggtgtcgtcgtcagcggcgagatgtgcggcatagcgatcaaggggaaacttcacatccatgaagagcacccggtcgggcggcatggaaaaggtgaagtcgggacggccaccagcggcggtggtgtcttgtttggagtaattgatgccctcaacgaaaccggcagcccggatcatgtcctcggcaagtcgctcaccccactgcccgcgtttttgtgaacttgacagcacttcgttgaggttctgggtgcgttgtgacagggcggtgacggcatcactgacactggagaaatggccggtggtcatttcgcggagccgttgcaactcctgggcgagatcattgatgcgttgccccatatcggtctggacgttgcgcagggtgtggtcgaggacttctgcccgttggccaagttgttcaccgctttgcgcggtgaccatttcggtaacgatgcgggtggtttcggcacggtcggctgcggcgcgttcgtgcagttcacccatggcatcgcgaagtgcctcggcgttcgccaactgcacttgggcgatgagcgccgaggtatcaatgggggcctgaggtgcggcgacggggttgtccgccgggcgttgcaggcggctaacgaccacggtggcaacggctgctgcggccacagcagcgagcacggcgacgagaagggtgtccatatgccaaccctaaacgcggggtgtggcagcacctgtgacgttgacggctcggcgggtggccacgggcggctacggtgccggcatgatcaaacttactgtgtcctacgccgctggcgacgacgtcaccttcgaccacgactactacgcggccacgcacgttccgatgtgcaacgaggcgttcaatccggtgcgcaccgaaatcgagcgcggtgtggacggaccggctgtggccgccgtgtcgttctacttcgactcggctgaggacatgcaggccgctatggcgtcagagcgcatgggcgacatcatgggtgacatcgtgaactacacgaatgccacaccgtcgatgcagatatccgacgtcgtcggctgaaccaactcggctgaaccaacgacgttggcggctcacatctcgaggccgcagttccccataatcatcatcaactcgccgaacatggccatgccggtggcgtcgtcaacttcttcgccgaggaaacttgccaccatcacctcgcggaccgactcgctcgctgtgaacgcctcggacatgcaggtggcctgctcggcggtcatgccctcgctcatgtccgggtcaccgagcagcatgtcgactgcagagatgcattcaccatcaaggagcagatcggccaggccgtttgcttgatcatcgttgaggctcatatcggcgagcatctcgtcgtcgctgaggtccaacgcgtcggcggtgaggccggcagcgatcaactcttctgcgccaatcgcgttgacgaaacgggtagcgaaacactcggcctcagtggcgtcgaggcccatctcggcatcggcagcgaattccaccgccagcgcgtcaatcagtggggccgccagctccgaggattccgatgaggagcccgaggactcatcgtcaccaccgcatgcggcgagcgtgaacgaggtcgcagctaccaccgcaaggctgatgaaggaacgagcacgtgtcattaactcatcatgtcacaccgacgcgtgccagtcggcgaggtcacatctcgaggccgcaggttcccatcatcatcaacatttcaccgaacatcgccataccggtggcgtcgtcgatctcttcgccgagcaggttggccacagccacggcgcggatggtgtcgctgccagtaaacgcatcggccatacatgaggcctgttcctcggtcatgtcctcggaagcttcagggtcgcccatcatcatgtcgacaaacgagatgcactcgccgtcgaggagcagcgtggccaaatcgtcagcctgcgattcggaaatatcaaacggcgtgccttcatcgccgaacacatcgagcgccatcgaatcgggcgtgactcctgcggcttcaagtttgtcaacgccgaggatgttcaccattcggccagcaaagcactctgcctgctcctgattcattgccatttcagggtcggcttccagcgcagccgcggccgctgcgacgaacggtgcagcgtcggcagaaggggcagaggaatcgtcgtcaccgccacaggcggctaggccgaatgaggttgcggtcacaacagcgagagaaatgagggtacgtccacgtgtcatagcgtcatcatttcatggtgtacgtacttgagggtggtcttttatatgtgcacgtctcgtacctgccatcgagacggggaaacgcggtgctcggccagtcaccgaacaacgtcgctcggttagtgtccggccatggcattcaagctcggatacgcagttggctattggtcttcgggtccgcccgagggcgcgctggagggcattaaagaagccgaacgactcggtttcgactcggtgtggtcagccgaggcctacggttctgatgcactcacgcccttggcgtggtggggcgcggcaaccgagcgtgtgcaactgggcaccggcatcgtgcagatgtcggctcgcacaccttctgccaccgcgatggcagcgatcaccatggatcacctgtcgaacggtcggttcatcctcggcctcggtgtgtcgggtcctcaggtggtggaaggctggtacggccagtcataccgacgccccctcgaacgcactcgtgagtacatcgaggtggtgcgcaagatcgtcgcccgcgatgccccagtgacctatcagggcaaccaagtgcagatgccctacggcggcgacgacgcgaccggtctcgggaagccactgcgttccacagtgcatccgctgcgtaatcacattccgatttatctaggtgcggaaggcccgaagaacgtgtcgcttgctgccgagatctgcgacggatggctacccctgttcttctcgccaaaagaagacgccttctaccgcgagcgtctcgcggagggatttgcagcctcgggcgaggagaacaaggccgagcgcttcgaagttgccgccccaatgctggtcgtgccgggcgaggacgccgagaaatgtgccgacatggtgcggcccatgctcgcgctctacgccgggggtatgggcgcccgcggcgcgaacttccacttcgatgtgtttgcccgtatggggtacgaagatgtcgcactcaaagtgcaggatctgtacctcgagggcaaaaaggacgaagcggccgcggcaatcccattgaagatggtggaagacgtcgcactcgtcgggccaccggagaagattcgtgacgagatccctcgctgggaggacacctgcctgaccacagtgctgctcagcggaccggcgaagttccttccgatgctcgccgaactcttctcctgatcacgccgcaccactcacgggcagcccagcccgtggagggtcgcgcactcacgacacagccatgcggtgccctctggggtgctccaacgctgcgccagtgttgacccgcacgacatgcagtccggatccccggctgtgctgttggacgcgccggttgtgctcacggcggtatccagggcgttgctcaccggacgttgctgcacgccgtcgaccgtagcgcggcacccacagcgatgcg

SEQ ID NO: 1070 - DNA, 4000 bp, Escherichia coli
  misc_feature (154)..(154): n is a, c, g, or t
tccaaaacccatttcttcaatagatgcgccttctggttcagccccaacatttgaatcagggccagctccgtgacctttaccaaaggtgtgacctcctgcaacaagtgcaacagtctcctcgtcattcattgccatgcgtccaaaagtttccctnatatcaacagcactttttaacggatcaggctctccatcaggaccctgaggattaacataaattaaacccatttgaactgccccaagaggattagctaaatcccttactccactgtatctctcattagtgagccactctttttcagcgccccaattgatatcttcttcaggagcccaaatgtctggacggcctcctccaaatccaaaggtttttcctcccattgattcaatggcaacattaccagccaggatcaataaatctgcccaactaatttgttttccgtattttttcttaattggccaaagaagccttctagccttgtctaagtttccgttatcaggccaactgttaagaggtgcaaatctttgagcgcctgtacccccgccacctcttccatctccaatacgatatgtgccggcagcatgccatgtcattctgataaaaaatggtccgtaatggccataatctgctggccaccaatcttgcgaatccgtcattagatcgtttaaatcttttttaagagaatcataatcaagctttttaaattcttcagcataatcaaaatcaccgtccataggatcgcctttttgatcatgttggtgaagaatgctcaggtttaattggttaggccaccaatccttattagatgttccagtcgagctatttgaagataggcttccgtgcatcactggacatttactttctgtttcgttactcatagtttaattccaaattaatgttaaatttttaccgcaaaagctgtggtatcaaatagcttacagatattatatgtattggtaaatatataaaaaaagaatgttatattcgattttataaatgataataaaagccaagttatgcttactcttaaacaaattgattatgctttagcggttgcaaggaatctacattttaaaaaagctgccgaggaatgttttatttcaccctcaacccttagcaatgccattactgaattagaggctcaattgggcgtaaaaatttttgaaagaagcaataagaaagttatcgtaacaaatcttgggcaggagatattagacaaagcaagaaaaataaaattagaagtccacaatattcatgaacttgctcagcataactcagagggtctcagccactctttatcaattggtattattcccacaattagtccatattttcttccaattgttctgcctaaacttcaaaaggaattctctaatctgaaattaaagatagaggaaggtcaatctcaaattcttactaatagggtgaaggaaggtgatttggatatggctattctagctttaccatatgatgttcaaggcctcctaagctttaaattttgggaagaggactttttctgggtttcacatagactaaataagaatgctggaaaatctgaaatcaaagcatctgaactagagcattcagaactgatgcttcttgaagatggtcattgcttaaaagatcatattttagacgcatgtaatatttcctctccatctcaatattccctcaaagcttcaagtttaaatacacttattcaattagtgaaaggtaaaatgggaacaactttggttccgaaaatggctttaaaagaattggtcggaaacaaaaaagacttatctatttctcatttagctgagcctggaccgcatcgtgaaattgctttgatagctagaccaaattatgcaggaatggaaagtgttgagctgcttatagatttctttggtaaatccttaaaagaattcgatcaagtttaattctgctcagggagatctaagctatctgtttttttccatttgagtgaaaaagttcgtgagataaacttagtagcctccccccttatctcaatcacatcagagtaaataatacccatgtctaatttataaggtttgtcatcttgatcaaacatgtggcttgcaatgcaatatgtttctcccttataaatattttcctcccattcaccttgaacattcatcacttgatgcattgtgcttttataattttcaagttgctgcattgctgctataaaattttctaaaccaataatctcaaactcacctagcattgaaaattcatcccacataatagagctcaatgaagaaaattttctttgatcaataatggatgcataaagattggataactttgttgggacaaggtctttgttcatgatttttttacctctgaaatcagtttaagtaccttgtaaatatcatcaggcgcttgaacgaagttgattggaaaaacttctatttcatccaaaccagctgccatagatttttccaattcattcaatgttaaatctatattaggaactccgctatcatcaacacatgtgggaagttggcctcgaatccttggttggtcctgcctaccctcattaacaaaagcttcaactaagatatcttttccctgggaaatgaaatctctacttgtttttattggaatccatccatgcccaaccttagcaattctttgtgcattttcatgtgtcatttttaacccgaataataatggcaaatcttgaccttgagcaggtttaggatggcaccaaatatcatcaaaatgaaagtgctttccatgaaaggaaattgggctatcttgccaaagagacttgcatatatctaaagtttcccaaaatatttcagcacgatcttcaaaattaactcccgcggtatcaaattcttctttttgccaacccaaacctactccaagctctaatctacctttagatatagcatctaaagtagcggctgtcttagcaagtaatgcagggtttcttaatggtgcaattaaaattgcagttgccaatttaattttagttgtgtgggaagcaatcatggttagcaatgataagggctcataccatggggcttcagatggcagggggaattttccaaatggatatttatgaaggttttttcccattaccacatgatctgtaacactcacagagtcaaagcctaactcttcacccatttgagaaatttcaatataagatgaaatatctcctccataaaagttttccaaaccgaaaagacctaacactagcttcatagaactatccatttattatttatttgattgtacgaatattttttatctaatgcacttgggctggaatcagaaaaaaaacccatcactgcccaagtcagcaaaaaacttttaaattctagggtcatataggagtgtgttttaactataaaggaattaagattaacacatgacaaatatagatcagctaattaataccttaactttagatgaaaaagtttccctgctaagcggttttaattcttggtataccaacaagattgataaaaaaaatattcccagtattaaaatgtcagatggtcctaatggggttagaggtgactcaaattctggtaagacttcagcatgttttccatgcgcaatatccttgggttccacatgggatcttgagttaattaaaaatattggtgttgctttgggcgaagaagcgcaagcaaaagatgtagatgttctgttgggtccaaccataaatattcataggcatcctttaggtgggagacactttgaaagtttctctgaagatccatttttaactggaaaaattgcaaccaattatgttcaaggcgttcaatctaaaaacgtcgcagcgtgtttaaaacattttgttgggaatgatactgaatatgaacgtcatgcaatcagctcaaatatagatgcgcaaactctaagagaggtttatttgctcccatttgaaatgggcatcaaagaaggtaatgcaaaagttgtgatgagtgcgtataacaaattaaataatatattttgcagttctcatcaagaattgctgattaa

SEQ ID NO: 1071 - DNA, 4000 bp, Escherichia coli
  misc_feature (738)..(738): n is a, c, g, or t
  misc_feature (2873)..(2873): n is a, c, g, or t
tatttaaattaggatattttttttgtgcagattccattattggtgtccactctgacatagctaaggttgtttgtgcaagtaatgctactttttcactggatatgtttatttcttttaaatcatcttcgttctcgactaaaaacattgagtcaggtgctacacctaaagctccaagtgcctcatcatgatttttatgacctacgtaaataatttgttgtcctgcttcactaaacttctttgcctcatgatgcaccttagttactagtggacacaccgcattgacttgaatggatgagagagaattaaattcattttctattttcggtgaagttccatgagctgatagcattacaattgcattttttggaagttcttcaggggactcaataaatttaatatttttagttttaaaacgttctacaatccaatcgttatggacaatttcatgataacaataaatagtttcatcatagattttcaacatccatgtcagtgctttaattgccatctccacaccagcgcaaaagccccttggagtaactaaataaagattgtttaccatatcagtaggatagctatatttaaattatgactaaaaacaatatcgatgaagttttattaattgggctaccaaactctggtaagtcttcattggttaatgcattgtccagaaaaaaagtatcaataattggttctacaccaaatacaacgcgagataaagtctctacaacaattaanagaaatgataaagtttttaatatctctgatttacctggatacctagaagacccagatgaattaaatgaaaagtttcaaaataaactaaaagcctatcttaatgatgcaaaattaatcatgtttgtaatagacgtgcacaccacaaattattctggattagataaaatacacagccttctacaaaagaatataaataaagaacaaaaagtcataacagtctttaataaatgtgaaaactttaaaaagtttgaactgaatacagagttatacaaatacatttacgattcagactattatgtctcatctattcataaattgggtactgaagaattaatggaggcacttacaaaaagcatgtcatctaatacggattcgattaaaaatacctacaaatcaatagcaataattggaaagccaaactcgggtaagtccacattgtttaataagctcttgaatgaggaaagagcaattgtttcaagtatttcgggtaccacaagagatagattagaagaaacaatcaagttcgattcggattcttataatattattgacaccgctggtgtgccacgtaaaaaacaaaaaaaccagatagatagatacgcatcatctttagcagttggtcaattagaaaattctgtaatagcttttcttgttgtagatgcaaaacagggaataaattttgaagatatgagattaattagtgaatgcattgaaaacaaagtaacaccaatattaattatgaataagtgggatctgttaaaagaagaagagaaactttttataaacaaaaacattgcttcattgctaaagaaatattcatggttaaagattttaagaatttcagctcttaatggtaaaggcgtaaaaaatctcaatactgtaatttacgagttacaaaaacagctttcaactcgtattacaactcatgaattaaatatacttttcagagaaatttggacaaaaaaaccacctcatccattcagaggaaggagagcgaagttaaaatatgtgacacagtacgatgtttaccctccttcttttagttttattttaagtggtagagtcccaattaattatcaaaactttatagataatagactacgagacacatataattttgacaatatatgtttgaacataaaatttaaaaattaacatggaaaactttggcttcaaaataggagtattcttgtttgggttctatctgatattgaggttatttcagtttttaatcaacttagtcatttaagagaaaatacaacctatttataataaaatcagacttttagattgaaatgcctataaatacacctaatattaatacatccacacttacgtgtggattttgtatacaaaaggagaaaaattgagtaatttcaaaggatccagaagttggcgccttatcttacttttctcagtttttgcattagttgtggttgcctgcggaggcgacacagcagaagaagaagttgctgtcgatgagacagaaacaactgaagctcctgctacaactgctgcggcagctgaagaagcagctccatcaggacctgatggtgtttataagatggcgatcttctcagatccacaaacacaaaattactggaattatcttgatacagaaacagatgtgtggacacaatacgtgatgtccggacaagctgtgtcattattctctatttcatatcctaactaccagttagttacaggtatcgcagacgaacttgttgagacctcaactaacaacggtgacggaacatggacttatagtgttcctataacagaaggatataaatggagtgatggttcagacctcacagccaacgatatggtatttacatataataccgcaaaagatcttggcctcttaagtaactgggaaacaaactacccacaaggtagtggaacagacccagctgctgagggatatgcacagggtattttaaccctcgttgctagtgatgcttacactgtagagataactctaaactttgatgccgggttagcttcatggcagtatcaaattgcacaagcaccaatacttccagaaagttattgggcgcaatatgctactgacagagaaacccttttagcagcctcaggagctgacgctccagtagctagcgctttcgtctacnacaaagtagaacaaggtgctttttacacatgggcatatgatgctaatacaatgtgggatggtggaaccaccacaatttataagagtggtaccacagtcgaatgggataatggaaaagctccagcaatcaacaattcatttggtgatacaactggcgattcattctcatacacagcaggaccttatgtaggaactgttgagttcacattatatggtgatcaagatgctgcttatcttgcattccaaaatggcgaagttgatttcgttcttaacccattaggtgttaagagaaatctttttgaccaattatccagagttccaggtgtcgaaactgtttccaacttaggtaacggtatgcgatacatggcattcaacactagggttttccctggaagcgacaaatcttttagacaagctgttgcatgtatttctgataaagaattcgtgttaaacaacattcttcaaggtgttgctgtaaatatggatggtcaaatgcctgaagcgttaacagcttgggttgcacctgtaacaggtgtccttgctgattgtgctggccttaatgctgaagaaagattcaacaaatcagttgaaattcttcaagcaggtggttggacagcttcagactggggttcccatgctggtggtgctgaaagagcagtcgctccaacaggaattaaaggaccaggaggagaaacacctccgtcagacatgttgctatatgcaccaggtgctggttacgatccattgagatcaacaatgtccttatttattgctgattggatgcaacaacttggacttgacgtaacagcgagacctaccggtttcaatgttattgttgacaaggtgttcacaccagagacttgtgaggattggtatttctacatgcttggttggggtttaagtgcattccctaatcaccctggagatttcttcaattccaagaacgacacatgcgaaggtggctataacacacctggttttaacaacgcagaatttgacgcattagatgctgaattccaagctgctaaaacaatcagtgatgctattgtcctatcgcaaaaaatggaagctatattatttgaagaaatgccatatttggtattattcaacgtacctacattagaggta

SEQ ID NO: 1072 - DNA, 4000 bp, Escherichia coli
  misc_feature (489)..(489): n is a, c, g, or t
  misc_feature (1611)..(1611): n is a, c, g, or t
  misc_feature (1986)..(1986): n is a, c, g, or t
  misc_feature (2037)..(2037): n is a, c, g, or t
  misc_feature (3769)..(3769): n is a, c, g, or t
  misc_feature (3801)..(3801): n is a, c, g, or t
cgtacttaccggggtacatgaacgaaatatctccattgtaggtgtagtcggactgggtgctgtgactggtttgctttcattttcttctctgctcaaatggatgttaactcgattccaacaccaaacgcttgcggtactagttggttttatgttaggggccctacccaagatttggccttggaaatatccttccgatcgagctatggatatagtaaccccctggaattttcctctagaaagccaatggcctatggctctttgcttgatgttgctaggtattttcttaattttagggttagagcgtttggcccaaaagccagatgctgcataacatgaaagcgcctgctgagctaaaatctcatattttcacttttcttaaaggcttaaccatgggtgcggccaacaaggttcccggtgtatctggtggaattgtcgcctttgtttgggggttttacgaacgattcatctcgtcgctaaaaaaaatggatntacatgctttcactctattaaggcatgggaaattcaaggaatttaagcagtatactgattttgtctttttaggctatttagtcatgggcatgatattcagctatttcagtgtctccaaaatcttggattactttctaaaaaccagagagctttacgtctggtcggtgttttttggcatgatcataggttcggtgtattatatatccaagagttttggcggatggaacagcagaaacagaagttttggactcctgggactcatcctaggtatcagcatcagctttttaagtcctgcgcaagaaaacgaccactggctctttgttttcttctgtggtatgatcagtgtttccgggatgacattacctggactatccggatcatttatactcatgctgatgggcaactatgtgcttttactggttgaatcagtcaatgcattgtttgacacattgactgaaatagcacaattagagtttgggtttatacacgataccgctcggctagacgccttgttcaccctgggtgtcttcacccttggatcagtggtaggattgattactctttctcactttattggctatttactcaaacgctttcacgatcaaacaacggcttccatcattggatttatcacaggatccctaggtgttgtttggccatggaaagaggctgattacctttatgacgctgcgggaaatgtggtcaccgacagttatttgcaacccgtagtcattcaatttactcgatacataccaaaactaaacgacgctctaaacctctgggccctggtgtttatcttatccggaatcgcattactcgtatttttagaacgctatggagcccaaaaaaaatagatatggccttttaggcagaaacatctcctattcattttcccggggatatttcacccagaaatttgaatcagaaggattaaccgattacagctacgaaaactttgatttgcccgatctttcctcactgcgctcacaagtgttcgacgatgcttccatcaagggtattaatgttaccataccctacaaaacagaggtaattccccaactcgatgaactcagaggagccgcagacgaaattcaagcagtgaatactattgcccgtgagggngatcgtttgatcggctacaatacggatgtaatcggctttaaaaactcgttgcttccccacttaaaaagccaccacaaacaagcacttattctcggaaccggtggtgcgtcaaaagcggtggcctacgtattagcacagttaaacatccactatcagtgggtgtctcgcaccccagatcaaggacaaattgcgtatcgagatatcgatgaaaagatcgcagggagccacctgctcgtgatacaatgcagtcctttgggtacctaccccaacatcgagcaaaaacctgaatttccctaccgctatctaaccgaacggcatttgttgtttgatttgatctacaatccagaaattactgcttttatgaaggctggtatntcccaaggcgcacaagcagtcaacgggtatcagatgttggtagaacaagcngaagaagcttggcgtatttggtcaaaataacgccctgaaaatagacaaagtaattagccttcaattttttggaatttgttgggtagttagtatcttactgaccggtattaaccatgaaacaccactgatatgtcagaagagaaagcgccagaacaacagaatactcctcaagaagttacgagtcctgttgatgcgcatttgcacgaaatcgaccactccaatgctgcagatgcagagcttgacaagcatcaagacaagcaccaaataccctttttggactattccaatatggcgctggagaatttagtgggagaattacaacgcttggtgaaaaatgaatctgtctcattgatcaaaagacacgttgacgctataaaaaattcatttgaccaacaatttcaagcattatttgactcaaaaaaagaggagtatctagcgcaaggcggtgttgagatggattttaaattcagcagcgtagataagcgtcagtttaatgaagtatataaagagtatcgcgaaaagagagctgactactatcaacgtcaagaaatacagctgaaaaacaacttagcgcatcgttgggagttgattgagcgcctcaaaggattaatctccatggaggaggatatcaataccacatacaacaattttaaagtgatattagcggaatggaaaaatgccggtccgattccacgggataaatacaacgatgtttggcgtacgtatcaccaccatatggagatcttttatgatttcctcaatttgaatcgcgagttacgggatcttgatttcaaacacaatctagaggaaaaactaaaactggtagaacgcgctgaagagttggcggagcaaaccgatattcatcaagcttttcaagagttacaggtgctacacaaaatctggaaagaggatttgggccccgtagacaaggaacacagaaatgagatttgggatcgtttcagcaaagctacaaaaacaattcacgacaagagacaagcttactttgcctctttagacaaagacctcgaagttaatcttcacgctaaagaggagattctcgaaaaaatcaaacagctgacactccaggccccaacttcccataaggaaatccaaaaccagataaaatctatggagtcattacgccaatcctttatggaaattggcaaagtgcccagcaaacaaagcgataaaatttggagaagtttcaaagaactaagcagaacattcaataagaataaaaacaacttctttaaaaacatcaaaaaagatcaaaacgatcacctaacgcaaaaaagagctctgttagaaatagcccaggggttggttgaagctgaaattaacgaggcgaatacggcagaactcaaacgcattcaggcagcttggaaagaggttgggcatgtgccgagaaaattctcagatgcgctatggaaagacttcaaatccgcatgtaatgcatatttcgaacgccttcaagcgcataagaaaacacaacagtccccatcagcagatagacaaacacgaagagggcatacgccttctgcgccagctcaacaatcagagcgctctatcattcggaaaaaaatggaagaggagcaggataagatacgtcagctagaaaataacctagcattttttagtcatgtccccgaggataatcctgtggttaaagatgttcagaaaaagatcgatctactacacaaacagctggacgcgttaaaagaacaactcaaanaaatcaatattcaggagcatcaacagaaaaangcagcgcaagaagctgaagaatctaccgaagctcaggaagagtccgctgaataaaaaaaagcctccagttggaggctttttttattcaatataccagagggctacttagccacgtttactgctcgagtttcgcggattacggtaacctttacctgaccgggataagtcatgtctgtttggattttttgagagatttcaa

SEQ ID NO: 1073 - DNA, 4000 bp, Escherichia coli
  misc_feature (1096)..(1096): n is a, c, g, or t
  misc_feature (1963)..(1963): n is a, c, g, or t
  misc_feature (1969)..(1969): n is a, c, g, or t
  misc_feature (1977)..(1977): n is a, c, g, or t
  misc_feature (1981)..(1981): n is a, c, g, or t
  misc_feature (1986)..(1986): n is a, c, g, or t
  misc_feature (1991)..(1991): n is a, c, g, or t
  misc_feature (2841)..(2842): n is a, c, g, or t
  misc_feature (2844)..(2844): n is a, c, g, or t
  misc_feature (2884)..(4000): n is a, c, g, or t
atttaattcttttattttaagtataatatataaaaaaaattattagtacatgattatatttatataataatctatttatttattatgattattattaccattatctatattttgatttattttcatatcagatatttccatatcattttcagcacttttttggtcattattatctggaatatttctatattgattttttaattgttgttgtatttgttgtagttgttgttgctgttgctgttgctgttgttgcttttgattattattcatttgatgatgatgatgatgttgagcttttctttcacgtgctttacgttcttctctttgtaacatttcatacaataaccaatatgtacttcttattggatgtggacgacttggatctgcttcaacaaatgctttaattacatcttcacgtttatatccaaaatgtgaaagtcttttaatgatatcttgatctaataatttttcatctctaattacaggacgaataggcatataatttgatggtggatgactataaccttcattaacccatctatgatgcattacttcatcaagtgttgctcttttgtgaggatcaactgtaattaatcttgaaatcaaatgtctagcatcttattaaataaatttaattaaataataataaaaaataaaaaaaaaaaagattttaacgaaaatgttatttttataaaatatataattattaaatttatatatttatattctacctggcattaaataatctggaacagtatatgttccactagcaatttttttatataattctttcatattagcatcatcaaaaggcaaatgaccacataataatgcaaataagataacccctaaaatttattattatatttaaaatgaaaatatttcatttaataattaattattaatatattaaataattaatttcattctagtttatttatatgatataaagtagaaatccatacctaaactccacatatcaacttctggaccttcatattttttacctaaaatcatttcaggggcagcataaaatggagatctaatttatttaattttattcatttttttttttttttatttttatttatttttnttttattttttattatcgaaattattattacatatatacatatatattatttttattatttgactatttattaactataattcttttcttagttaatttttattattatttcatgaatattatttacccacaaaacgtatcaagataaccattttcgatataagtatttccaaaaccaaaatcaataattttaattgattttgtttcatccaataataaattttctggttttaaatctctatgaataacactattctaaaagtaaaaatatatataattcattatgttttaaatataataaagaaatattaatatattaaacaatattattatcataattaaaaatataaatatattatatatgttatatcaaataaaagtaataatatattataatatagttatattatatatataataataataatgtaaaaaattatttttttttcctcaattttcaatattaaccttatgacagtaatctacagcactcagaaccattctaaagaaggctcttgcttctttttctttaactcttttatgggccacaatataatcaaaaagttcacctccaactgcatattccattactatatagatacattctgttgtttcaataacatcatatactttaacaatatgaggatggtaaagtaatttcaaaaaacgaatttcacgttgtaatcttgcaatttgtttttgtgattgtaactgagatttttcaataatttttacagcaaccttatataatataataggatttcaatattgagagataaattaatgtaaataaatatgcattttattaatatttattcaataaaaatttgttaattaattactatattttttttttttttttttttntttttntatatatntaanttttntaaantgtaaaatatatataaaaatataaaaatataaagatataaagatataaagatatatattactttttcattagttttcatatgtatacccaattttacttttccataagttccttggcctattgttttttcaagtctataatcaccaaccataagatttgcattttcggacatgattattcaattattaaaattacttttgaatgttatttcgttgaaattaaaaatttttctcaatataatatttgagctttaaatataataatatatatatttagataataataataataataaaattattataataataattataataatttataataacattaattttatcaatttattggaatatttattagttaaattaattatgatatagtcatatatatatattttttttaaaattaataatatatttaattataataatattatttacctctaatttcaatggttatctatttatattgattattattttttattatcagtactattattaaatattagtattgatattattattaatactattattaatcttattattaatcttattattattattattattattattttaaaataaaataatattacatttaatattaaatgtattatttattttttatattactgaacaaaaattttatacactataaggaataaaagttaagaaaggaagagaacaataaaaaatataataataatggtgatgataattataataactttttttatattatttaaatataattattataattgaatttaaaaataattctgtagtttttttcttttgttttatgcttttttttttttttttttttttttttttttttnnanaataaaaattattatatatttattataattaatataaatnnnnnnnnnnnnnnnnnnnnnnnnnnnnnnnnnnnnnnnnnnnnnnnnnnnnnnnnnnnnnnnnnnnnnnnnnnnnnnnnnnnnnnnnnnnnnnnnnnnnnnnnnnnnnnnnnnnnnnnnnnnnnnnnnnnnnnnnnnnnnnnnnnnnnnnnnnnnnnnnnnnnnnnnnnnnnnnnnnnnnnnnnnnnnnnnnnnnnnnnnnnnnnnnnnnnnnnnnnnnnnnnnnnnnnnnnnnnnnnnnnnnnnnnnnnnnnnnnnnnnnnnnnnnnnnnnnnnnnnnnnnnnnnnnnnnnnnnnnnnnnnnnnnnnnnnnnnnnnnnnnnnnnnnnnnnnnnnnnnnnnnnnnnnnnnnnnnnnnnnnnnnnnnnnnnnnnnnnnnnnnnnnnnnnnnnnnnnnnnnnnnnnnnnnnnnnnnnnnnnnnnnnnnnnnnnnnnnnnnnnnnnnnnnnnnnnnnnnnnnnnnnnnnnnnnnnnnnnnnnnnnnnnnnnnnnnnnnnnnnnnnnnnnnnnnnnnnnnnnnnnnnnnnnnnnnnnnnnnnnnnnnnnnnnnnnnnnnnnnnnnnnnnnnnnnnnnnnnnnnnnnnnnnnnnnnnnnnnnnnnnnnnnnnnnnnnnnnnnnnnnnnnnnnnnnnnnnnnnnnnnnnnnnnnnnnnnnnnnnnnnnnnnnnnnnnnnnnnnnnnnnnnnnnnnnnnnnnnnnnnnnnnnnnnnnnnnnnnnnnnnnnnnnnnnnnnnnnnnnnnnnnnnnnnnnnnnnnnnnnnnnnnnnnnnnnnnnnnnnnnnnnnnnnnnnnnnnnnnnnnnnnnnnnnnnnnnnnnnnnnnnnnnnnnnnnnnnnnnnnnnnnnnnnnnnnnnnnnnnnnnnnnnnnnnnnnnnnnnnnnnnnnnnnnnnnnnnnnnnnnnnnnnnnnnnnnnnnnnnnnnnnnnnnnnnnnnnnnnnnnnnnnnnnnnnnnnnnnnnnnnnnnnnnnnnnnnnnnnnnnnnnnnnnnnnnnnnnnnnnnnnnnnnnnnnnnnnnnnnnnnnnnnnnnnnnnnnnnnnnnnnnnnnnnnnnnnnnnnnnnnnnnnnnnnnnnnnnnnnnnnnnnnnnnnnnnnnnnnnnnnnnnnnnnnnnnnnnn

SEQ ID NO: 1074 - DNA, 4000 bp, Escherichia coli
  misc_feature (1)..(1): n is a, c, g, or t
  misc_feature (4)..(4): n is a, c, g, or t
  misc_feature (6)..(6): n is a, c, g, or t
  misc_feature (8)..(9): n is a, c, g, or t
  misc_feature (13)..(15): n is a, c, g, or t
  misc_feature (18)..(21): n is a, c, g, or t
  misc_feature (23)..(23): n is a, c, g, or t
  misc_feature (26)..(28): n is a, c, g, or t
  misc_feature (32)..(36): n is a, c, g, or t
  misc_feature (38)..(38): n is a, c, g, or t
  misc_feature (42)..(43): n is a, c, g, or t
  misc_feature (47)..(47): n is a, c, g, or t
  misc_feature (49)..(49): n is a, c, g, or t
  misc_feature (51)..(51): n is a, c, g, or t
  misc_feature (53)..(53): n is a, c, g, or t
  misc_feature (56)..(57): n is a, c, g, or t
  misc_feature (59)..(61): n is a, c, g, or t
  misc_feature (64)..(66): n is a, c, g, or t
  misc_feature (68)..(69): n is a, c, g, or t
  misc_feature (73)..(73): n is a, c, g, or t
  misc_feature (77)..(77): n is a, c, g, or t
  misc_feature (79)..(83): n is a, c, g, or t
  misc_feature (85)..(90): n is a, c, g, or t
  misc_feature (92)..(94): n is a, c, g, or t
  misc_feature (97)..(98): n is a, c, g, or t
  misc_feature (102)..(104): n is a, c, g, or t
  misc_feature (107)..(108): n is a, c, g, or t
  misc_feature (110)..(113): n is a, c, g, or t
  misc_feature (115)..(118): n is a, c, g, or t
  misc_feature (121)..(122): n is a, c, g, or t
  misc_feature (125)..(129): n is a, c, g, or t
  misc_feature (132)..(132): n is a, c, g, or t
  misc_feature (134)..(134): n is a, c, g, or t
  misc_feature (136)..(138): n is a, c, g, or t
  misc_feature (140)..(140): n is a, c, g, or t
  misc_feature (142)..(145): n is a, c, g, or t
  misc_feature (147)..(147): n is a, c, g, or t
  misc_feature (149)..(151): n is a, c, g, or t
  misc_feature (154)..(156): n is a, c, g, or t
  misc_feature (159)..(160): n is a, c, g, or t
  misc_feature (163)..(163): n is a, c, g, or t
  misc_feature (169)..(170): n is a, c, g, or t
  misc_feature (172)..(173): n is a, c, g, or t
  misc_feature (178)..(178): n is a, c, g, or t
  misc_feature (180)..(183): n is a, c, g, or t
  misc_feature (187)..(188): n is a, c, g, or t
  misc_feature (190)..(190): n is a, c, g, or t
  misc_feature (193)..(195): n is a, c, g, or t
  misc_feature (199)..(199): n is a, c, g, or t
  misc_feature (203)..(203): n is a, c, g, or t
  misc_feature (205)..(206): n is a, c, g, or t
  misc_feature (211)..(212): n is a, c, g, or t
  misc_feature (214)..(217): n is a, c, g, or t
  misc_feature (219)..(222): n is a, c, g, or t
  misc_feature (226)..(226): n is a, c, g, or t
  misc_feature (228)..(229): n is a, c, g, or t
  misc_feature (234)..(236): n is a, c, g, or t
  misc_feature (238)..(238): n is a, c, g, or t
  misc_feature (240)..(240): n is a, c, g, or t
  misc_feature (243)..(251): n is a, c, g, or t
  misc_feature (259)..(260): n is a, c, g, or t
  misc_feature (262)..(263): n is a, c, g, or t
  misc_feature (265)..(272): n is a, c, g, or t
  misc_feature (279)..(279): n is a, c, g, or t
  misc_feature (281)..(282): n is a, c, g, or t
  misc_feature (284)..(287): n is a, c, g, or t
  misc_feature (289)..(292): n is a, c, g, or t
  misc_feature (294)..(295): n is a, c, g, or t
  misc_feature (298)..(300): n is a, c, g, or t
  misc_feature (303)..(305): n is a, c, g, or t
  misc_feature (311)..(311): n is a, c, g, or t
  misc_feature (317)..(318): n is a, c, g, or t
  misc_feature (320)..(322): n is a, c, g, or t
  misc_feature (324)..(324): n is a, c, g, or t
  misc_feature (328)..(328): n is a, c, g, or t
  misc_feature (330)..(330): n is a, c, g, or t
  misc_feature (334)..(334): n is a, c, g, or t
  misc_feature (338)..(338): n is a, c, g, or t
  misc_feature (340)..(341): n is a, c, g, or t
  misc_feature (343)..(345): n is a, c, g, or t
  misc_feature (347)..(347): n is a, c, g, or t
  misc_feature (349)..(349): n is a, c, g, or t
  misc_feature (352)..(353): n is a, c, g, or t
  misc_feature (355)..(356): n is a, c, g, or t
  misc_feature (359)..(359): n is a, c, g, or t
  misc_feature (361)..(361): n is a, c, g, or t
  misc_feature (363)..(363): n is a, c, g, or t
  misc_feature (365)..(365): n is a, c, g, or t
  misc_feature (367)..(367): n is a, c, g, or t
  misc_feature (369)..(373): n is a, c, g, or t
  misc_feature (375)..(375): n is a, c, g, or t
  misc_feature (380)..(389): n is a, c, g, or t
  misc_feature (391)..(392): n is a, c, g, or t
  misc_feature (394)..(394): n is a, c, g, or t
  misc_feature (399)..(399): n is a, c, g, or t
  misc_feature (401)..(402): n is a, c, g, or t
  misc_feature (404)..(412): n is a, c, g, or t
  misc_feature (414)..(415): n is a, c, g, or t
  misc_feature (419)..(419): n is a, c, g, or t
  misc_feature (421)..(423): n is a, c, g, or t
  misc_feature (425)..(426): n is a, c, g, or t
  misc_feature (428)..(428): n is a, c, g, or t
  misc_feature (432)..(433): n is a, c, g, or t
  misc_feature (437)..(438): n is a, c, g, or t
  misc_feature (440)..(440): n is a, c, g, or t
  misc_feature (442)..(443): n is a, c, g, or t
  misc_feature (445)..(445): n is a, c, g, or t
  misc_feature (447)..(447): n is a, c, g, or t
  misc_feature (449)..(449): n is a, c, g, or t
  misc_feature (488)..(488): n is a, c, g, or t
  misc_feature (491)..(492): n is a, c, g, or t
  misc_feature (524)..(524): n is a, c, g, or t
  misc_feature (527)..(527): n is a, c, g, or t
  misc_feature (611)..(617): n is a, c, g, or t
  misc_feature (620)..(622): n is a, c, g, or t
  misc_feature (725)..(725): n is a, c, g, or t
  misc_feature (881)..(881): n is a, c, g, or t
  misc_feature (902)..(902): n is a, c, g, or t
  misc_feature (941)..(941): n is a, c, g, or t
  misc_feature (1196)..(1196): n is a, c, g, or t
  misc_feature (1733)..(1733): n is a, c, g, or t
naancngnnaaannngcnnnntngcnnncctnnnnnanaaannatcnancnantcnncnnnccnnntnnttgnaccnannnnntnnnnnnannnttnnttgnnnagnngnnnnannnnaannccnnnnncantnannncnannnnancnnnttnnnggnntanccaggnntnnaaaancnnnngatnnanctnnnggtnaaantnnagggnnannnntnnnnccantnnaaatnnntngntannnnnnnnngtttttgnnanntnnnnnnnnccctttngnntnnnncnnnnannccnnnggnnngcaaancagggnncnnntngaantnaggntttntnntnnnantnaanntnnatncnancnancnnnnncnttggnnnnnnnnnnanngngccancnnannnnnnnnncnntaantnnncnncnaaannaatnncnannantngnatgccatcattgtgtgcttgttttaatttttcaagctcnggnngtaaccaattaccaattcgatcatcctcatangcnccatagggagcacccatcggaactagtaagtcatactcattaaagtttggaaaggtggtggtgatatttggagagtcgtaattnnnnnnnggnnnaatcaaaaacctttcaatctcatacccatgtttttcaagtgatcgccagattggcccaccgagtgagatgtgatcatgttcaatgaataaggcgcgcattggnctaccttacgccaaaaatttaggtactctgattaaaagaatttgttaaactgatctcaaaactgcagtgaccttacctagaattaccgcatcatctgctggtattggtaggtaatcatcattttcaggcaatagccagaagtggccatcttttttngaccaagtctttacagttgcntcaccatcaatcatggcggcaacaacctcacccttctcngctgatttttgggcacgaataaccacataatcaccatcgcagatggcaacatcaatcatggagtcaccttttatctgcaacataaatagctcacctttaccaacaattgattctggaagtggcattacctcttcaactatttgctctgccaaaattggattacctgcagcgatctttcctaccaatggaattaatctagttttatcttgcggggcagcatgtccatcctcacctggcagggtgatctcaatggcncggcctctggcagcatctcgtctgatccagcctttttcttcaagaatttgcagttgataggtgacggatgcggtggaggcaagacctgcggcctggccaatctcacgcatagagggtggatacccctggttctcaactgcacgcttaataactgagaggatctttatctgccttggggtgagcccattgtcatcagctgggccatcaggcagctctgagactccctttttgcttgggtttttagccatatcagaagggtagcaggggagggtgaaaaaatcaaacatttgttcgatttaaactggacaatgtcagtggcctagtgtttaatactctatagaacaggtgttcgaatcccctcgaacccagttatcttaggagaaaagcatgaaggcaagacaggctaagcgattagcaagaacagttttatcagtatcgttatcggtagtaattgccgctggtttttcatccatctcatcagctagggataattcaaccgctgctgcagtagatgttaaaagcaagtatctgcaggtngttgttatgccaggtgagtccctgtggtcgattgctgcgatggtggccgagaagggccagatcgcatctgtggtggccgacattgtggaggtcaatcagttaaagagtgctgatgtggctgctggcagtaagttgctagttcctcaagagtaaggctgttcacaaactctagcctcgtttgccacttgttcatcaactcacttactaaagttttagcgtaattgttttattagtcatattggctggcttagatttccatctcactattgaaaggtagagatgcgcaaaatatctagtttatcaatcacacttgctttagtaactacgcagttactaacaattaatctagtttcaccagcaaatgctgctgagccaaagacaccagtaaccctaactttaatgcacaacaatgatggtgaatcctcattgggagcagatgcaatatataaaaccaaatccggtgatttaaaggtcggcagtacctcagcttttgccacagtctttgatcgtgagatcgcagatgctaggcaaatgggaaatgcagttttatctgtctatgcaggtgactcatttttaccaagtaaaaatatgatttgtagtgagccaggtgatcccaagtcacaaaagccggtattagatgcggtagctcaggcgcagatgccatacgatgttcatattctgggcaaccatgagtttgattatggcaccggatttttatctcgatatatcaaagcatttggtgcaaatggcaagcgtaagcacccatttatctcaggcaatttagattttagtaaaaactctgatcttaaatcaatggttggtaaaaacactctaagcagtggggcaattgccaatggcaaggttttaggaagaagttatgttcacaccgatccagttactaaacatagatttggtgtggtctcagctgtcacttggggacttagaactatctctagcccaggttcagttaaattaaccacaaatgatttgcaatcaactgccaaagcggtgcaggcacagattgataccctgcaacgaatgggtattaataagatcatcttggtaagccatctacaagcggccagcaatgataaagagctagttgcgctgttaaaaggtgttgatatcgcagttgctggtggtggcgatgagctgctacaaaactcagcaattgaagatgcggttgagttaattccaggtgagtctaccccggttggtgaatacccaaccatgctggcagataaagctggcaatgaggtaccacttgtgactactagtggaaattacaaatacctaggtcgagcagatttattctttgatgaaaaaggtaatttagatgcagtaaatccacttacctcatatccgcgcagagtagttccagtcagcacagtttcaaccgctgctggcataaccgatgcggttacaccaaaggagagcattgtaaaatcagttgataccccattaactgcatgcttagcaggatttaccgcaccaattgcagctagcaatacagtctttaataccgatcgtggcagcgccactgtcttaggtgttagaactgcggaaacaaatggcggtaacttagttgctgatgcatttgtttatagctacaaccaacgttatgaaaaagcaggcctaccaaaaccttcaacgactacaccattagtgggagttcaaaacggtggcggaattagacaaaacccagcgatcgtacttcctgttaccggcaaggttggtgagattacccgcggtaatacatttgatcttctgccatttggaaacaccttggtagcagttactaatgtcagccctaaggagttgaaggagatctttgaaagatcttgttcaatctcaacttcaggaggcggtcaattcctgcagatatctggcatgaaggtagtttgcctaagaaatggtacggctcaggtggtatcaactcctgcctctggcgccactgttggcagcatcaccaccgaaggtacaagagttaaatccataacactcaccgatggccgcgccatcgtaagtaatggcgccttagtagcaggtgctccttcggtaactatggtcaccaataacttcactgcagatggtggcgataattatccagcgctagctgccttgaagaaatcagcatttggtattgattacgaggtctcactttatgagtacctacgtaccttcccagcaggagctgctggcttggcaacaattccagatactgatgctaggtataaagcattaacaggtgagggcagatttacctg

SEQ ID NO: 1075 - DNA, 4000 bp, Escherichia coli
  misc_feature (4)..(4): n is a, c, g, or t
  misc_feature (7)..(8): n is a, c, g, or t
  misc_feature (10)..(10): n is a, c, g, or t
  misc_feature (19)..(19): n is a, c, g, or t
  misc_feature (23)..(25): n is a, c, g, or t
  misc_feature (34)..(34): n is a, c, g, or t
  misc_feature (37)..(37): n is a, c, g, or t
  misc_feature (46)..(46): n is a, c, g, or t
  misc_feature (49)..(49): n is a, c, g, or t
  misc_feature (52)..(52): n is a, c, g, or t
  misc_feature (58)..(58): n is a, c, g, or t
  misc_feature (61)..(61): n is a, c, g, or t
  misc_feature (64)..(64): n is a, c, g, or t
  misc_feature (73)..(74): n is a, c, g, or t
  misc_feature (76)..(76): n is a, c, g, or t
  misc_feature (82)..(82): n is a, c, g, or t
  misc_feature (88)..(88): n is a, c, g, or t
  misc_feature (94)..(94): n is a, c, g, or t
  misc_feature (100)..(100): n is a, c, g, or t
  misc_feature (104)..(104): n is a, c, g, or t
  misc_feature (106)..(106): n is a, c, g, or t
  misc_feature (108)..(108): n is a, c, g, or t
  misc_feature (113)..(113): n is a, c, g, or t
  misc_feature (115)..(115): n is a, c, g, or t
  misc_feature (118)..(118): n is a, c, g, or t
  misc_feature (121)..(121): n is a, c, g, or t
  misc_feature (124)..(124): n is a, c, g, or t
  misc_feature (127)..(127): n is a, c, g, or t
  misc_feature (130)..(130): n is a, c, g, or t
  misc_feature (136)..(136): n is a, c, g, or t
  misc_feature (148)..(148): n is a, c, g, or t
  misc_feature (154)..(154): n is a, c, g, or t
  misc_feature (160)..(160): n is a, c, g, or t
  misc_feature (169)..(169): n is a, c, g, or t
  misc_feature (172)..(172): n is a, c, g, or t
  misc_feature (178)..(179): n is a, c, g, or t
  misc_feature (181)..(184): n is a, c, g, or t
  misc_feature (188)..(191): n is a, c, g, or t
  misc_feature (193)..(193): n is a, c, g, or t
  misc_feature (199)..(199): n is a, c, g, or t
  misc_feature (211)..(211): n is a, c, g, or t
  misc_feature (214)..(215): n is a, c, g, or t
  misc_feature (217)..(217): n is a, c, g, or t
  misc_feature (220)..(220): n is a, c, g, or t
  misc_feature (226)..(226): n is a, c, g, or t
  misc_feature (229)..(230): n is a, c, g, or t
  misc_feature (232)..(232): n is a, c, g, or t
  misc_feature (234)..(234): n is a, c, g, or t
  misc_feature (236)..(236): n is a, c, g, or t
  misc_feature (238)..(239): n is a, c, g, or t
  misc_feature (244)..(245): n is a, c, g, or t
  misc_feature (249)..(250): n is a, c, g, or t
  misc_feature (298)..(298): n is a, c, g, or t
  misc_feature (385)..(385): n is a, c, g, or t
  misc_feature (400)..(400): n is a, c, g, or t
  misc_feature (412)..(412): n is a, c, g, or t
  misc_feature (508)..(508): n is a, c, g, or t
  misc_feature (897)..(897): n is a, c, g, or t
  misc_feature (990)..(990): n is a, c, g, or t
  misc_feature (1029)..(1029): n is a, c, g, or t
  misc_feature (1053)..(1053): n is a, c, g, or t
  misc_feature (1074)..(1074): n is a, c, g, or t
  misc_feature (1143)..(1143): n is a, c, g, or t
  misc_feature (1195)..(1195): n is a, c, g, or t
  misc_feature (1341)..(1341): n is a, c, g, or t
  misc_feature (1344)..(1344): n is a, c, g, or t
  misc_feature (1376)..(1376): n is a, c, g, or t
  misc_feature (1387)..(1387): n is a, c, g, or t
  misc_feature (1407)..(1407): n is a, c, g, or t
  misc_feature (1433)..(1433): n is a, c, g, or t
  misc_feature (1494)..(1494): n is a, c, g, or t
  misc_feature (1539)..(1539): n is a, c, g, or t
  misc_feature (1698)..(1698): n is a, c, g, or t
  misc_feature (1728)..(1728): n is a, c, g, or t
  misc_feature (1737)..(1737): n is a, c, g, or t
  misc_feature (1786)..(1786): n is a, c, g, or t
  misc_feature (1960)..(1960): n is a, c, g, or t
  misc_feature (1971)..(1971): n is a, c, g, or t
  misc_feature (1981)..(1981): n is a, c, g, or t
  misc_feature (1986)..(1986): n is a, c, g, or t
  misc_feature (1988)..(1988): n is a, c, g, or t
  misc_feature (1991)..(1992): n is a, c, g, or t
  misc_feature (2118)..(2118): n is a, c, g, or t
  misc_feature (2172)..(2172): n is a, c, g, or t
  misc_feature (2189)..(2189): n is a, c, g, or t
  misc_feature (2191)..(2192): n is a, c, g, or t
  misc_feature (2195)..(2195): n is a, c, g, or t
  misc_feature (2207)..(2207): n is a, c, g, or t
  misc_feature (2216)..(2216): n is a, c, g, or t
  misc_feature (2219)..(2219): n is a, c, g, or t
  misc_feature (2224)..(2225): n is a, c, g, or t
  misc_feature (2241)..(2241): n is a, c, g, or t
  misc_feature (2254)..(2255): n is a, c, g, or t
  misc_feature (2259)..(2259): n is a, c, g, or t
  misc_feature (2271)..(2271): n is a, c, g, or t
  misc_feature (2297)..(2297): n is a, c, g, or t
  misc_feature (2303)..(2303): n is a, c, g, or t
  misc_feature (2306)..(2306): n is a, c, g, or t
  misc_feature (2318)..(2318): n is a, c, g, or t
  misc_feature (2321)..(2321): n is a, c, g, or t
  misc_feature (2324)..(2324): n is a, c, g, or t
  misc_feature (2343)..(2343): n is a, c, g, or t
  misc_feature (2348)..(2348): n is a, c, g, or t
  misc_feature (2357)..(2357): n is a, c, g, or t
  misc_feature (2363)..(2363): n is a, c, g, or t
  misc_feature (2384)..(2384): n is a, c, g, or t
  misc_feature (2414)..(2414): n is a, c, g, or t
  misc_feature (2417)..(2417): n is a, c, g, or t
  misc_feature (2429)..(2429): n is a, c, g, or t
  misc_feature (2438)..(2438): n is a, c, g, or t
  misc_feature (2456)..(2456): n is a, c, g, or t
  misc_feature (2471)..(2471): n is a, c, g, or t
  misc_feature (2492)..(2492): n is a, c, g, or t
  misc_feature (2495)..(2495): n is a, c, g, or t
  misc_feature (2501)..(2501): n is a, c, g, or t
  misc_feature (2510)..(2510): n is a, c, g, or t
  misc_feature (2528)..(2528): n is a, c, g, or t
  misc_feature (2540)..(2540): n is a, c, g, or t
  misc_feature (2543)..(2543): n is a, c, g, or t
  misc_feature (2546)..(2546): n is a, c, g, or t
  misc_feature (2759)..(2759): n is a, c, g, or t
  misc_feature (2925)..(2925): n is a, c, g, or t
  misc_feature (3017)..(3017): n is a, c, g, or t
  misc_feature (3143)..(3143): n is a, c, g, or t
  misc_feature (3482)..(3482): n is a, c, g, or t
  misc_feature (3739)..(3739): n is a, c, g, or t
  misc_feature (3742)..(3742): n is a, c, g, or t
  misc_feature (3842)..(3842): n is a, c, g, or t
  misc_feature (3844)..(3844): n is a, c, g, or t
tgtnaanntntgtattganaatnnngatgtactngcntttgatctngcnggnccagangtnggnttttctgcnntnaatcancaagangcaatngaaatngctnancnaaatnanatnaanatnacnctncatgcngattgggaagtncctganggtatncatgaagtnatnttaganntnnnntcannnngnataggncatggttcacanatnntnaangattanaannanantnannatggnntaanntttaaaaaccttgcagcaaagttcgtacacgaaaacaacattccactngaattatgtccaacttcaaatatgcaatgtggatcttgtaattcaatatcagaacaccctttcaaaaaactttatgatgatgggttnaatgtcactattaanacagacaatagncttatgagcaacataactatgtcacaagaggtaaacaatcttgttgaaagttttacttttactcaagatgaaatactacaaataacaaaaaatacnatagaagctggatttgtagatagtaaaaaaagagagaaattactgagtagtttttaatttgtattcaattaattgaatcaagtgtaatttcaaccatagtttttaaaccgatttcacgttcttctgatgacatttgcaaattcttctcaattacatccgagacagtcgcaacagctaaagctttagcaccatactctgctgcaacgccatatagtcctgcagcttccatttcaaccgccaggattcccattcgtttcatgatttcaaatgtttcttttctaggatcataaaaaagatcaccagaaaatatattacctacatgcacagttctagacatagactgagcagtatttacaaaattttgtactaattcccatgaagcagttgcngagaagtcagcgttaaaaaatcttgctctgtttacacctgaatctgtagatgctccaacacctacaacaatatcaccaagttcaagatgttcngctattgaacctgaacttccaactcttattaaggacttnactttatattcagtaattaactcnttagcgtatattgatatgganggtatacccatccctgttcccataactgaaatacgacttcctttatattcaccagtaaatccaagaatnttacggacgtttgttacttccttagttttttgaaaaaaagtatctgcaatanatttagctctcagaggatcgccaggtagcagtattgtttcagcgaatgcattattttcggcattaatatgtggtgttaccattttgtaattctaacatttattgatctacaaaaggtaatttaagtagaatttaagtatgcaatantcnaaacaagaacaatatctaatgagcaaagatgnccaactcaagnaaattattatttctaataancatattaagataacaagacccactgnaaattattacgattcgctcattaatctggtaataagtcaatttatatcaagatcagcagcnatatctatatcaaataaattattactaagttttaatgccaacatntttaaagaagagttttttgaaaacctaacttatcaacaaatacatagacttggattaactaaaaataaagccaagtctataaaagatattacataccattttattaatgaggacttccgtaaaaaaataacatctttacctatgaaggagtttgatagntactttttatcaatctatggcttaggaccntggagtttnaatatgtttaagttattctcccttggtgatgaagatatcttttcatctnacgatgcagctttaaggcgagctatggaaacaagtggcatgcttaaattaggatcagaccataaagactttgatttgcatgcaatgaagtggaaaccctttagatctacagcttcattacatctttggcgatccttagattaattctttcacaattgcacaaagattgcttttngtggtataatntttaaatganaaatnanaannttgtgcaagtggtgagttacatatatatgtagtgccttttcgcaatcgtttgaaatccgggcacttgcccggtttttttattttaggaaggaaaataatgaaagaccaaacaaacacagatacgantaataacaatattaagaagacaaaagctgacttgtatgagagtttctacgatgnagaatagttttcttganannganaaattacaaaangattggganacnaatgnnagatggaaaggaatancaagaaactatanntctnatgaagtaattngaatacgtaattctgtagaaattaancatacnctngctgaaaacggngcnaanaaactttttactgctttangtaanaaagatgantggatntctgctctcggcgcattatcnggaaatcaggcagtacaaatggttaaagcnggnttaaaagctatntaccttagnggatggcaagtagctgcngactcaaatcttggngagacaacctatccagaccantcnctttanccaagtaanagtgctcctactcttgcnaaaagaataaanaangcncttttaagagctgaacaagtagatcgggttgaaggtaaagatgatattgattatattgttccgatagtagctgatggggaagcagggtttggtggaacattaaacgtgttcgaactaactaaaaaatttattgaagctggtgcctccgctgtacatttcgaagaccaattagctgctgaaaaaaaatgtggccatatgggaggaaaagtattngtgccaactagtcaacatattagaacgttaacttctgcaagattagcagccgatactttaggtgttccaaccttaataattgctagaactgatgctcttgcagccaatcttataacaagtgatattgatgattcagacagtcatttcgtgttaggggaaagaactncagaaggattttttaagataaaaaatggtccagaggcagcaataagtaggggtcttgcgtacgcaccatattctgatttaatttggtgtganacaggccagccagatataggatttgcaaaggagtttgccgatgctattcatgctaagtatcccgataaacttttagcatataattgttctccttcttttaattggaaaaaatcattatctgatgangaaatatccacatttcaggaacaattaagttcattcggatataaatttcaatttataactcttgcaggatttcacgcattaaatacatctatgtttgaattagcatctaagtataagggtggaaacatgagtgcctatgttgaattacagcaaaaagagtttggcttagaaaaagatggttttacttctgtgaaacatcaaagagaagttggtgccggatattttgacactgtttctacaattattagtggtggggatgcatctacacttgcactttctggttccactgaagaggaacaattttaatgttcgaaataaatcacaaccaaaatacaaaancattacttactgatgagtttctatcttttttagaaaagtttatcaatagtttcgaagatgagagacaaatgctactcattaagaggttagaaactcaaaaattaatttcaaatggtggaaaatttacatttccagaagattcaacgataagagatggagaatggaaagttgtaccacctcctgatgatgtactcaatagaaatgttgaaattacaggacctgtagatagaaaaatgatcattaatgcattgaattcnggntcagacgtttttatggctgattttgaagactctacttcaccaacgtgggaaaatatacttaacgggcacctcaatctgattgatgctaataacagatcantntcctttgaaaacaaagagaatggaaaaaaatacgaactaaaccaaaattctgcaacttcattattcgttaggcctcgaggtttacatttaaatgaacaaaatgttacttatatgggtaaggaagtgtctgcttcactgtttgatttttgcctatat

SEQ ID NO: 1076 - DNA, 4000 bp, Escherichia coli
  misc_feature (1)..(2): n is a, c, g, or t
  misc_feature (7)..(8): n is a, c, g, or t
  misc_feature (14)..(14): n is a, c, g, or t
  misc_feature (16)..(16): n is a, c, g, or t
  misc_feature (18)..(22): n is a, c, g, or t
  misc_feature (25)..(27): n is a, c, g, or t
  misc_feature (30)..(32): n is a, c, g, or t
  misc_feature (34)..(35): n is a, c, g, or t
  misc_feature (40)..(40): n is a, c, g, or t
  misc_feature (43)..(44): n is a, c, g, or t
  misc_feature (47)..(49): n is a, c, g, or t
  misc_feature (52)..(52): n is a, c, g, or t
  misc_feature (55)..(57): n is a, c, g, or t
  misc_feature (62)..(62): n is a, c, g, or t
  misc_feature (815)..(815): n is a, c, g, or t
  misc_feature (854)..(854): n is a, c, g, or t
  misc_feature (1007)..(1007): n is a, c, g, or t
  misc_feature (1617)..(1617): n is a, c, g, or t
  misc_feature (1684)..(1684): n is a, c, g, or t
  misc_feature (1840)..(1840): n is a, c, g, or t
  misc_feature (2637)..(2637): n is a, c, g, or t
  misc_feature (2696)..(2696): n is a, c, g, or t
  misc_feature (2704)..(2704): n is a, c, g, or t
nnaaagnnggtgcngngnnnnncannnttnnncnngaggnganntcnnngtntcnnnggagnggcgtgcctgaatttcaatgctcggcgcttggatccggcgacgacggcggcacgggcttcggttgccgtccaggaatttgtttttggcgaaggagcttcgtaaagtatgtccgctgcagccccaacgcttcggccgccctggtctggttccagtcgtttttcttcaacgcgtcctcgagcacccaacgactgtatgcctccatcatcgcgtgataaccggttgcgtcgcctggccgctgctgaatcccttctgcctgaccgggagcagtgccaccgacaccagacgcaagaccggcgccggctgcatccgagagacataaatgctcgggttcgatcgttttccccggggtcaaaatgtaggcacgcgtcagcacattctccaattcccgaatattccccggccatcggtactgcgaaagcgtgcgccctgcggcttcgctcagggtacagtgtttgctgaggccgaactttcccgctcgaccgaggacatactcggcaagggccgggatatcgtcaatgcggtcacgcagcggcggcagggtcacggagatgacggccaggcgatagaacagatcctctcggaaggagccctggtgaatggcctgcttcagatccttattggtggcggcgaggaaccggacgtccgtgtggaccgactgggtgccgccgactcgataaaacgtttgatcctgcagaacccgcagcaagtggctttgcagcgataaggacatgtcgccgatctcatcaagaaanaccgtcccgccttcagcaatctcgatctttcccgcttcncgtttcacggccccggtaaaggctcccttttcatggccgaacagttcgttctcgaggaggtccttcggaatcgctgcgcaattgacggccacaaacggtttgtccctccgcggactccaaccgtggatggcgcgtgcgacgacctctttgccngtgccggtctctcccaggatcagcacagtgacgttcgagacggcggcctgcttggccaaggccagctgagccgtgaatttcgcgttggtgcccaccatgccgccatagcgcgcatccaattcttgcttgaggacgccgacttgccggcgaagggcgatggcctccagcgccttattgatgacgacggagatgtggtcgccggtgaacggtttggtaatgaaatcgatggcgccgagctgcatggccttgacggcgagttcgatcgtaccgaaggcggtcagcatcacgatcggcggcatcaacgccccgccagcgtccggggccgcatgtttcccaatcgaatcatggatctgctgaaggatctcaaggccggaaaaaaccggaagctgaatgtccagaaggacgaggtcgggctgttcggtttgtatgatacgcagggccgccttgccatcgctggccgtcactggctcgtgccccatccacgtcacgcggttttcgagcgcgaggacgatatccggatcgtcgtcgacaatgagtatacgtgcacgcatgggagagcctcctaatcggcgtctgtggtcgtaccgggagagacgatttgaggcgacgnctgtcctgggacgctgtcaggcgccgtgcagggcaaggtgaaatagaagcgcgaacccgaccccagngcactttcgacccagatatgtcccttatgcatcgtgataaagctcttcgtgatgaagagtcccagttgggcgccctgcgatgtgggcatcgtggaagggactttcgagaattcgtcgaagactcggtgaagttgatcggggggaatcccgcagccngtgtccctcacacaggtttgcatcatgccatcggggagcgcctcgagctcgagcgtaatctgtcctccggatggcgtgaacttcacggcattgccgataagattccagaggatctgctccagcttgtcgcggtctgcataaatcatcggagggtgctcgggcgattcaatgcgaatgtccacgttcttctccgcggccacggtgcgcaggctttcgacgacccgcgtcgcgctttgattgagacagagaggctccagtcgaagaatttccttcttgaggtccaatcgcgaccaatccaacagttggttgatgattcttgtgagccgattcaagttgtacccgatgcggtcgagataggtcttctgacggtcggacaggacgccggcaacgccgtcagccatgttgtccgcgaagctgcggatggcggtcatcggggtgcgcaattcatgcgaggcgacggagacgaacatcgtgcgacgccggtcatgctcctgaagctgttgattggcctgggacaattccagcgttcgctcttggatgcgctgctccagatgctgtgtgagttgcgccaaattggcataagtgcgggcgttgtcgatcgccgtggccacgtggctcgcgatggtcatcaagatgtggaggtcctcttcggagcagggcagcacaccgcggtcgccagcaataaagccgagcgtctggctatggctctgcaacggcacacacacgaaggattggacgtccacgcggcgcatcagctcgagagtcgtcggattgatccgatgggcgaccatattcanatcgcgagccagaactggtttcgcatggatgaagaggtcggccagaatcgtgtcatcgnccttgatngggatacttaaaaagcgggcggcctcggcgatctcatccgagacccctgccacctgtgcgatgtagccgacgtcccgatcctcatcacggagcatgaggagcatccgtgagaatcccaagttcgatctcagcaactgcaggacggtatccatcagttcatggagatccagggtgctcgtaatggccgcgctggtctgatggacggcggtcaattgggtgatctgcttgcggatggtctccagattggaggaaatggccgcgccgcgttcacgcaacgcggccgtcatggcattaaaggtttgcgtcaactggccgacttcatcggtcgtcgttgcgggaatgggcgccggcgattcgccttccgtaagctgccgggcgaccgcggccagccgtcgcaacggggtggtaatgcgcaacgtcaggaagtgcgcgcccaggatgccggcgctgatcagcagggtcgtcagaatcagcacgttgcggatcatctcgaagagcgcgtgcttgacgctggcatccgtgagaccgatctgcacgacaccctgcaccaggtacggcgccgcgcttttcctcgattggattcgttcttccatttcgagcagcagcggggacagtgacggatcggttgccggttttcggaggactggcatggcaaaatcgtacagcttgtcggtcagcgacgagaggatccaaatcggatttgggatgcctccatccggaaccagaattttgttttgcgacagggccacgggcgtgatgcgcggcgtggacgtcggctcgcggtacagttcttcagcgatcgcctcatcgggataaaaccggcgctcctgcgtgaaggtcacgcttcccaacgactcgtgaacgatcttgttctgctgtgcgaggatgatgtggtccgcgccgcggaccactacatacaccacgtcatcgatggccatcaggctctccacgaattgctgcagcgtcgcccggtcttccgcgatcaaccctccatagcggaattggccgttattcaccacgctggtgaggagaatcgtgcccaattgattgaggttctcggtcatcgaaacgcgtcgtacctcgatgaagtaccaactgagcgctgaagaggtcagaatgaggatcaagctgaagaagacgacgaacttcgtgcgaatactcgcaagcttccccaggcccgacagttgcagagtcgattgtggactggtcataggcatcaataggtctcgtcgatcaggtgattgacgtctttgggaaactcgatgccgagaaaccgcgccgtcttcagattcacag

SEQ ID NO: 1077 - DNA, 4000 bp, Escherichia coli
  misc_feature (25)..(25): n is a, c, g, or t
  misc_feature (245)..(245): n is a, c, g, or t
  misc_feature (369)..(369): n is a, c, g, or t
  misc_feature (664)..(664): n is a, c, g, or t
  misc_feature (1294)..(1294): n is a, c, g, or t
  misc_feature (1989)..(1989): n is a, c, g, or t
  misc_feature (1994)..(1995): n is a, c, g, or t
  misc_feature (2058)..(2058): n is a, c, g, or t
ttcgcaaaatcatcgaagtcagccnggctgatttacaacaagacatcggtggtgtcagcctaggtgaggccctgatggagcctacccgtatttatgtaaaagccttattaacactatttaagcaagtggatgtaaaagccttatctcatatcacaggtggtggtttacttgagaatattccgcgggttttacctgcaaatagtgttgctgtaattgagactcagtcttggcagcagcccgctgtntttaagtggttgcaaagccaaggtaatgtgaccgacactgaaatgtaccgtacctttaattgcggtgtgggcatggtcattgtggtaaccgaagaagaccaagcccaagcactatccaccctgnctgaagcaggtgaaagtccttgggtaataggtcatattcaacaaaatgacggctcccaagatgctgttttaatgcgctaaacccgtctttggacacgctcatgcatgaacaatcattacaacaagtaccgcgtcttgtggtccttatttcaggtggcggtagtaacttacaagcgctcattgatgctatttctatgggctcaattgatgcgaccattgaattagtcatcagcaacaaagttgatgctttgggtttagctagagctcataaagctggcatagaaactcgagtcatnaatcacctagagtttggtagccgcgaggcctttgacaaggaactcacacacgccattgatgacaagcaacccgatttggtagtcctcgctggttttatgcgaatttttacgcctcaattcacccatcattaccatggccgcatgcttaacatccacccttcgttgctgccacagtttaaaggcattaatactcatgagcgggccatagaagcagaggttgctgagcatggcgccagtgtgcattttgtttctagtgaacttgatgggggtcctatggtcttacaagcatcagtgagcgtactaagtctggattcacctaaagttttagcggctcgggtcttagtgcaagaacacttaatttaccccattgccattaaatggttctgtgagggccggttaaagctgcaaaataacgctgtgttaatggatggtcagctattgccagaacaaggcatacaatttcagtcctgacttaaatgtgctcgattaataatgcaaggaaatgcaatgctaaatattaccaacaaattgtgtaagctccccagcgcctttagcctgatgctcatcttgttatggagtcacagcagcctagctcagttaagaccttttcaagcgatttataccagccantgggatttaggtattagcctatctggccaagcagaacgcagtctaattaagaatgatgatggaagctaccgactcacgactgctgcgagtgcgatggtagcttctttgaccgaatccagcctgtttcaatttattgatgatcaaattgagcctgatcactatacctaccaacgcaaagttttaaacaaaacacgagatgtagaggttaaatttgactggcctaataagaaagttaagaacactgctgggggttccgattggttgatggatattgtaccgggcacactcgataaacaaagtgtgcaactgctcctgcagctggatttagccgccactcctgtcattaatggtaaaacgtacgcttaccaagtagccgatggtggtgagcttaaaatctatcagtttattgctgatggcgaagacctgattgaaactccccttggcaattacaagtctttgcgcattaaacgagatcgaggtgaaggttcagatcgagaaacttggatctggtttgcacccgatctagattacagtatcgtgcgtattatccaaaaagaagcagacgggaaaagctaccaaatcgatttacagcagctgacttggcttgatggttagcgtaaattcaggcgtgaacagcttgcgcaaaacttggtaaagcagttcgcacctaagcgcaaatttagttaaactacagnctaannatagctgttacgtaaggatatatcttggcctcttcaaatcgttttgcggtctttatcatagcngctgctgcctctgtaggcagtcatgccagtcaattccaagagcttttccaattggcacaggccaatgatcccagttatatcgctgcccaacatacgcttaattctaaattagaaattattcctcaagcgaacagcgcattcatgccagagattagtggcagcgtgaacgaaagccaatccttaaatgctggagctaacatccatacctatggggttaaagtagcgctgcctctgaggctagatgcgttttatagcctcaaagtagcagagaaaatggctgctggggcgcgcattaactttgaaaaaacacatcaagatcttattttctctgtgattaatcgttatgttgctgtgatcaaacagcagcaccaaatgtcttcaagtttggcggaagtcaccgctgtggaacagcgtttaaaacaaacacaacagcaagttgatctgggtatcagtagcatcatagaactgcaggatgtgaaagctaactttcaacaattgcaggtgaacttattgcaggttcaacaagacttaagcttagcccgtgccaaccttgagaatctaactaatcagacactacccccaaagcttcctgctctagccagcagcttcaatgctgctagtttggtcgctattgattctttggaaaactggtttgagctagcacaaaataataacttagacattgcccacaacaagttggccgttcagcaggcctaccataactaccaagttaaggatgtgggtttatacccaaaagccagtatcagcatgtcacaaaactacagcagcagcactggtactagccagttctttgcagtgggtgtaacgggcactttctttgacggtggtttgaatcaatctcagactaacgaagctaaagaagcttggtatgccagccaacaacaaggccaagctctgcttaaaacgacgcaacaagaaattaggcgttggcaccaagctttagatacaagtcgtcaacagattcaagccctagcgcagttgaacaaggctgtgcaggcctcattagacggaaaaaatacagaatataccttaggtttgagagacattagcgatattttggacgcagaaaaattagttttttcggctcaacgcagttgggataatgcaagacttgacttagtgttaaatcaattacgcttaaaacgagccagtggtttgttaaatggtagcgacttagctcaactggaccagtggtttaactaatttcagagatcagttcagccactttggcgttaggattttgttgtaaaatcgccaaaaggtctaacaaggttttaatagccaagcgtggattaaggtaatattgcgcgccatatatcgtgcgacattgaagcataaattgccataagcccatatcgtcaatcagatagttgttagcttcaccgtaggcctgcagatggcgtaacttttgcaacaactcatccatttctgtttcttgcagcggttgtaactcaatcacaggtccagatacatcgatcaaacctgcttgcgccagacgattgaatgcaagcctactcttcagagctggcatgctataaaggcctttcttctcatcataaacaaattcaggggtacctaaaaatacgaagcccataccatggacttgaccttgcaagcagtcattaacaatattaagaatttcattaaagttattgatacgagtctgcttgtggcttaattcatgcaatgccaccatctcgtctaaacagatgagtaagccgggataacctgccatacgcacgaattggcagagcatttttaaaccactgaaaaaattacgatagtctataatactgcgcacgcccaaagcagctttagcgtcagtcaaattagtaaactcacctcttagccaccttaatgctgtgctttttaatatatcgtcttgctgttccaaagcatggcagtaacgctgaatgactgt

SEQ ID NO: 1078 - DNA, 4000 bp, Escherichia coli
  misc_feature (17)..(17): n is a, c, g, or t
  misc_feature (102)..(103): n is a, c, g, or t
  misc_feature (105)..(109): n is a, c, g, or t
  misc_feature (111)..(117): n is a, c, g, or t
  misc_feature (120)..(120): n is a, c, g, or t
  misc_feature (122)..(124): n is a, c, g, or t
  misc_feature (126)..(127): n is a, c, g, or t
  misc_feature (129)..(130): n is a, c, g, or t
  misc_feature (132)..(142): n is a, c, g, or t
  misc_feature (144)..(145): n is a, c, g, or t
  misc_feature (147)..(147): n is a, c, g, or t
  misc_feature (149)..(149): n is a, c, g, or t
  misc_feature (153)..(153): n is a, c, g, or t
  misc_feature (155)..(155): n is a, c, g, or t
  misc_feature (158)..(158): n is a, c, g, or t
  misc_feature (160)..(167): n is a, c, g, or t
  misc_feature (169)..(170): n is a, c, g, or t
  misc_feature (173)..(177): n is a, c, g, or t
  misc_feature (179)..(179): n is a, c, g, or t
  misc_feature (182)..(182): n is a, c, g, or t
  misc_feature (184)..(184): n is a, c, g, or t
  misc_feature (190)..(190): n is a, c, g, or t
  misc_feature (193)..(193): n is a, c, g, or t
  misc_feature (196)..(196): n is a, c, g, or t
  misc_feature (198)..(198): n is a, c, g, or t
  misc_feature (201)..(201): n is a, c, g, or t
  misc_feature (203)..(205): n is a, c, g, or t
  misc_feature (207)..(207): n is a, c, g, or t
  misc_feature (210)..(211): n is a, c, g, or t
  misc_feature (213)..(214): n is a, c, g, or t
  misc_feature (216)..(216): n is a, c, g, or t
  misc_feature (218)..(218): n is a, c, g, or t
  misc_feature (220)..(220): n is a, c, g, or t
  misc_feature (222)..(223): n is a, c, g, or t
  misc_feature (225)..(230): n is a, c, g, or t
  misc_feature (232)..(232): n is a, c, g, or t
  misc_feature (234)..(234): n is a, c, g, or t
  misc_feature (237)..(237): n is a, c, g, or t
  misc_feature (239)..(241): n is a, c, g, or t
  misc_feature (244)..(244): n is a, c, g, or t
  misc_feature (247)..(247): n is a, c, g, or t
  misc_feature (249)..(252): n is a, c, g, or t
  misc_feature (256)..(258): n is a, c, g, or t
  misc_feature (260)..(262): n is a, c, g, or t
  misc_feature (265)..(269): n is a, c, g, or t
  misc_feature (271)..(272): n is a, c, g, or t
  misc_feature (274)..(276): n is a, c, g, or t
  misc_feature (278)..(278): n is a, c, g, or t
  misc_feature (280)..(282): n is a, c, g, or t
  misc_feature (284)..(284): n is a, c, g, or t
  misc_feature (289)..(290): n is a, c, g, or t
  misc_feature (292)..(292): n is a, c, g, or t
  misc_feature (294)..(295): n is a, c, g, or t
  misc_feature (299)..(302): n is a, c, g, or t
  misc_feature (304)..(307): n is a, c, g, or t
  misc_feature (309)..(309): n is a, c, g, or t
  misc_feature (311)..(313): n is a, c, g, or t
  misc_feature (315)..(315): n is a, c, g, or t
  misc_feature (317)..(317): n is a, c, g, or t
  misc_feature (319)..(319): n is a, c, g, or t
  misc_feature (322)..(322): n is a, c, g, or t
  misc_feature (324)..(324): n is a, c, g, or t
  misc_feature (326)..(328): n is a, c, g, or t
  misc_feature (330)..(330): n is a, c, g, or t
  misc_feature (332)..(335): n is a, c, g, or t
  misc_feature (337)..(338): n is a, c, g, or t
  misc_feature (340)..(341): n is a, c, g, or t
  misc_feature (345)..(345): n is a, c, g, or t
  misc_feature (347)..(348): n is a, c, g, or t
  misc_feature (350)..(350): n is a, c, g, or t
  misc_feature (352)..(355): n is a, c, g, or t
  misc_feature (357)..(360): n is a, c, g, or t
  misc_feature (362)..(365): n is a, c, g, or t
  misc_feature (367)..(370): n is a, c, g, or t
  misc_feature (374)..(375): n is a, c, g, or t
  misc_feature (379)..(380): n is a, c, g, or t
  misc_feature (382)..(383): n is a, c, g, or t
  misc_feature (389)..(395): n is a, c, g, or t
  misc_feature (397)..(397): n is a, c, g, or t
  misc_feature (400)..(401): n is a, c, g, or t
  misc_feature (403)..(403): n is a, c, g, or t
  misc_feature (406)..(406): n is a, c, g, or t
  misc_feature (408)..(409): n is a, c, g, or t
  misc_feature (412)..(413): n is a, c, g, or t
  misc_feature (415)..(415): n is a, c, g, or t
  misc_feature (417)..(418): n is a, c, g, or t
  misc_feature (420)..(420): n is a, c, g, or t
  misc_feature (422)..(422): n is a, c, g, or t
  misc_feature (424)..(428): n is a, c, g, or t
  misc_feature (430)..(435): n is a, c, g, or t
  misc_feature (437)..(437): n is a, c, g, or t
  misc_feature (439)..(440): n is a, c, g, or t
  misc_feature (443)..(445): n is a, c, g, or t
  misc_feature (448)..(448): n is a, c, g, or t
  misc_feature (450)..(450): n is a, c, g, or t
  misc_feature (452)..(453): n is a, c, g, or t
  misc_feature (456)..(457): n is a, c, g, or t
  misc_feature (459)..(460): n is a, c, g, or t
  misc_feature (466)..(466): n is a, c, g, or t
  misc_feature (470)..(472): n is a, c, g, or t
  misc_feature (474)..(474): n is a, c, g, or t
  misc_feature (477)..(478): n is a, c, g, or t
  misc_feature (482)..(482): n is a, c, g, or t
  misc_feature (485)..(485): n is a, c, g, or t
  misc_feature (488)..(488): n is a, c, g, or t
  misc_feature (490)..(492): n is a, c, g, or t
  misc_feature (494)..(494): n is a, c, g, or t
  misc_feature (497)..(499): n is a, c, g, or t
  misc_feature (501)..(503): n is a, c, g, or t
  misc_feature (505)..(505): n is a, c, g, or t
  misc_feature (508)..(509): n is a, c, g, or t
  misc_feature (512)..(514): n is a, c, g, or t
  misc_feature (516)..(516): n is a, c, g, or t
  misc_feature (518)..(519): n is a, c, g, or t
  misc_feature (521)..(524): n is a, c, g, or t
  misc_feature (528)..(528): n is a, c, g, or t
  misc_feature (530)..(531): n is a, c, g, or t
  misc_feature (533)..(538): n is a, c, g, or t
  misc_feature (540)..(540): n is a, c, g, or t
  misc_feature (544)..(544): n is a, c, g, or t
  misc_feature (546)..(547): n is a, c, g, or t
  misc_feature (550)..(551): n is a, c, g, or t
  misc_feature (553)..(553): n is a, c, g, or t
  misc_feature (555)..(555): n is a, c, g, or t
  misc_feature (557)..(558): n is a, c, g, or t
  misc_feature (560)..(560): n is a, c, g, or t
  misc_feature (562)..(562): n is a, c, g, or t
  misc_feature (564)..(565): n is a, c, g, or t
  misc_feature (567)..(567): n is a, c, g, or t
  misc_feature (571)..(572): n is a, c, g, or t
  misc_feature (576)..(577): n is a, c, g, or t
  misc_feature (579)..(579): n is a, c, g, or t
  misc_feature (582)..(584): n is a, c, g, or t
  misc_feature (586)..(586): n is a, c, g, or t
  misc_feature (588)..(590): n is a, c, g, or t
  misc_feature (592)..(593): n is a, c, g, or t
  misc_feature (595)..(595): n is a, c, g, or t
  misc_feature (597)..(597): n is a, c, g, or t
  misc_feature (599)..(600): n is a, c, g, or t
  misc_feature (604)..(605): n is a, c, g, or t
  misc_feature (607)..(611): n is a, c, g, or t
  misc_feature (613)..(613): n is a, c, g, or t
  misc_feature (617)..(618): n is a, c, g, or t
  misc_feature (620)..(620): n is a, c, g, or t
  misc_feature (622)..(622): n is a, c, g, or t
  misc_feature (625)..(625): n is a, c, g, or t
  misc_feature (627)..(627): n is a, c, g, or t
  misc_feature (630)..(630): n is a, c, g, or t
  misc_feature (632)..(632): n is a, c, g, or t
  misc_feature (635)..(637): n is a, c, g, or t
  misc_feature (641)..(641): n is a, c, g, or t
  misc_feature (643)..(644): n is a, c, g, or t
  misc_feature (648)..(651): n is a, c, g, or t
  misc_feature (653)..(653): n is a, c, g, or t
  misc_feature (656)..(657): n is a, c, g, or t
  misc_feature (660)..(661): n is a, c, g, or t
  misc_feature (665)..(667): n is a, c, g, or t
  misc_feature (669)..(670): n is a, c, g, or t
  misc_feature (675)..(675): n is a, c, g, or t
  misc_feature (677)..(678): n is a, c, g, or t
  misc_feature (680)..(680): n is a, c, g, or t
  misc_feature (683)..(684): n is a, c, g, or t
  misc_feature (687)..(687): n is a, c, g, or t
  misc_feature (689)..(689): n is a, c, g, or t
  misc_feature (691)..(691): n is a, c, g, or t
  misc_feature (693)..(693): n is a, c, g, or t
  misc_feature (695)..(696): n is a, c, g, or t
  misc_feature (699)..(702): n is a, c, g, or t
  misc_feature (704)..(704): n is a, c, g, or t
  misc_feature (707)..(707): n is a, c, g, or t
  misc_feature (711)..(711): n is a, c, g, or t
  misc_feature (713)..(714): n is a, c, g, or t
  misc_feature (717)..(718): n is a, c, g, or t
  misc_feature (721)..(721): n is a, c, g, or t
  misc_feature (723)..(723): n is a, c, g, or t
  misc_feature (726)..(726): n is a, c, g, or t
  misc_feature (728)..(728): n is a, c, g, or t
  misc_feature (730)..(730): n is a, c, g, or t
  misc_feature (732)..(735): n is a, c, g, or t
  misc_feature (737)..(738): n is a, c, g, or t
  misc_feature (740)..(740): n is a, c, g, or t
  misc_feature (742)..(743): n is a, c, g, or t
  misc_feature (747)..(747): n is a, c, g, or t
  misc_feature (749)..(749): n is a, c, g, or t
  misc_feature (753)..(753): n is a, c, g, or t
  misc_feature (756)..(760): n is a, c, g, or t
  misc_feature (763)..(763): n is a, c, g, or t
  misc_feature (769)..(769): n is a, c, g, or t
  misc_feature (771)..(774): n is a, c, g, or t
  misc_feature (776)..(776): n is a, c, g, or t
  misc_feature (778)..(779): n is a, c, g, or t
  misc_feature (781)..(781): n is a, c, g, or t
  misc_feature (783)..(783): n is a, c, g, or t
  misc_feature (787)..(789): n is a, c, g, or t
  misc_feature (794)..(794): n is a, c, g, or t
  misc_feature (798)..(798): n is a, c, g, or t
  misc_feature (802)..(802): n is a, c, g, or t
  misc_feature (806)..(806): n is a, c, g, or t
  misc_feature (1346)..(1346): n is a, c, g, or t
  misc_feature (1940)..(1940): n is a, c, g, or t
  misc_feature (1946)..(1946): n is a, c, g, or t
  misc_feature (1988)..(1988): n is a, c, g, or t
  misc_feature (1991)..(1991): n is a, c, g, or t
  misc_feature (2804)..(2804): n is a, c, g, or t
  misc_feature (3161)..(3161): n is a, c, g, or t
  misc_feature (3743)..(3743): n is a, c, g, or t
ccctcgacctgcacggnacgctcgacacgcggctgctcgggttcactggtgtcagccgacaacggctcgaagcgtggcgcctgcatggccggcgcaggcgcnntnnnnncnnnnnnntgngnnngnncnngnnnnnnnnnnncnnangnaagngnggngnnnnnnnncnnttnnnnncntananggaganaangcncnggngnnntnccnntnnancncncnnannnnnntncnaanannnggnaangnnnntttnnntnnnccnnnnngnncnnnangnnntngggcnnananncgcnnnncnnnncncnnncncntnccncntnnngngnnnnanncnntgtntnnantnnnngnnnngnnnntnnnncgcnnaaanncnnaacacnnnnnnncnaanntnccncnnacnngnanncncntnnnnncnnnnnngngnnaannnggngncnnttnnannggcgcncccnnngnttnnccanaanaancnnnangcnnngnnngnaannccnnngntnngnnnncccncnnannnnnngnaaangnnttnncncnanntntntnnanaaanncccnngnggnnngngnnnanncntntnnaaanncnnnnntnaacnncncntgngnatntntcnnntttnanncccnnnntngcnnagnncctnnncnnggggngnncnccnnttncncncnannttnnnntncgngggngnnccnntcncntangntntnnnncnntntnnccananaaanggnnnnncanatatanannnntnanntntnaagnnnttatntttntttncctnttattttttcatccatgcagggctggttggaaattgacctggctcgatagcttctctacaatcgccggtctcttaaaagggggccattccggcccgcaatggatcaccaggtaaacgcaccatgaaacgcactttccagcccagcaccatcaagcgcgctcgtactcacggtttccgtgcacgtatggccaccaagaacggtcgtcaggttctgtcgcgtcgtcgcgccaaaggccgtaagcgtctgaccgtctgatatcggaacaggtagtgagtcggggcttcggccgggaaaagcgtctgctgactccccgccaattcaaggcagtcttcgactccccttccggtaaggtgcctggcaggaacgtcctgctgttggcacgcgagaacgatctgcaacacccccgccttgggctggtgatcggcaagaaaagcgtcaagctctcggtcgaacgtaaccgcatcaagcggcagatacgtgagaccttccgccatcaccagtcggatctggtgggctgggacatcgtgatcatcgcccgnaagggattggctgatctggacaatcccgaactggcgaagcaattcgccaagctctggaagcgactgtcacgcagcccatccaagaccgccgtcgaacctggagccgccaacagcacccatgcgtaaattggccatcgcttcgatcagggtctaccagtacgccatcagtccgatgatggccagtcactgccgtttctatccaagctgctcctgctatgcactcgaggccatcgaaactcatggcctgttgcgtggcggctggctgagcctgcgcaggttggggcgctgccatccgtggaatcccggtggctacgatcccgtgccttctcataacacttccaattcatctccgatggccgagtaaccatggatatcaaacgctcgatactgctcgtcgctctagcagtcgttgcctacctgatggttcttcaatggaatcaggactacggtcaggcagccctgccgaccgaaaccgcgcaaagccagccgggcgtaccggctcttccggatagccccgcggccaacagcgaaggcaccgctggcgatgtgcccgcggttgccggccagcaacaggccagcgccctgccggctaangcgccnagcagccagctgattcgtgtgcgcagcgacgtgcttgacgtngcnatcgatccgcgcggtggcgacatcgtcgaactgcatctgccgcagtacccgcgtcgtcaggatcgtcccgatgtgccgttccaactgttcgagcgtagtggcgagcgagtctatgaagcacaaagcggcctgatcggcgacggcccggacaaggccagcgggcgtcctcagtacagcagtgagaaaagcgagtaccaactggccgaaggtcaggatcaggtggtcgtcgatctgaaatacaatgctgatggcgtcaactacatcaagcgtttcaccctcgagcgcggtaactatgcgctgaaggtgaactacctgatcgacaaccagagcggtcaaccctggaccggttacctgttcggtcagctcaagcgcgacaacagcggcgatccctcctcaagcaccgccactggcaccgctacctaccttggcgctgcgctgtggaccaaggacgagccgtatcgtaaggtctccatgggcgacatggatgaaagcaacctgcgtgaaagcgtgcagggtggctggatcgcctggctgcaacattatttcgtcaccgcctggattcctcagccgggcgataccaaccaggtgcagacgcgcaaggatagccagggcaactacatcatcggcttcaccggccccgccgttaccgtacctgccggcgcgcagggcgagacaggcgccacgctgtatgccggcccgaagagccaggacaagctggaagaactgtcccccggtctgcgtctgaccgtcgactacggcatcctctggttcatcgctcagccgatcttctggctgctggaaaacatccacgcnctgctgggcaactggggctggtcgatcatcgttctgaccatcgtcatcaagctcgccttcttcccgctctccgcggccagctaccggtcgatggcgcgcatgcgtgcggtgtcgccgaaaatgcaggcgctgaaggaacagcatggcgacgaccgccagaagatgtcccaggcgatgatggagctgtacaagaaggaaaagatcaatccgctgggcggctgcctgccgatcctggtgcagatgccggtattcctggccctgtactgggtcctgctggaaagcgtcgagatgcgccaggcgccctggatgttctggatcaccgacctttcgatcaaagacccgttcttcatcctgccnatcatcatgggcgtgaccatgttcatccagcagcagctgaacccgacgccgccggatccgatgcaggcgcgagtgatgaagctgctgccggtgatcttcaccttcttcttcctctggttccctgccggtctggtgctgtactgggtggtcaacaacgtcctgtccatcgcccagcagtggtacattacccgcaagatcgaggccgcggcgaagcccgcctgacgcctcaaccgccaatgcagaacgccccttgattggggcgttctgctatctgccgtccagaaaggaggccgcatgaatccagttcgcgacaccattgccgccgtcgctaccgcgccggggcgcggaggagtaggcatcgttcgggtatcagggccacggtccaaggctatcgccattaccctgaccggccgtgagccaacgccgcgccacgcacattacggtgcatttcacgcagacgacggcgaggtgatcgacgaaggcctgctactgttctttccgggaccgcattcgttcaccggtgaggacgtactcgaactgcaggggcatggcggcccggttgtcatggatatgctgctgcancgctgcgtcgagctcggcgttcgtctggctcggccaggcgaattcagtgaacgcgcattccttaacgacaagctcgatctggcccaggccgaggcgatcgccgaccttatcgaagcgagttcggcgcaggccgcgcgcaatgcggtgcgttcgctacagggcgaattctctcgccgcgtgcatcagttgaccgaaagattgattcagctgcgtatctatgtcgaagcggcgatcgattttcccgaagaagagatcga

SEQ ID NO: 1079 - DNA, 4000 bp, Escherichia coli
  misc_feature (597)..(597): n is a, c, g, or t
  misc_feature (600)..(600): n is a, c, g, or t
  misc_feature (1567)..(1567): n is a, c, g, or t
  misc_feature (1607)..(1607): n is a, c, g, or t
  misc_feature (3092)..(3092): n is a, c, g, or t
  misc_feature (3105)..(3105): n is a, c, g, or t
  misc_feature (3349)..(3349): n is a, c, g, or t
tttgcaggtggatgaggtggatatgctgacagtggtgctgattggctcgtcaaattcgcggctggcgcagttgggcgaagggcctcgtatgtttaccccgcgcggctatgcgcgcaagattgatggggatttggcccccatgaaagaaggaaacggcagatgacagtgtttttcatcggagcggggcccggggatcctgaacttttgaccctgaaagctgcgcggatcattggtgcatgtcccgtatgcctttatgccgggtctttggtgcccgaggaggttgtggcctgcgcgcccaaagatgcgcgcgttctggatacggcgcccatgacattagatgagacccatgcggaaattctggccgcccatgccaaagggcaggatgtggcgcgggtgcattctggggatccgtcgctctatggcgcgattgcggagcaaattcgccgcctgcgcgccgatggcattgactatgaaattattcccggcgtgcccgcctataccgccgttgcggccgccctggggcaagagttgacgattcctgagattgcccagtcgattgttttgacgcgcatgtcgatgaagtcgacctccatgccngcnggggagacccttgagaattttgccatctctggcgcaacgctcgccattcacctcgcgattcgcaatatgcgtgagattgaacgggttttaatcccgcattacggggccgattgcccggtcgtggtcgcttaccgggccagttggcccgatcagatcatcatccgcggcactctgagcgatattcgcaagaaagtgcgggatgcgaaaatcacccgaacggccttgatcttggtggggcctgcgctgaaggaacagcaagattttgtggattctgcgctctatcatccagatatggaacatgtgctgcgcaatcgcaaaactccggcggcttgagcgccttcaaaaaacgcttcacattttagtgactgccttgaccgtcgcggttttcccgcgcaggctattggttaaggagatgttaaaatgacaacatttttgccgaaagaagtggcggagggtttggaagcggctcgcaagcaggcgctgcggaagaagagccgattgcgggtgcaggccggcacggagatttttacggttctgaaatattgggacagcggattttcagtggatctgcaagatgcgccgcagttgcgcggtctcgtggacctctacgacggcagccgccatctgtatcaatgtttgatcgtcgcctctgaggaagagggcggggagatgcgctatgagttcaagcgcaacacccgtgccgttgacagcgcgccgctggactttgagcgggatgccaataagcctgtggccttgattggccgcagttaaccgggccggcggctactggagatccgaaaaagcctcctgcatggctgcaaccgcccgctcgacattggcgcgctgcgtgccgatgttaaagcgcaggaagctttcgccacctgtgccgaaggttggcccgtggttgacggcgattttggcccgtttttgcacccggtcaatggcctcctgtaaagacatgcccgtnccagagacatccacccaagccagataggtggcctcaagangcatggatgttaagccgggaatggcattgatcccagcgtcgaaaatcttgcggtttccatcgagatagaccagcaattcatccacccattgcgccccttctggcgaataggccgcggtaatcatatgcaggccaaaggaatttggggacagtccgagcgcctgcatccgtttggcaaaacgcgcgcgcaaatttggatcttcaatgatcacattgcccgaatgcccccctgcaatattgaaggtcttgctggccgcagtcatcataatcaagcgatctgaaattccgtcaatcagtgccatggctgtgtgtttcgcgccgaaggtcagatcgtggtgaatctcatcactgaccaaaagcagatcatgtttgatgcaaaattctgccacctgttgaagttccgcgcggctccatacccgcccgccaggattatgcggcgagcaaaggatgaccattttcgcatggggcggcagggcggcgtcatagctgtcgaaatccatctcatagcggccattgttttgcaccagtggcaattcgatcacctcgcggtcattggcgcggatcactttggcgaaggaatgatagaccggggtgaatagaaccacgccgtcgcctggctctgtgaatgtatccacacaaagcgccgtgccattcaccagcccatgggtggtgaaaataccgccgcggggcacctcccagccgtgacggtgtttcatccaccaggcaatcgcgtcgagatatttgctgtcatcgccaaaatagccgtatatcccatgctctgtaagcctggccagactgtctgccaccgcttgtggcggacgaaaatccatatccgccacccacattgccaaaccatcgtcgggcgacacgccatagagcggctccatcatatcccatttggaggagtgggtgttgcggcggtcaatctgggtgtcaaaggtcatggaaaatcctaatattttcgcgtaagattactgtgaaaaggccaaagatcaagcgctgggaagggcccggcacgcaaattgcggcaagaatctttgatgcggcaattgcgctgcgggtcggcattgaatatcacaccgctatgacaatacgccccataataatccatcccgatccgcgcttgaaaaagacggcggcgcccgtggctgaggtgacccccgcgattgagcgtttggctgaggatatgcttgaaaccatgtatgatgcaccgggcatcggactggctgcgccgcaaatcggcgtgatgagccgcgtgttcgttatggattgcgtgaaagaggaaggggccgcaccggcgccgatggttcttatgaatccggtcatcacctgggtctctgaggcgttgagcacctatgaagagggctgcctgtccattccagagcaatatggcgaggtggaacggcctgcagagattgatatgcaatggctgggcctggacgggaaaacccatacacaaagattcgatgggctttgggccacttgngcgcagcatgagntggatcacctaaacggcaagctgttcattgattacctcaaaccgatgcgccgccaacttatcacccgcaagatgcagaaactcaaacgtgagcaggcccggtcatgagccgaagcattgtgccttggccgcacccttgtttgcgacgacttgcggacccgattgagaaaatcaccccggaaattgaagagatttggcgcgatatgattgcggtgatggaagcgatgcctggcgttggtttggcngcgccgcaattgggcattgggttgcgcttggcggtggtggatgcctcttcggcgcgcggtgaggttctgcgcatggccaatcccgaggtactgcacgtatctgccaagcttgagatgggcgaagaggccagccctaatctgccctatgtctccgcgcagatcaaacgcccgcgcggcgtgacggtgcgctatatggacgaagctggcgcttggcaggaaaaagatctggttggcctctgggcccgctcgatgctccatcaggtcgatcacctcaatgggcggatgtattttgacaatctctccaagctcaagcgcgacatgctgatcaaaaaggctcgaaaactatgcgcgtagttttcatgggcacgcccgatttttcggtcgccgctttgcgggccttggccgaggctggccatgagatcgcagccgtctacagccaaccgccgcgtaaatccggccgggggcaaaaacgtcgtccgtcgccggtgcaagcctatgccgagtgccaaggatggacggtctttacacccaaaaacttccatgatccggctgagctggccaattttgcggctcttgaggcggatatcgccgtggtggtggcttacgggttgatcttgccacaagcgcttttggatgccccgcgctttggat

SEQ ID NO: 1080 - DNA, 4000 bp, Escherichia coli
  misc_feature (1)..(3): n is a, c, g, or t
  misc_feature (6)..(13): n is a, c, g, or t
  misc_feature (15)..(18): n is a, c, g, or t
  misc_feature (20)..(20): n is a, c, g, or t
  misc_feature (22)..(36): n is a, c, g, or t
  misc_feature (38)..(38): n is a, c, g, or t
  misc_feature (40)..(44): n is a, c, g, or t
  misc_feature (46)..(47): n is a, c, g, or t
  misc_feature (49)..(49): n is a, c, g, or t
  misc_feature (51)..(53): n is a, c, g, or t
  misc_feature (55)..(63): n is a, c, g, or t
  misc_feature (65)..(102): n is a, c, g, or t
  misc_feature (104)..(113): n is a, c, g, or t
  misc_feature (115)..(116): n is a, c, g, or t
  misc_feature (119)..(128): n is a, c, g, or t
  misc_feature (130)..(130): n is a, c, g, or t
  misc_feature (132)..(132): n is a, c, g, or t
  misc_feature (134)..(135): n is a, c, g, or t
  misc_feature (137)..(152): n is a, c, g, or t
  misc_feature (154)..(164): n is a, c, g, or t
  misc_feature (166)..(166): n is a, c, g, or t
  misc_feature (168)..(174): n is a, c, g, or t
  misc_feature (176)..(176): n is a, c, g, or t
  misc_feature (178)..(178): n is a, c, g, or t
  misc_feature (180)..(182): n is a, c, g, or t
  misc_feature (184)..(185): n is a, c, g, or t
  misc_feature (187)..(194): n is a, c, g, or t
  misc_feature (196)..(210): n is a, c, g, or t
  misc_feature (212)..(215): n is a, c, g, or t
  misc_feature (217)..(221): n is a, c, g, or t
  misc_feature (223)..(242): n is a, c, g, or t
  misc_feature (246)..(250): n is a, c, g, or t
  misc_feature (253)..(266): n is a, c, g, or t
  misc_feature (269)..(272): n is a, c, g, or t
  misc_feature (275)..(280): n is a, c, g, or t
  misc_feature (283)..(295): n is a, c, g, or t
  misc_feature (298)..(298): n is a, c, g, or t
  misc_feature (300)..(303): n is a, c, g, or t
  misc_feature (305)..(310): n is a, c, g, or t
  misc_feature (312)..(312): n is a, c, g, or t
  misc_feature (314)..(326): n is a, c, g, or t
  misc_feature (329)..(338): n is a, c, g, or t
  misc_feature (340)..(340): n is a, c, g, or t
  misc_feature (343)..(347): n is a, c, g, or t
  misc_feature (349)..(364): n is a, c, g, or t
  misc_feature (366)..(369): n is a, c, g, or t
  misc_feature (371)..(371): n is a, c, g, or t
  misc_feature (374)..(383): n is a, c, g, or t
  misc_feature (385)..(386): n is a, c, g, or t
  misc_feature (389)..(389): n is a, c, g, or t
  misc_feature (391)..(397): n is a, c, g, or t
  misc_feature (399)..(402): n is a, c, g, or t
  misc_feature (404)..(408): n is a, c, g, or t
  misc_feature (410)..(413): n is a, c, g, or t
  misc_feature (415)..(415): n is a, c, g, or t
  misc_feature (417)..(421): n is a, c, g, or t
  misc_feature (423)..(425): n is a, c, g, or t
  misc_feature (427)..(430): n is a, c, g, or t
  misc_feature (433)..(436): n is a, c, g, or t
  misc_feature (438)..(438): n is a, c, g, or t
  misc_feature (440)..(440): n is a, c, g, or t
  misc_feature (442)..(449): n is a, c, g, or t
  misc_feature (451)..(453): n is a, c, g, or t
  misc_feature (455)..(457): n is a, c, g, or t
  misc_feature (460)..(464): n is a, c, g, or t
  misc_feature (467)..(472): n is a, c, g, or t
  misc_feature (474)..(482): n is a, c, g, or t
  misc_feature (484)..(488): n is a, c, g, or t
  misc_feature (490)..(492): n is a, c, g, or t
  misc_feature (494)..(496): n is a, c, g, or t
  misc_feature (498)..(498): n is a, c, g, or t
  misc_feature (500)..(517): n is a, c, g, or t
  misc_feature (519)..(521): n is a, c, g, or t
  misc_feature (523)..(523): n is a, c, g, or t
  misc_feature (526)..(533): n is a, c, g, or t
  misc_feature (535)..(537): n is a, c, g, or t
  misc_feature (539)..(540): n is a, c, g, or t
  misc_feature (542)..(542): n is a, c, g, or t
  misc_feature (544)..(546): n is a, c, g, or t
  misc_feature (549)..(549): n is a, c, g, or t
  misc_feature (551)..(551): n is a, c, g, or t
  misc_feature (553)..(553): n is a, c, g, or t
  misc_feature (555)..(561): n is a, c, g, or t
  misc_feature (563)..(567): n is a, c, g, or t
  misc_feature (569)..(574): n is a, c, g, or t
  misc_feature (576)..(580): n is a, c, g, or t
  misc_feature (582)..(587): n is a, c, g, or t
  misc_feature (589)..(589): n is a, c, g, or t
  misc_feature (591)..(595): n is a, c, g, or t
  misc_feature (597)..(628): n is a, c, g, or t
  misc_feature (630)..(635): n is a, c, g, or t
  misc_feature (637)..(655): n is a, c, g, or t
  misc_feature (657)..(702): n is a, c, g, or t
  misc_feature (705)..(706): n is a, c, g, or t
  misc_feature (709)..(714): n is a, c, g, or t
  misc_feature (716)..(730): n is a, c, g, or t
  misc_feature (732)..(732): n is a, c, g, or t
  misc_feature (734)..(736): n is a, c, g, or t
  misc_feature (738)..(743): n is a, c, g, or t
  misc_feature (746)..(790): n is a, c, g, or t
  misc_feature (792)..(824): n is a, c, g, or t
  misc_feature (826)..(829): n is a, c, g, or t
  misc_feature (831)..(833): n is a, c, g, or t
  misc_feature (835)..(837): n is a, c, g, or t
  misc_feature (839)..(843): n is a, c, g, or t
  misc_feature (846)..(866): n is a, c, g, or t
  misc_feature (868)..(870): n is a, c, g, or t
  misc_feature (872)..(906): n is a, c, g, or t
  misc_feature (908)..(908): n is a, c, g, or t
  misc_feature (910)..(925): n is a, c, g, or t
  misc_feature (927)..(936): n is a, c, g, or t
  misc_feature (938)..(938): n is a, c, g, or t
  misc_feature (940)..(941): n is a, c, g, or t
  misc_feature (943)..(955): n is a, c, g, or t
  misc_feature (957)..(957): n is a, c, g, or t
  misc_feature (959)..(971): n is a, c, g, or t
  misc_feature (973)..(974): n is a, c, g, or t
  misc_feature (976)..(980): n is a, c, g, or t
  misc_feature (982)..(982): n is a, c, g, or t
  misc_feature (984)..(992): n is a, c, g, or t
  misc_feature (994)..(998): n is a, c, g, or t
  misc_feature (1000)..(1013): n is a, c, g, or t
  misc_feature (1015)..(1016): n is a, c, g, or t
  misc_feature (1018)..(1018): n is a, c, g, or t
  misc_feature (1020)..(1024): n is a, c, g, or t
  misc_feature (1026)..(1027): n is a, c, g, or t
  misc_feature (1029)..(1031): n is a, c, g, or t
  misc_feature (1033)..(1033): n is a, c, g, or t
  misc_feature (1035)..(1039): n is a, c, g, or t
  misc_feature (1042)..(1046): n is a, c, g, or t
  misc_feature (1048)..(1062): n is a, c, g, or t
  misc_feature (1064)..(1066): n is a, c, g, or t
  misc_feature (1068)..(1088): n is a, c, g, or t
  misc_feature (1090)..(1098): n is a, c, g, or t
  misc_feature (1100)..(1111): n is a, c, g, or t
  misc_feature (1113)..(1121): n is a, c, g, or t
  misc_feature (1123)..(1125): n is a, c, g, or t
  misc_feature (1127)..(1127): n is a, c, g, or t
  misc_feature (1129)..(1129): n is a, c, g, or t
  misc_feature (1131)..(1146): n is a, c, g, or t
  misc_feature (1148)..(1156): n is a, c, g, or t
  misc_feature (1158)..(1166): n is a, c, g, or t
  misc_feature (1168)..(1172): n is a, c, g, or t
  misc_feature (1174)..(1175): n is a, c, g, or t
  misc_feature (1177)..(1188): n is a, c, g, or t
  misc_feature (1190)..(1221): n is a, c, g, or t
  misc_feature (1223)..(1238): n is a, c, g, or t
  misc_feature (1241)..(1269): n is a, c, g, or t
  misc_feature (1271)..(1279): n is a, c, g, or t
  misc_feature (1281)..(1286): n is a, c, g, or t
  misc_feature (1288)..(1301): n is a, c, g, or t
  misc_feature (1303)..(1318): n is a, c, g, or t
  misc_feature (1320)..(1354): n is a, c, g, or t
  misc_feature (1356)..(1358): n is a, c, g, or t
  misc_feature (1360)..(1388): n is a, c, g, or t
  misc_feature (1390)..(1400): n is a, c, g, or t
  misc_feature (1402)..(1404): n is a, c, g, or t
  misc_feature (1406)..(1413): n is a, c, g, or t
  misc_feature (1415)..(1431): n is a, c, g, or t
  misc_feature (1433)..(1440): n is a, c, g, or t
  misc_feature (1442)..(1445): n is a, c, g, or t
  misc_feature (1447)..(1448): n is a, c, g, or t
  misc_feature (1450)..(1474): n is a, c, g, or t
  misc_feature (1476)..(1504): n is a, c, g, or t
  misc_feature (1506)..(1507): n is a, c, g, or t
  misc_feature (1509)..(1511): n is a, c, g, or t
  misc_feature (1513)..(1533): n is a, c, g, or t
  misc_feature (1535)..(1538): n is a, c, g, or t
  misc_feature (1540)..(1541): n is a, c, g, or t
  misc_feature (1544)..(1546): n is a, c, g, or t
  misc_feature (1548)..(1560): n is a, c, g, or t
  misc_feature (1562)..(1567): n is a, c, g, or t
  misc_feature (1570)..(1572): n is a, c, g, or t
  misc_feature (1574)..(1576): n is a, c, g, or t
  misc_feature (1578)..(1579): n is a, c, g, or t
  misc_feature (1581)..(1583): n is a, c, g, or t
  misc_feature (1585)..(1585): n is a, c, g, or t
  misc_feature (1587)..(1592): n is a, c, g, or t
  misc_feature (1594)..(1608): n is a, c, g, or t
  misc_feature (1611)..(1624): n is a, c, g, or t
  misc_feature (1626)..(1626): n is a, c, g, or t
  misc_feature (1629)..(1633): n is a, c, g, or t
  misc_feature (1635)..(1635): n is a, c, g, or t
  misc_feature (1637)..(1638): n is a, c, g, or t
  misc_feature (1640)..(1640): n is a, c, g, or t
  misc_feature (1644)..(1644): n is a, c, g, or t
  misc_feature (1646)..(1649): n is a, c, g, or t
  misc_feature (1651)..(1652): n is a, c, g, or t
  misc_feature (1654)..(1656): n is a, c, g, or t
  misc_feature (1658)..(1662): n is a, c, g, or t
  misc_feature (1664)..(1685): n is a, c, g, or t
  misc_feature (1687)..(1691): n is a, c, g, or t
  misc_feature (1694)..(1699): n is a, c, g, or t
  misc_feature (1701)..(1704): n is a, c, g, or t
  misc_feature (1706)..(1706): n is a, c, g, or t
  misc_feature (1708)..(1708): n is a, c, g, or t
  misc_feature (1710)..(1710): n is a, c, g, or t
  misc_feature (1712)..(1713): n is a, c, g, or t
  misc_feature (1717)..(1718): n is a, c, g, or t
  misc_feature (1720)..(1754): n is a, c, g, or t
  misc_feature (1756)..(1757): n is a, c, g, or t
  misc_feature (1761)..(1761): n is a, c, g, or t
  misc_feature (1763)..(1764): n is a, c, g, or t
  misc_feature (1766)..(1767): n is a, c, g, or t
  misc_feature (1775)..(1775): n is a, c, g, or t
  misc_feature (1777)..(1777): n is a, c, g, or t
  misc_feature (1779)..(1779): n is a, c, g, or t
  misc_feature (1783)..(1783): n is a, c, g, or t
  misc_feature (1787)..(1794): n is a, c, g, or t
  misc_feature (1796)..(1802): n is a, c, g, or t
  misc_feature (1804)..(1804): n is a, c, g, or t
  misc_feature (1807)..(1811): n is a, c, g, or t
  misc_feature (1813)..(1823): n is a, c, g, or t
  misc_feature (1827)..(1827): n is a, c, g, or t
  misc_feature (1830)..(1830): n is a, c, g, or t
  misc_feature (1833)..(1833): n is a, c, g, or t
  misc_feature (1841)..(1841): n is a, c, g, or t
  misc_feature (1843)..(1843): n is a, c, g, or t
  misc_feature (1845)..(1845): n is a, c, g, or t
  misc_feature (1849)..(1849): n is a, c, g, or t
  misc_feature (1853)..(1854): n is a, c, g, or t
  misc_feature (1856)..(1863): n is a, c, g, or t
  misc_feature (1865)..(1865): n is a, c, g, or t
  misc_feature (1867)..(1870): n is a, c, g, or t
  misc_feature (1872)..(1873): n is a, c, g, or t
  misc_feature (1875)..(1888): n is a, c, g, or t
  misc_feature (1921)..(1921): n is a, c, g, or t
  misc_feature (1923)..(1934): n is a, c, g, or t
  misc_feature (1936)..(1954): n is a, c, g, or t
  misc_feature (1958)..(1958): n is a, c, g, or t
  misc_feature (1961)..(1961): n is a, c, g, or t
  misc_feature (1964)..(1968): n is a, c, g, or t
  misc_feature (1972)..(1976): n is a, c, g, or t
  misc_feature (1980)..(1984): n is a, c, g, or t
  misc_feature (1986)..(1996): n is a, c, g, or t
  misc_feature (1998)..(2014): n is a, c, g, or t
  misc_feature (2016)..(2019): n is a, c, g, or t
  misc_feature (2132)..(2132): n is a, c, g, or t
  misc_feature (3542)..(3542): n is a, c, g, or t
  misc_feature (3809)..(3809): n is a, c, g, or t
nnncannnnnnnnannnncntnnnnnnnnnnnnnnncntnnnnnanncnannnannnnnnnnnannnnnnnnnnnnnnnnnnnnnnnnnnnnnnnnnnnnnntnnnnnnnnnntnnacnnnnnnnnnnangntnncnnnnnnnnnnnnnnnntnnnnnnnnnnntnannnnnnntnanannnannannnnnnnnannnnnnnnnnnnnnncnnnnannnnntnnnnnnnnnnnnnnnnnnnnaaannnnnaannnnnnnnnnnnnnaannnntannnnnnatnnnnnnnnnnnnnctnannnnannnnnnancnnnnnnnnnnnnnagnnnnnnnnnnanttnnnnnannnnnnnnnnnnnnnntnnnngnttnnnnnnnnnnanncangnnnnnnntnnnngnnnnnannnntnannnnntnnntnnnnatnnnntntnannnnnnnnannncnnnagnnnnnaannnnnnannnnnnnnntnnnnnannntnnntnannnnnnnnnnnnnnnnnnannnanagnnnnnnnntnnntnntntnnnttnananannnnnnnannnnntnnnnnncnnnnnannnnnncnannnnntnnnnnnnnnnnnnnnnnnnnnnnnnnnnnnnnannnnnnannnnnnnnnnnnnnnnnnngnnnnnnnnnnnnnnnnnnnnnnnnnnnnnnnnnnnnnnnnnnnnnnttnncannnnnnannnnnnnnnnnnnnnancnnnannnnnnttnnnnnnnnnnnnnnnnnnnnnnnnnnnnnnnnnnnnnnnnnnnnnannnnnnnnnnnnnnnnnnnnnnnnnnnnnnnnnannnnannntnnncnnnnncannnnnnnnnnnnnnnnnnnnntnnntnnnnnnnnnnnnnnnnnnnnnnnnnnnnnnnnnnncnannnnnnnnnnnnnnnnannnnnnnnnntntnnannnnnnnnnnnnntntnnnnnnnnnnnnnannannnnnanannnnnnnnnannnnnannnnnnnnnnnnnnannantnnnnnanntnnnanannnnnaannnnnannnnnnnnnnnnnnntnnnannnnnnnnnnnnnnnnnnnnntnnnnnnnnntnnnnnnnnnnnnannnnnnnnnannntntnannnnnnnnnnnnnnnnannnnnnnnngnnnnnnnnntnnnnncnncnnnnnnnnnnnngnnnnnnnnnnnnnnnnnnnnnnnnnnnnnnnnannnnnnnnnnnnnnnnccnnnnnnnnnnnnnnnnnnnnnnnnnnnnntnnnnnnnnntnnnnnntnnnnnnnnnnnnnnannnnnnnnnnnnnnnngnnnnnnnnnnnnnnnnnnnnnnnnnnnnnnnnnnnannntnnnnnnnnnnnnnnnnnnnnnnnnnnnnngnnnnnnnnnnntnnngnnnnnnnnannnnnnnnnnnnnnnnnannnnnnnnannnncnnannnnnnnnnnnnnnnnnnnnnnnnntnnnnnnnnnnnnnnnnnnnnnnnnnnnnnanncnnncnnnnnnnnnnnnnnnnnnnnntnnnntnnatnnncnnnnnnnnnnnnntnnnnnncannncnnncnncnnngngnnnnnngnnnnnnnnnnnnnnnttnnnnnnnnnnnnnntnttnnnnncnanncncccncnnnngnngnnncnnnnnannnnnnnnnnnnnnnnnnnnnngnnnnnttnnnnnncnnnncncncncnngggnngnnnnnnnnnnnnnnnnnnnnnnnnnnnnnnnnnnnanntttnanncnncacacccncncngggngtgnnnnnnnnannnnnnnantannnnnannnnnnnnnnntttnaanccncacacccncncngggngtgnnannnnnnnntntnnnntnntnnnnnnnnnnnnnngtttcaatccacacacccacgcagggtgtgacnannnnnnnnnnnnannnnnnnnnnnnnnnnnnntttnaanccnnnnncccnnnnngggnnnnncnnnnnnnnnnntnnnnnnnnnnnnnnnnntnnnngtttcaatccacacacccacgcagggtgtgactctatatctaataacatattataaatcagcaaatttaatccactgttatgcgaatcatcattattattcaacttcataacnaagaaatactttacaaataatttaatctactgattattaacacatgcgaagatactactttttttgtaacacaccacattcgcattatattataagagcctcctcaagtttatacgccgtttcaacacctattacttccaccctcttattctcatttttactaagaatataaaaacgaacactatcaagagacatatcaataatatccctaactctcccttttagaagagaatattgcgcttccgtcactacacactcaaagactgagttctgcaccctctgtccataatccagacaagccttggccacacatcgtaaacggcgagccccctctttgcttgtagtatccacatcgtaagtcacaagaatgtacataattaaaaatcattttataagaaataccggataatcgtcaatatcctgcctgatataccttgccattaacatagcctgcacataaggcagaagccctatttcaactttttcattaagataaggatgaattatcacttcccttttccttgcctgccatgcagtaataaaagtctttttccctttatctgtcataacaaccccattatcaccttggaacaagaagtcttttactgaaatctgtcttttattaatcaacgacaaaataaaacggtcgccaaggtaagcacgtaactcttccatcatatctaaggccaacgatgtgcgccccggacggagtgtatggagaaacccgacgtatggatcaaggccaacagtttcgagagcggccgcaacatcattggctatcaacgtatatgcaaaagacaacatggcattcaccgcatccttgggaggacgacgattgcgaccatgaaatgggaaatcagtcttctgattaagtatcaagattggcaatacctcaaaataggcattcgaagccatcccctcataaccaattaattccgtcttatcttgagccttcaaagcatcacgcttggcacgttccaatacttgcaccgccctattaatgtcttcattctcaccataatcacgaatatatctcctcaatatattgcgatagttttgaatcttaccaccaatcatcaacctaaccacatgcaacgaccaagatgcatcgtccgacaattggtactgctttttgcgtaacagaacattccctttcgtagcaccttgaaccctgctgataaatctgccttgtggagaaagaaatgtgagtgatataccattgtcactacacaatttcatcacaccgggacttgcgcccatatatccgaacgtaacgatgccctctatatttatgacaggaatacgaaacacctcctcctgctgaacagatataacgacattcagcccatccttactaagatacgcttccggtgtcgtcacatacaaagtattcaatagttttctcatagntacagatttttagtaaggtaattatctaccgaagtacaattatttaccatttccggcatgcagatatctttcagcgagcacttgtcacaatgtttcccatattcagccttcgggataaccgctttactaaatatatcgtgcatatcccgggcacattgtctgactatatttcgcagctcctccgttatatccacattaacccgatggcgaagctccccataaaagaaagagccgtatggtatatggatagcatacatttcttctatncacatgatttgtgctgccaactgcacttcatccacctcgtttcttttcggtttgccatgcttatactccacagcaaccggttgccatcgccccggatagttgggatgcaaaatcgtattttcaaaagatgaggaaggaagtaactctatggcatcagagattccatagagtccaagttcacgcgaagcgat

SEQ ID NO: 1081 - DNA, 4000 bp, Escherichia coli
  misc_feature (3)..(3): n is a, c, g, or t
  misc_feature (8)..(12): n is a, c, g, or t
  misc_feature (15)..(15): n is a, c, g, or t
  misc_feature (17)..(19): n is a, c, g, or t
  misc_feature (21)..(22): n is a, c, g, or t
  misc_feature (24)..(26): n is a, c, g, or t
  misc_feature (28)..(30): n is a, c, g, or t
  misc_feature (32)..(34): n is a, c, g, or t
  misc_feature (36)..(43): n is a, c, g, or t
  misc_feature (45)..(45): n is a, c, g, or t
  misc_feature (48)..(56): n is a, c, g, or t
  misc_feature (58)..(60): n is a, c, g, or t
  misc_feature (63)..(64): n is a, c, g, or t
  misc_feature (66)..(67): n is a, c, g, or t
  misc_feature (71)..(71): n is a, c, g, or t
  misc_feature (73)..(73): n is a, c, g, or t
  misc_feature (75)..(76): n is a, c, g, or t
  misc_feature (78)..(82): n is a, c, g, or t
  misc_feature (84)..(84): n is a, c, g, or t
  misc_feature (90)..(97): n is a, c, g, or t
  misc_feature (99)..(103): n is a, c, g, or t
  misc_feature (107)..(111): n is a, c, g, or t
  misc_feature (113)..(119): n is a, c, g, or t
  misc_feature (121)..(121): n is a, c, g, or t
  misc_feature (123)..(129): n is a, c, g, or t
  misc_feature (131)..(132): n is a, c, g, or t
  misc_feature (134)..(136): n is a, c, g, or t
  misc_feature (138)..(145): n is a, c, g, or t
  misc_feature (147)..(150): n is a, c, g, or t
  misc_feature (152)..(163): n is a, c, g, or t
  misc_feature (165)..(165): n is a, c, g, or t
  misc_feature (167)..(169): n is a, c, g, or t
  misc_feature (171)..(171): n is a, c, g, or t
  misc_feature (173)..(178): n is a, c, g, or t
  misc_feature (181)..(183): n is a, c, g, or t
  misc_feature (187)..(191): n is a, c, g, or t
  misc_feature (194)..(200): n is a, c, g, or t
  misc_feature (203)..(216): n is a, c, g, or t
  misc_feature (218)..(220): n is a, c, g, or t
  misc_feature (222)..(228): n is a, c, g, or t
  misc_feature (230)..(230): n is a, c, g, or t
  misc_feature (233)..(236): n is a, c, g, or t
  misc_feature (238)..(239): n is a, c, g, or t
  misc_feature (241)..(245): n is a, c, g, or t
  misc_feature (247)..(253): n is a, c, g, or t
  misc_feature (255)..(255): n is a, c, g, or t
  misc_feature (257)..(257): n is a, c, g, or t
  misc_feature (259)..(260): n is a, c, g, or t
  misc_feature (263)..(264): n is a, c, g, or t
  misc_feature (266)..(267): n is a, c, g, or t
  misc_feature (270)..(270): n is a, c, g, or t
  misc_feature (272)..(275): n is a, c, g, or t
  misc_feature (278)..(285): n is a, c, g, or t
  misc_feature (287)..(288): n is a, c, g, or t
  misc_feature (290)..(295): n is a, c, g, or t
  misc_feature (298)..(299): n is a, c, g, or t
  misc_feature (301)..(301): n is a, c, g, or t
  misc_feature (303)..(305): n is a, c, g, or t
  misc_feature (307)..(308): n is a, c, g, or t
  misc_feature (310)..(310): n is a, c, g, or t
  misc_feature (312)..(314): n is a, c, g, or t
  misc_feature (316)..(318): n is a, c, g, or t
  misc_feature (321)..(322): n is a, c, g, or t
  misc_feature (324)..(324): n is a, c, g, or t
  misc_feature (326)..(327): n is a, c, g, or t
  misc_feature (331)..(333): n is a, c, g, or t
  misc_feature (335)..(335): n is a, c, g, or t
  misc_feature (337)..(337): n is a, c, g, or t
  misc_feature (339)..(339): n is a, c, g, or t
  misc_feature (341)..(348): n is a, c, g, or t
  misc_feature (350)..(358): n is a, c, g, or t
  misc_feature (360)..(364): n is a, c, g, or t
  misc_feature (367)..(371): n is a, c, g, or t
  misc_feature (373)..(374): n is a, c, g, or t
  misc_feature (376)..(382): n is a, c, g, or t
  misc_feature (384)..(384): n is a, c, g, or t
  misc_feature (386)..(395): n is a, c, g, or t
  misc_feature (397)..(404): n is a, c, g, or t
  misc_feature (406)..(407): n is a, c, g, or t
  misc_feature (409)..(410): n is a, c, g, or t
  misc_feature (412)..(413): n is a, c, g, or t
  misc_feature (415)..(415): n is a, c, g, or t
  misc_feature (418)..(422): n is a, c, g, or t
  misc_feature (425)..(426): n is a, c, g, or t
  misc_feature (436)..(437): n is a, c, g, or t
  misc_feature (439)..(446): n is a, c, g, or t
  misc_feature (449)..(454): n is a, c, g, or t
  misc_feature (457)..(459): n is a, c, g, or t
  misc_feature (462)..(463): n is a, c, g, or t
  misc_feature (465)..(466): n is a, c, g, or t
  misc_feature (468)..(468): n is a, c, g, or t
  misc_feature (470)..(470): n is a, c, g, or t
  misc_feature (472)..(479): n is a, c, g, or t
  misc_feature (481)..(482): n is a, c, g, or t
  misc_feature (484)..(484): n is a, c, g, or t
  misc_feature (486)..(487): n is a, c, g, or t
  misc_feature (489)..(491): n is a, c, g, or t
  misc_feature (493)..(495): n is a, c, g, or t
  misc_feature (497)..(497): n is a, c, g, or t
  misc_feature (499)..(499): n is a, c, g, or t
  misc_feature (501)..(504): n is a, c, g, or t
  misc_feature (507)..(509): n is a, c, g, or t
  misc_feature (511)..(511): n is a, c, g, or t
  misc_feature (513)..(513): n is a, c, g, or t
  misc_feature (516)..(519): n is a, c, g, or t
  misc_feature (521)..(522): n is a, c, g, or t
  misc_feature (524)..(529): n is a, c, g, or t
  misc_feature (531)..(535): n is a, c, g, or t
  misc_feature (538)..(542): n is a, c, g, or t
  misc_feature (544)..(545): n is a, c, g, or t
  misc_feature (547)..(552): n is a, c, g, or t
  misc_feature (556)..(556): n is a, c, g, or t
  misc_feature (559)..(560): n is a, c, g, or t
  misc_feature (562)..(562): n is a, c, g, or t
  misc_feature (565)..(575): n is a, c, g, or t
  misc_feature (577)..(578): n is a, c, g, or t
  misc_feature (580)..(582): n is a, c, g, or t
  misc_feature (585)..(586): n is a, c, g, or t
  misc_feature (590)..(592): n is a, c, g, or t
  misc_feature (594)..(594): n is a, c, g, or t
  misc_feature (596)..(609): n is a, c, g, or t
  misc_feature (614)..(614): n is a, c, g, or t
  misc_feature (617)..(617): n is a, c, g, or t
  misc_feature (619)..(619): n is a, c, g, or t
  misc_feature (621)..(632): n is a, c, g, or t
  misc_feature (634)..(644): n is a, c, g, or t
  misc_feature (646)..(647): n is a, c, g, or t
  misc_feature (649)..(650): n is a, c, g, or t
  misc_feature (653)..(660): n is a, c, g, or t
  misc_feature (662)..(662): n is a, c, g, or t
  misc_feature (664)..(665): n is a, c, g, or t
  misc_feature (667)..(667): n is a, c, g, or t
  misc_feature (670)..(671): n is a, c, g, or t
  misc_feature (674)..(678): n is a, c, g, or t
  misc_feature (680)..(682): n is a, c, g, or t
  misc_feature (684)..(685): n is a, c, g, or t
  misc_feature (687)..(687): n is a, c, g, or t
  misc_feature (689)..(689): n is a, c, g, or t
  misc_feature (691)..(691): n is a, c, g, or t
  misc_feature (694)..(702): n is a, c, g, or t
  misc_feature (704)..(707): n is a, c, g, or t
  misc_feature (711)..(711): n is a, c, g, or t
  misc_feature (714)..(717): n is a, c, g, or t
  misc_feature (720)..(724): n is a, c, g, or t
  misc_feature (726)..(727): n is a, c, g, or t
  misc_feature (730)..(730): n is a, c, g, or t
  misc_feature (732)..(732): n is a, c, g, or t
  misc_feature (735)..(746): n is a, c, g, or t
  misc_feature (748)..(749): n is a, c, g, or t
  misc_feature (751)..(751): n is a, c, g, or t
  misc_feature (753)..(753): n is a, c, g, or t
  misc_feature (755)..(756): n is a, c, g, or t
  misc_feature (759)..(763): n is a, c, g, or t
  misc_feature (766)..(766): n is a, c, g, or t
  misc_feature (768)..(769): n is a, c, g, or t
  misc_feature (772)..(775): n is a, c, g, or t
  misc_feature (777)..(778): n is a, c, g, or t
  misc_feature (781)..(782): n is a, c, g, or t
  misc_feature (784)..(787): n is a, c, g, or t
  misc_feature (789)..(792): n is a, c, g, or t
  misc_feature (794)..(795): n is a, c, g, or t
  misc_feature (797)..(803): n is a, c, g, or t
  misc_feature (805)..(808): n is a, c, g, or t
  misc_feature (810)..(812): n is a, c, g, or t
  misc_feature (816)..(816): n is a, c, g, or t
  misc_feature (818)..(821): n is a, c, g, or t
  misc_feature (823)..(825): n is a, c, g, or t
  misc_feature (827)..(829): n is a, c, g, or t
  misc_feature (832)..(833): n is a, c, g, or t
  misc_feature (835)..(836): n is a, c, g, or t
  misc_feature (838)..(838): n is a, c, g, or t
  misc_feature (841)..(844): n is a, c, g, or t
  misc_feature (846)..(846): n is a, c, g, or t
  misc_feature (851)..(852): n is a, c, g, or t
  misc_feature (854)..(861): n is a, c, g, or t
  misc_feature (864)..(864): n is a, c, g, or t
  misc_feature (866)..(867): n is a, c, g, or t
  misc_feature (869)..(879): n is a, c, g, or t
  misc_feature (881)..(882): n is a, c, g, or t
  misc_feature (884)..(891): n is a, c, g, or t
  misc_feature (893)..(897): n is a, c, g, or t
  misc_feature (899)..(901): n is a, c, g, or t
  misc_feature (903)..(905): n is a, c, g, or t
  misc_feature (907)..(909): n is a, c, g, or t
  misc_feature (912)..(914): n is a, c, g, or t
  misc_feature (916)..(921): n is a, c, g, or t
  misc_feature (924)..(924): n is a, c, g, or t
  misc_feature (926)..(930): n is a, c, g, or t
  misc_feature (932)..(936): n is a, c, g, or t
  misc_feature (939)..(941): n is a, c, g, or t
  misc_feature (943)..(943): n is a, c, g, or t
  misc_feature (945)..(950): n is a, c, g, or t
  misc_feature (952)..(956): n is a, c, g, or t
  misc_feature (958)..(959): n is a, c, g, or t
  misc_feature (961)..(966): n is a, c, g, or t
  misc_feature (969)..(969): n is a, c, g, or t
  misc_feature (971)..(971): n is a, c, g, or t
  misc_feature (973)..(973): n is a, c, g, or t
  misc_feature (975)..(975): n is a, c, g, or t
  misc_feature (978)..(979): n is a, c, g, or t
  misc_feature (981)..(981): n is a, c, g, or t
  misc_feature (985)..(985): n is a, c, g, or t
  misc_feature (988)..(989): n is a, c, g, or t
  misc_feature (991)..(994): n is a, c, g, or t
  misc_feature (996)..(1005): n is a, c, g, or t
  misc_feature (1009)..(1013): n is a, c, g, or t
  misc_feature (1015)..(1017): n is a, c, g, or t
  misc_feature (1019)..(1019): n is a, c, g, or t
  misc_feature (1021)..(1025): n is a, c, g, or t
  misc_feature (1027)..(1029): n is a, c, g, or t
  misc_feature (1032)..(1032): n is a, c, g, or t
  misc_feature (1036)..(1036): n is a, c, g, or t
  misc_feature (1038)..(1039): n is a, c, g, or t
  misc_feature (1041)..(1043): n is a, c, g, or t
  misc_feature (1046)..(1051): n is a, c, g, or t
  misc_feature (1053)..(1054): n is a, c, g, or t
  misc_feature (1056)..(1057): n is a, c, g, or t
  misc_feature (1059)..(1064): n is a, c, g, or t
  misc_feature (1066)..(1068): n is a, c, g, or t
  misc_feature (1070)..(1070): n is a, c, g, or t
  misc_feature (1072)..(1073): n is a, c, g, or t
  misc_feature (1077)..(1078): n is a, c, g, or t
  misc_feature (1080)..(1085): n is a, c, g, or t
  misc_feature (1088)..(1092): n is a, c, g, or t
  misc_feature (1094)..(1100): n is a, c, g, or t
  misc_feature (1103)..(1114): n is a, c, g, or t
  misc_feature (1116)..(1116): n is a, c, g, or t
  misc_feature (1118)..(1119): n is a, c, g, or t
  misc_feature (1121)..(1121): n is a, c, g, or t
  misc_feature (1126)..(1127): n is a, c, g, or t
  misc_feature (1129)..(1132): n is a, c, g, or t
  misc_feature (1134)..(1137): n is a, c, g, or t
  misc_feature (1139)..(1139): n is a, c, g, or t
  misc_feature (1141)..(1142): n is a, c, g, or t
  misc_feature (1147)..(1151): n is a, c, g, or t
  misc_feature (1153)..(1153): n is a, c, g, or t
  misc_feature (1155)..(1164): n is a, c, g, or t
  misc_feature (1166)..(1168): n is a, c, g, or t
  misc_feature (1170)..(1170): n is a, c, g, or t
  misc_feature (1172)..(1172): n is a, c, g, or t
  misc_feature (1174)..(1183): n is a, c, g, or t
  misc_feature (1185)..(1188): n is a, c, g, or t
  misc_feature (1190)..(1191): n is a, c, g, or t
  misc_feature (1196)..(1196): n is a, c, g, or t
  misc_feature (1198)..(1199): n is a, c, g, or t
  misc_feature (1202)..(1202): n is a, c, g, or t
  misc_feature (1205)..(1205): n is a, c, g, or t
  misc_feature (1208)..(1209): n is a, c, g, or t
  misc_feature (1212)..(1215): n is a, c, g, or t
  misc_feature (1217)..(1218): n is a, c, g, or t
  misc_feature (1225)..(1229): n is a, c, g, or t
  misc_feature (1231)..(1235): n is a, c, g, or t
  misc_feature (1237)..(1237): n is a, c, g, or t
  misc_feature (1239)..(1242): n is a, c, g, or t
  misc_feature (1244)..(1246): n is a, c, g, or t
  misc_feature (1248)..(1249): n is a, c, g, or t
  misc_feature (1253)..(1253): n is a, c, g, or t
  misc_feature (1258)..(1262): n is a, c, g, or t
  misc_feature (1265)..(1265): n is a, c, g, or t
  misc_feature (1268)..(1268): n is a, c, g, or t
  misc_feature (1271)..(1271): n is a, c, g, or t
  misc_feature (1274)..(1276): n is a, c, g, or t
  misc_feature (1278)..(1279): n is a, c, g, or t
  misc_feature (1281)..(1281): n is a, c, g, or t
  misc_feature (1283)..(1284): n is a, c, g, or t
  misc_feature (1286)..(1288): n is a, c, g, or t
  misc_feature (1290)..(1299): n is a, c, g, or t
  misc_feature (1301)..(1301): n is a, c, g, or t
  misc_feature (1303)..(1305): n is a, c, g, or t
  misc_feature (1308)..(1309): n is a, c, g, or t
  misc_feature (1311)..(1313): n is a, c, g, or t
  misc_feature (1316)..(1317): n is a, c, g, or t
  misc_feature (1320)..(1320): n is a, c, g, or t
  misc_feature (1322)..(1322): n is a, c, g, or t
  misc_feature (1324)..(1326): n is a, c, g, or t
  misc_feature (1329)..(1331): n is a, c, g, or t
  misc_feature (1333)..(1333): n is a, c, g, or t
  misc_feature (1336)..(1336): n is a, c, g, or t
  misc_feature (1339)..(1340): n is a, c, g, or t
  misc_feature (1342)..(1349): n is a, c, g, or t
  misc_feature (1352)..(1353): n is a, c, g, or t
  misc_feature (1358)..(1359): n is a, c, g, or t
  misc_feature (1366)..(1366): n is a, c, g, or t
  misc_feature (1370)..(1370): n is a, c, g, or t
  misc_feature (1372)..(1372): n is a, c, g, or t
  misc_feature (1374)..(1375): n is a, c, g, or t
  misc_feature (1378)..(1381): n is a, c, g, or t
  misc_feature (1383)..(1385): n is a, c, g, or t
  misc_feature (1810)..(1810): n is a, c, g, or t
  misc_feature (1992)..(1992): n is a, c, g, or t
  misc_feature (2307)..(2307): n is a, c, g, or t
  misc_feature (2310)..(2310): n is a, c, g, or t
  misc_feature (2316)..(2316): n is a, c, g, or t
  misc_feature (2577)..(2577): n is a, c, g, or t
  misc_feature (2634)..(2634): n is a, c, g, or t
  misc_feature (2655)..(2655): n is a, c, g, or t
  misc_feature (2678)..(2679): n is a, c, g, or t
  misc_feature (2931)..(2931): n is a, c, g, or t
  misc_feature (2937)..(2937): n is a, c, g, or t
  misc_feature (3066)..(3066): n is a, c, g, or t
  misc_feature (3108)..(3108): n is a, c, g, or t
  misc_feature (3121)..(3121): n is a, c, g, or t
  misc_feature (3141)..(3141): n is a, c, g, or t
  misc_feature (3189)..(3189): n is a, c, g, or t
  misc_feature (3199)..(3199): n is a, c, g, or t
  misc_feature (3201)..(3201): n is a, c, g, or t
  misc_feature (3234)..(3234): n is a, c, g, or t
  misc_feature (3279)..(3279): n is a, c, g, or t
  misc_feature (3285)..(3285): n is a, c, g, or t
  misc_feature (3288)..(3288): n is a, c, g, or t
  misc_feature (3291)..(3291): n is a, c, g, or t
  misc_feature (3294)..(3294): n is a, c, g, or t
  misc_feature (3300)..(3300): n is a, c, g, or t
  misc_feature (3304)..(3304): n is a, c, g, or t
  misc_feature (3450)..(3450): n is a, c, g, or t
  misc_feature (3453)..(3453): n is a, c, g, or t
  misc_feature (3501)..(3501): n is a, c, g, or t
  misc_feature (3525)..(3525): n is a, c, g, or t
  misc_feature (3561)..(3561): n is a, c, g, or t
  misc_feature (3594)..(3594): n is a, c, g, or t
  misc_feature (3648)..(3648): n is a, c, g, or t
  misc_feature (3705)..(3705): n is a, c, g, or t
  misc_feature (3792)..(3792): n is a, c, g, or t
  misc_feature (3807)..(3807): n is a, c, g, or t
  misc_feature (3816)..(3816): n is a, c, g, or t
  misc_feature (3981)..(3981): n is a, c, g, or t
gangaagnnnnnagnannntnntnnncnnnannnannnnnnnntngtnnnnnnnnntnnnaannannttgntngnngnnnnntntttttnnnnnnnntnnnnnaagnnnnnannnnnnntntnnnnnnngnngnnnannnnnnnnannnnannnnnnnnnnnnantnnncntnnnnnncannntggnnnnntcnnnnnnntannnnnnnnnnnnnngnnnannnnnnnanaannnntnntnnnnnannnnnnntngnannaannannaantnnnnaannnnnnnncnncnnnnnntgnngnannnannangnnntnnntcnncngnngaannnantnancnnnnnnnngnnnnnnnnncnnnnnaannnnnannannnnnnnanannnnnnnnnnannnnnnnnannannannancannnnntgnngaagaagatnntnnnnnnnntgnnnnnnttnnngannannangnannnnnnnntnntnannannnannnantnannnnttnnngnangannnnannannnnnntnnnnngtnnnnnannannnnnngaanaannantannnnnnnnnnntnntnnnttnnatgnnngnannnnnnnnnnnnnngaagnagnangnnnnnnnnnnnncnnnnnnnnnnnanntnntcnnnnnnnngnannanaannacnnnnntnnntnnancnancannnnnnnnnannnnaatnaannnnttnnnnnannaanangannnnnnnnnnnnannanananntgnnnnnatnannaannnngnngtnntnnnngnnnntnntnnnnnnnannnntnnnttcntnnnntnnnannnaannannanaannnngnaaaannannnnnnnnttntnntnnnnnnnnnnnannannnnnnnntnnnnnannnannnannnagnnnannnnnntgntnnnnnannnnnaannntntnnnnnnannnnntnnannnnnnacnanangncgnngntgtngtnntnnnngnnnnnnnnnnctannnnncnnnanannnnntnnnagnagcngnngnnnaannnnnntnnanntnnnnnnannngntnnttgnngnnnnnnatnnnnnannnnnnntannnnnnnnnnnnantnntnatcannannnnannnntnannaagannnnntnannnnnnnnnntnnntncnannnnnnnnnnannnntnntacanannatnatnatnnatnnnntnntgatgannnnntnnnnngngnnnntnnncnncaanaaaannnnnganaanaanttnnntnntntnntnnncnnnnnnnnnncntnnntgnngnnnttnnaananannnacnnnangangannannnnnnnnaannattannacaaaanaagnantnnttnnnngnnncaaaataaaaacgcggttcttagagccacgttttttatttctgaatggaattgacagccttagcgagtcttgacttctgacgagcagcatagttgttattcttgatatgagatacaactgccttgtctaagcacttatttgctgtgttgtaagcagcagtagcagcttcaacgtccttagcttctacagctaaaagaaccttcttgattgctgtctttagttcgctcttctgtccagccttcgcattctgtcttttcagattagttagtgcgcgcttcttctgtgacttgatatttgccatgagtacacctcctgtccacttattagcattaggattatatcaaagtgaagtgtaaaatgcaatgaaaaccccaaaaaagtagggtataatatcacggtggaggtatgagagatgaaacagacangaattatattttttggtacaacagaatttgcaagcggtatattacagaccttaatcgatgaaggatataacgttgtagccgttgtttcccaaccagataaaccggttggtagaaaacataccatccagatgacaccaacacatgctttagcagatcaatatcagattccagtgattcaaccngatctcttaaaggaacatgtggatgatgtattacgatatgaaccagagttaatcttaacttgtgcatatggacaatttgtaccagtacgcattctagaatatccacgtcttggttgtattaatgtacatccatcacttttaccaaagtatcgtggaggtgcaccaatccatcatgcagttatgggtggtgaaacagaaactggtgtaagtctcatccagatgacaaaagccatggatgcaggagatatctatgctagagttacaacaccacttggtaaagatgaaacgatggcagaattaaaccagcgtttactngtnttaagnaagcaattagtgaaagagaatttagaagactatattgcagggaagctagtgggagaaccacaggatgatagtaaagtaatccttggattaaatattacaaaggaagaagagaaagtacagtttgcagtggaagatgtacaaactctatataaccacattcgtggtttaattgattggccaatgccatatggtgtggttgatggaaagcgtatcaagttctgcaaagttagaatgagaaaagaagaccatcaatcaaaaccnggagaaatcttaggttttaagaatcatgcgatggaagtcgcaagcattggtggcatnattgaagtttatgaactacanccagaaggcaagagcagaatganngcagatgcttatgccaatggtgtaggtagaaatatgatagggaaggtatttgagtaaatggatcaaaagcatatacgaaatttctgtattattgcccatatcgaccatggtaaatcgacattggcagaccgtattcttgaaatgacagaaacggtaaaagaacgtgatatgaaagctcagcttctggatgaaatggatctagaaagagaacgtggtatcacaattaagttgaatgcagtacagctaagctanaccgcnaaagatggacaggagtatctctttaacttgattgatacaccaggtcacgtcgactttacatacgaagtatcacgctcactagcggcttgtgagggtgcgattttagtcgttgactctacacaaggtgtncaagcacaaacactcgcaaatacctatcttgcgctagataanaatctagaaattntacctgtcattaataaagtngatatgatgaatgcacaacctgatgtgacaatccgtgagattgaaganatcattggtntngattgtagtaatgcgccactcatctctgcacgnagtggattaaacgttgataaagttttagaacagattgtatctcanatcccngcnccnagnggaaangaanatgcaccattacaagcattagtatttgactcattctatgacccataccgtggaatcatcgcattaattcgtatccgtgagggtagtctttctgttggtgataagattcgctttatggcaacaggcgcagaatatgaagtactagangtnggtattcgtaatccacgtgaagtaaagatgaatacattaatgtgtggngacgtaggttggtttgcggcttcnatcaagtccatccaagatgtacgtgttggtgatacngttacgaaagtagataatccagcagagaaaccnttatctggatatcgtaagttaaacccaatggtatattgtggtctatatccaacngatgcggcaaagtatggtgacttacgtgaagcgttagataaactacagttaaatgangcatccttgcaatatgaaccagaaacatcccaagcattaggctttggttatcgttgtggattcttaggacttctacacatggatgtnatccaggaacgtttngaaagagantataacctcgatctaatcgcaactgcaccatctgttatctatcatgtctacctaacggatgggtcaatgattgaaattgataaccctgcaagaatgccagatgcggctagaattgaccgtgtcgaagagccatatgtaaaagcaagtattatggtacctgacacntatatcggtgccatcatgg

SEQ ID NO: 1082 - DNA, 4000 bp, Escherichia coli
  misc_feature (93)..(93): n is a, c, g, or t
  misc_feature (591)..(591): n is a, c, g, or t
  misc_feature (615)..(615): n is a, c, g, or t
  misc_feature (657)..(657): n is a, c, g, or t
  misc_feature (711)..(711): n is a, c, g, or t
  misc_feature (1041)..(1041): n is a, c, g, or t
  misc_feature (1083)..(1083): n is a, c, g, or t
  misc_feature (1119)..(1119): n is a, c, g, or t
  misc_feature (2004)..(2004): n is a, c, g, or t
  misc_feature (2476)..(2476): n is a, c, g, or t
  misc_feature (2537)..(2537): n is a, c, g, or t
  misc_feature (2621)..(2621): n is a, c, g, or t
  misc_feature (2624)..(2624): n is a, c, g, or t
  misc_feature (3017)..(3017): n is a, c, g, or t
  misc_feature (3038)..(3038): n is a, c, g, or t
  misc_feature (3116)..(3116): n is a, c, g, or t
  misc_feature (3337)..(3337): n is a, c, g, or t
  misc_feature (3353)..(3353): n is a, c, g, or t
  misc_feature (3539)..(3539): n is a, c, g, or t
  misc_feature (3601)..(3601): n is a, c, g, or t
  misc_feature (3608)..(3608): n is a, c, g, or t
  misc_feature (3794)..(3794): n is a, c, g, or t
  misc_feature (3809)..(3809): n is a, c, g, or t
ccatacttaagcattgctaaacgatcgatccctaccccaaaagcatatccttggtattttgatgggtctacttttgcattttttaaaacattnggatgaaccattccacatcctaaaatttctaaccatttgtcaccttggcctatggttattttaccattcttaagttcgtaaccaatatctacctctgctgaaggctcggtaaaaggaaagtggctaggcctaaatctcatttttatttcatccacttcaaaaaatttttttaaaaaataatcaagacaacctcgtagatcagccattgttacattttgatctacatataagccctctaattggtgaaacattggagtatgtgtttgatcactatcacatcgatatgttcttccgggtgctataattttaaaaggaggtttgccattcaacatggtgcgtatttgaactggagatgtatgagttctcagtaaaagatttttactttcatctagatagaaagtgtcatgcatatctctggctggatgatttggtggagtattgagcgctgtgaaattattatactcgttttctacatctggaccctctgctaccgaaaancctaattcagcaaatatcgaagtnagttcatcgatcacctgtgatactggatgaacttttccttgnggtctgttagttcctggtaaggttacatcaactgtttgatcttgtaattttttntctaattcttcttgatcaaattgattagttaaattttgaaatttatctaaaaccttactttttaaaatatttatttctgatgcaaattctttttttttatctttttcaattgttgcaaggtcttgaaaaagttttgataatttccctttttttcctaaaatttctattttaaaattttctaattcagttttgcttttaatattagcaaaaccactaaatatttcttgttctaatgtagataagtcggtcatctaaaaaattaaaatttgaatttaatttagatgtagttgtaccttttttacgatggatttaaaagcttcaggattgtgntaagcaatatcagctaaaacttttctatcaattttaattttngatttcacaagaccattaataaatttagaataagtnaatccttcagctcgtacacctgcattaattctttgaatccataaagatctgaaaattcttttgtttcttcttctatcgcgatacgcatattgtaaagatttttctactgcttgcttagcaactcgaattgtattttttcgtcttcctctaaaacctttagcttgcttataaacttttttatgtttctggtgacttgcctgacctcttttaactcttgccataatttatcctcttacactgtaaggcatgtaagacttaattatttttgagtcttgtttggaaagaactgttgtgcctctaagttttctaatttgtgcgtttgttcttttaatcatgccatgtctttttccagcttgaggagcttttacttttcctttagctgtaaatttaaatcttttctttgctgaacttttagttttaagttttcccataaaaatgtagcagggttatacaaacattgtgttttgaaaacaataaaaatgtgggacttataaagcttgtattattaaggtcatttgtcgaccttccattttggcatgctgctctaccttacctacttcttttgtgtcttctgtaattcttctaactaagtcataagcagccttcaaatactccatttcacgtcctttaaatttaattgtgaatttaaccttgtcgccagctgtcaaaaatttctgtgcatttttaattttaaaatcataatcatgcttgtcagttactggacgtaatttaatttcttttaagtttataactttttgtttttttttcgcttgattagcttttttttgcaattcatatttatattttccactatccataattttacatacgggtggtttagtattgggagcaatttcaattaaatccaatccgacttcctgagcnctattaattgcttcgccgactggaacaatacctatgttctctccttcatgaccaataagctggacttccgtcgctctaatattttcattagtgcgaggacctctatctcttggttttcgattgtattgaaaattcttattaataaaaatacctcttaaaattttggagcttgagactcttgagataagcttgataaaatttcactaaacttagcagtttgttgatcttcttttcctaatcttctcaatgtaatagttttgtcttgaacttcttttgaaccgcaaatcattaagacgggaactttggccaaagagtgttctctaattttgtaattaattttttcatttcttaaatcgataataggtcttattgaatttttttcaagctgatttaacatttcttttgcatattcgtgatgctcttcattgattggaagtatagcaacttgaactggggacaaccaaaatggtancttaccagcatagtgttcaattaaaattcctgtaaatctttctaaagaaccaaataatgcncggtgcaacatcactggagtttttttcttaccttctttatctatatacgttgagcctaatcttcctggtaagtttaaatctacntgnaaagttccacattgccagtctctaccgatagcatcccttaaaacaaattcaattttaggaccataaaaagctccctctcctttattgagcgtatagtcaacattcgatgcttttattgcttctaataaagccttttcggcctgatcccacacagcatcatcacctactcttttttctggtcgatctgcatattttagagaaacattttcaaatccaaatgatttataaatatctaaaattagctttgtaactttgacagactcttctgttatttgttcttctgtacaaaaaatatgtgcatcatcctgggtaaaagatcttacacgcatcaaaccatgtaatgctcccgaaggctcatatctatgaacttttccaaattcagataactttagnggtaaatctttataacttttnagtccctgattataaacttggcaatgcccaggacagttcattggcttaattgcaaatgttctctcatccggagtaacngtagtgtacatatattcttgaaacttttcccaatgacctgatttttcccataagcctctatcaataatttctggggtattcacctccatatatcctgcttccagttgtttctttctcataaaatcaactaaagtttgaaatagtgtccaacctttttgatgccaaaatacagcaccaggactttcttcttgaaaatgaaacaagtccatagtcttacctanttttctatgatctcgnttctcagcttcctccaaattatgcaaatatagatccaaatctttttttgacttccagcaagttccataaattctttgtagcattacattgttagagtctcctctccagtacgcgccagctactttcattaatttaaatgccttaccaattctaccaatgcttggtaaatgaggtcctctacataantcatgccaatctccatggaaataaattgatatttcctcattgccaggaattgcatctatcanctcagcnttgtaactctctccaatacttttaaaatgatctattgctttttttctttcccaaacttctcttcttgtttgtggatcttgatcaattatttccatcatttttttttcaatttttgataggtcttcgtctgtaaaaggttcctctcgagcaaaatcgtaataaaaaccattctcaatgacaggaccnatcgtaacttgagtncctggatataattgctgaactgccatggccatcacatgagctgaatcgtgtctcaataattctaatgcataatcatcatctagagtaataattttaaccttggaatctttgctaatttctacagataagtctttatattcatcatttacttgaatggctaaagcctttttggctagtgagatacttatgtc

SEQ ID NO: 1083 - DNA, 4000 bp, Escherichia coli
  misc_feature (113)..(113): n is a, c, g, or t
  misc_feature (501)..(501): n is a, c, g, or t
  misc_feature (856)..(856): n is a, c, g, or t
  misc_feature (1224)..(1224): n is a, c, g, or t
  misc_feature (1229)..(1229): n is a, c, g, or t
  misc_feature (1586)..(1586): n is a, c, g, or t
  misc_feature (1793)..(1793): n is a, c, g, or t
  misc_feature (1984)..(1985): n is a, c, g, or t
  misc_feature (1987)..(1988): n is a, c, g, or t
  misc_feature (1993)..(1994): n is a, c, g, or t
  misc_feature (2059)..(2059): n is a, c, g, or t
gtcgcgtggcgtttcgtagatttgtttgtagcgttgagattcacgtcactcgcccgcgcgcgccgcgcgatcgcgctcgagttcggactcgcgcggtcgatttcatccatcgnacgcgctcgctcgcgcgtctcccgtcgctcgacgcgcggcgctcgcgcgtcggcaccgcgcaccagtcgccgggggaactttcgaaagcgtcgacagctgacggctatttcgccacgcacgcgcgcgctcgacgtcatgggcgagaatctctcgcccgaaaccgtcaatagcatcatgcgtcaactgaaagatttgatgcagagccccgcggaggggatcagggtgcgagtgaacgaggagaacgtgacggatgtcttcgccgagctcgacggtcccgcggacacgccgttcgaaggcgggacgtttaagatgaagctcgcgctgccggcggattacccgaacaatccgccgaagggattctttacgacaaaaatatttcatccgaanattcgtcagccgagcggggagatttgtgtgaacacgctcaagcgtgactggcaaccgacgcacggactgcggcacatattgatggtgattcgatgcttgctcatagaaccgtttccggagagcgctctgaacgaagaggctggaaagcttttactcgaggattacgaagagtattttaggcgcgcgaagatgtacaccaatattcacgccaaacccgaaacgggcaaggcggaggacgcggcgagcgcgtcggcggcgagcggcggggagaagaagttggacaaaaagaaggacaagaagaagagcttgcgccgtctttagcaaaagcgtatcgcgcgcgcggtagcagatgaangaacgtcgttgttgtgagcgaagctttgattacaacgaataaaaattgcgttccgtcgctcacctttcttctatctgatgcatcgttaagtcatccgtcgcgttagttgagcttcgcatcctgcgtgtcgccggtgaatcgcgcagaagacgaaccgtcgttaccgtcgttaccccacgccacgtaatccttcttcgtcttgagcttttccgtgaacgacccctcgatcttcaagccggcgtcgtcgccgccgatgacgatgtcgatgactccgtactgcttcgcctcgagcggcgacatgtagcgatcgcgatcggtgtcttcgtctatcttcttaacgtcttgtccggtgtggaacgccatgagtntgttnaagttggccttgtggtgcatgatttccttcgcttggatttcgatgtccacggcgctcccttgcgccccgccgagcggctggtgaatcatgatgcgcgcgttcggcatcgacatgcggcgacccttctccccgctcgcgagcaagaacgcccccatggacgccgcgagtccaaggcacaccgtgctcacgggcgctcggcaaaactgcatcgcgtcgtaaatccccatccccgccgtcacgctccctcccggagagttgatgaagagtttaatctccttcgtcggatcttgctgatcgagcagcagcaactgcgagatcaccgcatcggcgttaaaatcatcgacctgcgagccgagnaacacgattcggttcctcagcaagctatcgaacggcgacccgctttggtctcgcggcaccaccggccccgcgcgcgcgcccggcgccccgctcgcgttcaccgcgtcgtaaatctctctctgcgcctcgttcacgccgtcgacgtacgcgatttcgttcgggttctcgtagaacgcccctcccgcgcgcgcgacgcgcgtcgcgcgnccgcgcccgtccgcgcgccgcgcgcgcgataaacctagcctcgatcgcgtcgcccgcgtcgtcgcgtcgcgtcgcgtcgcgcttccgcgcggcgccgtcgtcgtcgcgcgcgtcacgagtcccatcatgcgttcgctcgcgtcgtcggtcgcgtcgcgcgcgtgtgcggcgcgcgcgcggtcgacgcgccnngnncgcgnncgcgcgcctggtcggtcggtatgcgcaaacagtgcggatgcgtttttcgacgcgtcccgacgtcncgacggccgcgcggcgtcggcacaccgcgatgcgaagcgtcgcgcgcgcgttgacgtgcgcgcgcgcgacgcgaggcgcgacgaccgcgacgatcgcgacgaccgcgcgcgcgccggtcgccgagcgacgacgcgggacgacgagacgcgcgggacgcgtcgacgcgggacgacgacgcgggacgcgcgcgatggcggtgagcggacgcgcgcacgcgccggcgaacgcggacccgatggcgggcgtcgacgtcgcggcgaacgggacggcgtggcgagacgcggcggtggacgcggtggtgtgggcggtgcgagaggaggacgtcggcgcggagacgggggcgctggagtgcgacgcgctgcgggcgttcgacgcggcgtcggggggggcggtgcgagcgatgatcgaggagggagagtttaagggaaaggttgggacgtccgcgttctcgagggcgatcgcggggacggcgaaacacgtcggcgtggtcggcgtggggaagaggggggaggcgacgacgagcgcgatgttgacgctgggatccgcggcggcggcgcaagcgcaaaagagcaagtgcaagacgctcgggattaagggtgcggacggattcgaaaacgcggtcgcggctggggcgtacttgggcgcgacggaggatcagaggtttaagtccaagccgcaggcgaagacgctcgaatccgtgtcgttgttggacgtctccgcggatgtctccgagggtaaggcgcgcgcggtgggcgtgcagttgaccaaagatctcgtcgccgcaccgccgaacgtggtgacgccgaccgcgatggcggaagtcgccaagtccatcgccgccgcgcatccggattgcatgagcgtgaaaattttggaaaaggctgattgcgaaaagctgggcatgggatccttcttgggcgtctccgaagcctcggacgaaccgccgaagtttatccacctcacgtacaagggtgctgggagcgacttgaagaaagtggctgtcgtcggtaaggggctgacgtttgactccggcggctacaacttgaaggcgggcgcggggtcgatgattgagatgatgaagtttgacatgggcggttccggagccacgctcggcgccgcgaaaatcatcgcgcagacgaagccagcgggcgtcgaatgtcacttcatcatcgcgtcgtgcgaaaacatgatcggttctcgcggcttgcgccctggcgacatcttaaccgcgtccaacggcaagaccatcgaggtgaacaacaccgacgctgaaggtcgtctgacgctcgccgacgccttggtgtacgccgacaagacgtgcggtgcgaccgccatcgttgactgcgccactctcaccggcgccatcatcgtcgcgctcggcaacgacatcgccggtctcttttccccgaaggacgccgccgccaagcgcgtcgaagacgccgccaaggcggcgggagaagatctctggcgtatgcccatgcccgattccatgtggtctatcatgaaatctgaaatcgccgacatgaagaacaccggctctcgcggcggcggttccatcaccgccgcgctcttcttgaagcaattcgtcgacgagagcgtcgagtggagccacgtggatttggccggaccggtgtgggacgacaagaagggcggtgccaccggttacggcgcagcgcttttcgccgcgtgggtgtcgtcctttaagaagtaagtgattcctttaattaaactgtccaaccataaaaatttaacgcgtcgccgaatagtcttttctgcatcagagcgcgacgttcgccgtcatgcgtcgcgcgacgtcgaccgcgagcgcgcggctgctggttctgacgttcttcgcgatcgcgtcgagcgtcgccgtcgccgccgcggcgtcgtacgagacgcgctcgacgcgcgcgccgcgacgcgcgtccagctcgtcc

SEQ ID NO: 1084 - DNA, 4000 bp, Escherichia coli
  misc_feature (292)..(292): n is a, c, g, or t
  misc_feature (373)..(373): n is a, c, g, or t
  misc_feature (457)..(457): n is a, c, g, or t
  misc_feature (544)..(544): n is a, c, g, or t
  misc_feature (550)..(550): n is a, c, g, or t
  misc_feature (637)..(637): n is a, c, g, or t
agacatggtggttgtggtttctaccggtgaagtatccacttggggtagcggccgtacccgccgtgaagctgagctgggtatgaccggtggcgacgacgtcgagctcaccgctgccggcgtactcgaactggcctggggtatgggcctgctgacctggcaggactcgcctaaggccggctggtacgacaccgatggcaacctggttgacgaggctgacattctctcgcgttaccgcgacgaggtagtgggccgttgcggtatccgcgaattcgttgacgaccagctgatcgcnccggtggcagatgaagaggttgaggtttaccttgaccgcgacatctccttcaacgtcgctgacgaggctaccgcccgcacnatcgctgaatctgacccggcacacaccctgatcagtgaagacagcgaaagtggcgagtggatcgtgacccgcctggctggttcnctggcccgcgtaccgcgccgcgccgcgctgagccgcaccgtgggtggccagttcccgcgtgacttcgacccgcagcgttggggtatnccggcntccatgaccgagtctttggaccggatcgcctcttggaacctggttaccgccgttgaggccttcctcaacgctggtttcagccccgcngagttgctgcaggctgtgcacccggccgatgtggcctccactcagggcaccggttttggtggtatggagtcgatgcgcaagatgttcgttggtcgcttcctcaacgaggaacgccccagtgacattctgcaggaggccctgcctaacgttgtggccgcacacgtaatgcagtcctttatcggtggttatggttctatggtgcagccggttagcgcctgcgcaaccgcagccgtatccattgaagaaggctgggacaagatcgctctgggtaaggcccaggtggtggttgccggtgctatcgatgacatctcggttgagtccgtggtcggcttcggtaacatgaacgccaccgctgaggcagctgccatgaaggctaagggcatcagcccgcgtcacttctcacgtgctaacgaccgtcgtcgcggcggcttcgtggaagcccaaggtggcggtaccgtcatcctggcccgtggtgacgtagctgccaagctggggctgccggttgcggcggtacttggtttcgtctcctcttacgccgacggcgcccacacctccatcccggccccgggcctgggtgctttggctgcgggccgtggcggtagcaactcgcgtctggctaagtctttggccaagctgggcgttgaggctgacgacatcgccgtggtttccaagcacgacacctccaccggtgctaacgaccccaacgagtctgaactgcacacccgcctggccaaggcacttggccgtagcgagggcaacccgctggtagcggtctctcagaagaccatcactggtcacgctaagggtggtgccgcagtgttccaggtggccggtttgaccgaaatcctggctaccggtgtggctcccggtaacgcctcgctggactgcgtggacatcaagctcaagaaggacagcttctggatctggccgcgtaaggctatgcgtctggctggccgtggcggcgaaagcggccgcgtgcccggtgctggtccgatccgtgcgggcttggctacctcgctgggcttcgggcacgtatctggcctgctggccatggtgcaccccggtgctttcgaatctgccctgcgtaaggctggcggccagcaggccgtcgacgcctggctggctagcgccaacgcccgcctggctgccggtacgcgccgccgccgcgccggcatgatcggccgcgtggccctgttcgagcagatcgatggccgtcgcctgggtgaagaaaccgaaacccgcgacccgcacgaggttgaggcagccatgctgcttgaccccgaggcccgcttgggtgccgacggtgtttaccacgctggtgagtaatagctagcgcttaaggtggggggtggatcctttaaggatccaccccccaccgctgtttttggcgtcatggctagctaagctaggggagtggatatgcctaaaattgttactcctaaagctactggtcagtgtccagtgggagtgggggttgacctagtgcagatagatgcttttgctcagcaactgtctgagcctggcactagttttagtcagcgagcttttagccctcgtgagctacgccaagcccaggcacgggtgcgagctagaggggctgagccaaactggcaggagctagctccacacctggctgcgcgttgggcagccaaagaagcttttgttaaggcctggtccactgccttggtggaacttaaaggcgccgccgcacctcaaccgctaagcctggaaagttttaactgggatcaggttgaagtactgctagatgagcagctacgcccccagctagcactacgcggccaggtggcccaagcagttagccaaagtgtgggggagcctagctggctggtgtcactaagccatgagggtaactgggctagcgccgtcgtaattgctgctctaacagcgtaaaaaatttagctaaccggcttaaacctaagttgttgaggccttagacctaggtttatagttggcatgtaaaacgtgctccggggtcggtgaaattccgagccggcggttatagtccgcgacccaccggtacctactggtggttgagctggtgaaattccagcaccgacggttaaagtccggatgggaggaagcacgcgggtttacttatatttaggtgacctgcaggcgctgtgcgcgcgcatccttgtattccccggcgcttaccgggaggaaacttccgccgtcttcggaaggaattagatgcgagcttacaggccctggctagcaattacgctaggtgtagtggttttagtcttctggcagctaatttctgtatctggagctgtggctgagtattttttgccagcccccacccacatcattgattcgctaattacctcaattggccacgccaatatgcttggttacgcctgggttactctgcgtgaagcgattttgggttgtatgttggcttttgcgggggctttacccttagcattggcgctatttcactggccactgttttcgcaaactgtgctgccttatgtggccgcaagtcaagcgattccggctattgcgattgcgcctttgctggtgttgtgggttggttacggtttgttcccggtagtgctgctatgtgcctttatggtgtttttcccaatcactatctctattttgctggggctaaggtcaatcaatcgtgatgtgatcgaggcggcccggcttgatggggcgggtggtttcaaaatgattatctatatggaactgccgctagctactccggcaattttggcaggtttgcgtaccggcatgacactgtcaattaccggtgcggtagtaggggagatgaccatggggggcacgggattgggcatggttttagcatcccagcgcgacgccgtaaataccgcaggtctatttgccaccatcgtggtgttgtcagttatggccaccgctttgcacggtttgattcatgcctgcgaaaagcgttcgcgcacaatcgccgcaattcaaagttaggaaacaccatgatttcacgtcgccaagcagttagcctactgggtttagcagcagggggcgtagccctaggggcttgctcctcaggtactgccagcaaatctaagaccggggctcagcccttaactattggtctgacctacacccccaacatccagttcgcacccttctatttggcacaggccaataagcaatacgcagacagtgtcaagctgcgccaccatggggcccaggaaggcctgtttgatgcgctgagcgccggcagcgaagacctggttattgctggcgccgacgaagccgctgtggcctgctctaacggttcaaacctggtggttgtgggcggctactaccacagctatgcggtatgcattatggtgccggccaactcctctatca

SEQ ID NO: 1085 - DNA, 4000 bp, Escherichia coli
  misc_feature (526)..(526): n is a, c, g, or t
  misc_feature (535)..(535): n is a, c, g, or t
  misc_feature (544)..(544): n is a, c, g, or t
  misc_feature (556)..(556): n is a, c, g, or t
  misc_feature (606)..(606): n is a, c, g, or t
  misc_feature (613)..(613): n is a, c, g, or t
  misc_feature (619)..(619): n is a, c, g, or t
  misc_feature (625)..(625): n is a, c, g, or t
  misc_feature (634)..(636): n is a, c, g, or t
  misc_feature (643)..(643): n is a, c, g, or t
  misc_feature (646)..(646): n is a, c, g, or t
  misc_feature (1976)..(1976): n is a, c, g, or t
  misc_feature (1985)..(1986): n is a, c, g, or t
  misc_feature (2001)..(2001): n is a, c, g, or t
  misc_feature (3677)..(3677): n is a, c, g, or t
  misc_feature (3807)..(3807): n is a, c, g, or t
ttagacagttccttacagtcagtcatcgtcagtgcattaagcttctttgcagcaacatttggtgttggattatactccagtatcgatatgatcagttccttatgtatgcttcttgcaagaggtgccctgatcagtctgatcgtcgtagcatttattctgccggcaatgtttatggtatttgataaattgatctgtgcaacaagtgcaggtttccgttataaaaaagattcatcagttcagtaaaatagaggaggaaaaaaagatgaaattaccggaattaaagaaaaaatttacaaagaaatatgtgattcgtattatcgcaggtgtgctggttgtcggaatggttggaacaggcgtttccacagcaaacgtatttgcagcaaagaccgcacaggagagcactgagagtacagagagtaccgaaaaagacagcaaaaaatcagatacaaaagattccgatgctgagagcaaattaaaagatgcattagatgacagtatcaaattcagcgagaaagagattggcaangaagaaacngtatatgtncttgcagacagnaccggaaaagagcgcaaagtgatcgtttccgatcatctgatcaatgatgnaaataangatacnatcgangatgcttcnnncttaaanganatcgaaaatgtaaaaggtgatgagacattcaaacaggatggcagcaaactgacctggcaggcagacggcaacgatatttattatcagggaacctccacaaaagagacaccggtatcccagacaattacctattctttggatggtaaggaagtaaagccggaagaacttgcaggaaaatcaggaaaagtaacgatccgttttgattacaccaacaatgagacggtaaaaacaaagatcgacggaaaagaggaagaaatctatgtcccatttgctgcgatcagcggaatggtattagatgacagcttttctaatgtaaaagttaccaatggtaaagtaatctccgatggcaaaaataatattgtagtcggatatgcacttccgggattaaaagagagcttagatgtggatgattctgattttgacggagatgtatcgatcccggattacgtggaagtaactgcagatgtggagaatttctcattaagcaccacaatgacagttgtgatgaatgcaacaaactttatcagcaaagacggagatgcagatctttctgaagttgatgatatgttagatactttaacagatgcaacagatcagttaaaagatggttccggtgagctcgcagacggtgtagatactttaaaatccaagatgggtgagtttaaagacggtgtcggaacattaaagaacggtatcaaagattatacggatggagcttctactttatccacaggaatcggaacattaaagagtggtgtggataccttagcaggaagtgtaccaacactgatcagtggtgtgggaaccttaaaagatggttcagcaagtgcagcaaaaggagcatcttccttaaaagacggagcaggaaccttaaagaaaggtgccaaggatgtatctaccggagccaatacattgtccaaaggtgcaagtgatctttccaccggagccaatacactttccaccggagtgaatgatctttctaccggagcagatacgttatccactggagcttctgatttgtctactggagcagacactttagctgccggagcttccagtctgaatacaggtgtccagacacttgcgaaaggagtaaaagatttaaatactgctgtcaacggcggtgaaacaacgcttgcaggcggagcatctgcagtcagtgcaggtgtggatacattagttggaaaattgggagatatggcagcaactttacagactaaaaaagatcagatcaatgccaatttacaggcaaatggtacatccattgaaaatgcacaggctacgatcgaatcattaaagagcgcacagtcaaatctgatgaacggaattnccatgtacnntgcagatcctacaantgcaacagcaatttttacgcaggtggggcaggcacttggcggtgtttcaatcaacagtgtaaatgatgcaatgactgtagcggtaagcctgtcagacaagatcgcagcaatcggtcaggctcagggagctgtttcagctatcgatgaagcagctagtcagatttctgatccgacaacacaggcacagcttacagcacttcaggctggtgcgaaacaggtggcagatggagcagcgcaggcatccggtgcaatcagtactatggctggaaaaatggatgatctgactagtggttctggtcaggtggcacagggagcaagtgatcttgcaacaggagcaggaaccttaaagaaaggagcaagtgatcttgcaacaggagcaaccaagttaaagaagggtgccggagaccttgcaacaggagcaggaaccttaaagaaaggagcaggtgatcttgcaacaggagcaggtcaggtggcagatggagcaacgactctgcacaaaggagcgtctgatctgtctgacggtttaaatactttagacggtggtatcggacagttgaaagagaaagccggatcacttgcaacaggagctgagcagttaaagagcggcacagaccagcttgcaagcggggcatccacacttgtttctaataatgaaaaattaaacgatggtgcaggcactttaagtgatggtacggatgcgatcattgatggtgtgggagaactttctgacggagcacataaacttgcagatggaatcactgagttcagcgaggatggaatcgatgagatcatcaattcctacaatggcgatatcgagccgcttgttgaccgtatccaggctgtattagatgccggtgctgattaccagacttatactgacattgcagatggcgtgaacggaagtgttaaatttattatcaaaacggatgcggtaaaagcagaagactaaagaaccgcttttaggaggagtaagatgaatgcgttggagaatctgctgatcatagcaggcatatcgctggatatatttgcagccatggagtgtcagggatcactggtagcaaagatcgacaaaaaacagcttgtcaaactgtgtgcactgattgctgcatggcagatggcagcgctgttcgtcggaagctacctgtcaggacttttgtaccgtaacaccataacgcacaatgaaaaagtgaccgggtttgtcattgcagcagccatctttttctgcctgggagtgcggctggttgcaaaagccataaaaaatgagcgcattgtagagcactgtgaacagaagcttggatggaaacagttactggcgattgcggcagttaccagcatttataccctgctgaccggcattgcatttggctttctgggaacaaatcttcttgtcatgctcctgatgatcgcaggacttacgatcgcggttgttgtgaccggtatctataccggatatcaccttggatttgagcataagacaaaagcatatattgcgggagcaattcttctgtggattgcagggatagacgttattgtaagacatattttgcggtagataatagattgtacgcttttgtgcaatttgacagacctaaaattgaaaaccaccttttgacacccgaatctatgaagaaaagaaaatccggtttcacactgtcaggtaaaaatctggcagcggngaaccggatttttttgtacgttgcaacaaggttttttcttcgctataatgaaaaaaatggaggcagaaaacagatgaagattttacttacggcgatcaatgccaaatatatacattccaaccttgccgtntataatctgcgtgcatatgccgcacattacgcaaaaggcatggctgattccgatacagtagagatcggggaatatacgatcaacaaccagatggaggatattttagagggaatctacaaggcgaagccggatgttcttatgttttcctgttatatctggaatattgcatttgtggaggaactggcggaagaat

SEQ ID NO: 1086 - DNA, 4000 bp, Escherichia coli
  misc_feature (1949)..(1949): n is a, c, g, or t
  misc_feature (1956)..(1957): n is a, c, g, or t
  misc_feature (1959)..(1959): n is a, c, g, or t
  misc_feature (1961)..(1965): n is a, c, g, or t
  misc_feature (1967)..(1967): n is a, c, g, or t
  misc_feature (1972)..(1972): n is a, c, g, or t
  misc_feature (1986)..(1986): n is a, c, g, or t
  misc_feature (2185)..(2185): n is a, c, g, or t
  misc_feature (2196)..(2199): n is a, c, g, or t
  misc_feature (2201)..(2203): n is a, c, g, or t
  misc_feature (2305)..(2306): n is a, c, g, or t
  misc_feature (2315)..(2317): n is a, c, g, or t
  misc_feature (2336)..(2339): n is a, c, g, or t
  misc_feature (2341)..(2343): n is a, c, g, or t
  misc_feature (2345)..(2350): n is a, c, g, or t
  misc_feature (2352)..(2353): n is a, c, g, or t
  misc_feature (2356)..(2358): n is a, c, g, or t
  misc_feature (2360)..(2364): n is a, c, g, or t
  misc_feature (2366)..(2367): n is a, c, g, or t
  misc_feature (2369)..(2377): n is a, c, g, or t
  misc_feature (2379)..(2381): n is a, c, g, or t
  misc_feature (2383)..(2386): n is a, c, g, or t
  misc_feature (2388)..(2389): n is a, c, g, or t
  misc_feature (2391)..(2396): n is a, c, g, or t
  misc_feature (2400)..(2400): n is a, c, g, or t
  misc_feature (2404)..(2404): n is a, c, g, or t
  misc_feature (2406)..(2406): n is a, c, g, or t
  misc_feature (2409)..(2410): n is a, c, g, or t
  misc_feature (2414)..(2415): n is a, c, g, or t
  misc_feature (2418)..(2423): n is a, c, g, or t
  misc_feature (2425)..(2425): n is a, c, g, or t
  misc_feature (2433)..(2435): n is a, c, g, or t
  misc_feature (2437)..(2437): n is a, c, g, or t
  misc_feature (2440)..(2440): n is a, c, g, or t
  misc_feature (2442)..(2443): n is a, c, g, or t
  misc_feature (2446)..(2448): n is a, c, g, or t
  misc_feature (2451)..(2452): n is a, c, g, or t
  misc_feature (2459)..(2459): n is a, c, g, or t
  misc_feature (2468)..(2468): n is a, c, g, or t
  misc_feature (2471)..(2471): n is a, c, g, or t
  misc_feature (2480)..(2480): n is a, c, g, or t
  misc_feature (2485)..(2486): n is a, c, g, or t
  misc_feature (2488)..(2491): n is a, c, g, or t
  misc_feature (2493)..(2505): n is a, c, g, or t
  misc_feature (2507)..(2509): n is a, c, g, or t
  misc_feature (2511)..(2514): n is a, c, g, or t
  misc_feature (2518)..(2521): n is a, c, g, or t
  misc_feature (2523)..(2523): n is a, c, g, or t
  misc_feature (2525)..(2530): n is a, c, g, or t
  misc_feature (2532)..(2535): n is a, c, g, or t
  misc_feature (2538)..(2544): n is a, c, g, or t
  misc_feature (2546)..(2547): n is a, c, g, or t
  misc_feature (2550)..(2550): n is a, c, g, or t
  misc_feature (2552)..(2553): n is a, c, g, or t
  misc_feature (2555)..(2560): n is a, c, g, or t
  misc_feature (2563)..(2568): n is a, c, g, or t
  misc_feature (2570)..(2571): n is a, c, g, or t
  misc_feature (2573)..(2575): n is a, c, g, or t
  misc_feature (2578)..(2578): n is a, c, g, or t
  misc_feature (2580)..(2588): n is a, c, g, or t
  misc_feature (2590)..(2593): n is a, c, g, or t
  misc_feature (2597)..(2606): n is a, c, g, or t
  misc_feature (2608)..(2616): n is a, c, g, or t
  misc_feature (2619)..(2620): n is a, c, g, or t
  misc_feature (2622)..(2624): n is a, c, g, or t
  misc_feature (2627)..(2636): n is a, c, g, or t
  misc_feature (2639)..(2642): n is a, c, g, or t
  misc_feature (2644)..(2645): n is a, c, g, or t
  misc_feature (2647)..(2648): n is a, c, g, or t
  misc_feature (2650)..(2653): n is a, c, g, or t
  misc_feature (2659)..(2665): n is a, c, g, or t
  misc_feature (2668)..(2671): n is a, c, g, or t
  misc_feature (2673)..(2674): n is a, c, g, or t
  misc_feature (2676)..(2676): n is a, c, g, or t
  misc_feature (2678)..(2678): n is a, c, g, or t
  misc_feature (2680)..(2680): n is a, c, g, or t
  misc_feature (2682)..(2685): n is a, c, g, or t
  misc_feature (2688)..(2693): n is a, c, g, or t
  misc_feature (2695)..(2695): n is a, c, g, or t
  misc_feature (2697)..(2697): n is a, c, g, or t
  misc_feature (2699)..(2705): n is a, c, g, or t
  misc_feature (2707)..(2707): n is a, c, g, or t
  misc_feature (2710)..(2710): n is a, c, g, or t
  misc_feature (2712)..(2714): n is a, c, g, or t
  misc_feature (2716)..(2716): n is a, c, g, or t
  misc_feature (2719)..(2723): n is a, c, g, or t
  misc_feature (2727)..(2727): n is a, c, g, or t
  misc_feature (2729)..(2732): n is a, c, g, or t
  misc_feature (2734)..(2734): n is a, c, g, or t
  misc_feature (2736)..(2737): n is a, c, g, or t
  misc_feature (2740)..(2747): n is a, c, g, or t
  misc_feature (2749)..(2753): n is a, c, g, or t
  misc_feature (2755)..(2756): n is a, c, g, or t
  misc_feature (2759)..(2760): n is a, c, g, or t
  misc_feature (2763)..(2763): n is a, c, g, or t
  misc_feature (2765)..(2766): n is a, c, g, or t
  misc_feature (2768)..(2769): n is a, c, g, or t
  misc_feature (2771)..(2773): n is a, c, g, or t
  misc_feature (2775)..(2775): n is a, c, g, or t
  misc_feature (2779)..(2779): n is a, c, g, or t
  misc_feature (2782)..(2784): n is a, c, g, or t
  misc_feature (2786)..(2786): n is a, c, g, or t
  misc_feature (2788)..(2794): n is a, c, g, or t
  misc_feature (2796)..(2797): n is a, c, g, or t
  misc_feature (2799)..(2800): n is a, c, g, or t
  misc_feature (2802)..(2802): n is a, c, g, or t
  misc_feature (2805)..(2809): n is a, c, g, or t
  misc_feature (2812)..(2812): n is a, c, g, or t
  misc_feature (2814)..(2822): n is a, c, g, or t
  misc_feature (2824)..(2826): n is a, c, g, or t
  misc_feature (2828)..(2831): n is a, c, g, or t
  misc_feature (2834)..(2835): n is a, c, g, or t
  misc_feature (2837)..(2837): n is a, c, g, or t
  misc_feature (2839)..(2843): n is a, c, g, or t
  misc_feature (2846)..(2849): n is a, c, g, or t
  misc_feature (2851)..(2855): n is a, c, g, or t
  misc_feature (2858)..(2859): n is a, c, g, or t
  misc_feature (2861)..(2865): n is a, c, g, or t
  misc_feature (2867)..(2867): n is a, c, g, or t
  misc_feature (2870)..(2871): n is a, c, g, or t
  misc_feature (2873)..(2873): n is a, c, g, or t
  misc_feature (2877)..(2878): n is a, c, g, or t
  misc_feature (2880)..(2882): n is a, c, g, or t
  misc_feature (2887)..(2887): n is a, c, g, or t
  misc_feature (2889)..(2889): n is a, c, g, or t
  misc_feature (2891)..(2893): n is a, c, g, or t
  misc_feature (2895)..(2895): n is a, c, g, or t
  misc_feature (2897)..(2903): n is a, c, g, or t
  misc_feature (2905)..(2905): n is a, c, g, or t
  misc_feature (2911)..(2912): n is a, c, g, or t
  misc_feature (2914)..(2915): n is a, c, g, or t
  misc_feature (2917)..(2917): n is a, c, g, or t
  misc_feature (2919)..(2919): n is a, c, g, or t
  misc_feature (2921)..(2927): n is a, c, g, or t
  misc_feature (2929)..(2932): n is a, c, g, or t
  misc_feature (2935)..(2935): n is a, c, g, or t
  misc_feature (2937)..(2937): n is a, c, g, or t
  misc_feature (2941)..(2941): n is a, c, g, or t
  misc_feature (2944)..(2953): n is a, c, g, or t
  misc_feature (2956)..(2958): n is a, c, g, or t
  misc_feature (2960)..(2961): n is a, c, g, or t
  misc_feature (2963)..(2963): n is a, c, g, or t
  misc_feature (2968)..(2968): n is a, c, g, or t
  misc_feature (2971)..(2974): n is a, c, g, or t
  misc_feature (2976)..(2976): n is a, c, g, or t
  misc_feature (2978)..(2978): n is a, c, g, or t
  misc_feature (2981)..(2984): n is a, c, g, or t
  misc_feature (2986)..(2986): n is a, c, g, or t
  misc_feature (2990)..(2993): n is a, c, g, or t
  misc_feature (2997)..(3003): n is a, c, g, or t
  misc_feature (3008)..(3008): n is a, c, g, or t
  misc_feature (3010)..(3012): n is a, c, g, or t
  misc_feature (3017)..(3018): n is a, c, g, or t
  misc_feature (3021)..(3023): n is a, c, g, or t
  misc_feature (3025)..(3032): n is a, c, g, or t
  misc_feature (3035)..(3038): n is a, c, g, or t
  misc_feature (3044)..(3045): n is a, c, g, or t
  misc_feature (3047)..(3052): n is a, c, g, or t
  misc_feature (3055)..(3056): n is a, c, g, or t
  misc_feature (3058)..(3058): n is a, c, g, or t
  misc_feature (3061)..(3063): n is a, c, g, or t
  misc_feature (3066)..(3067): n is a, c, g, or t
  misc_feature (3071)..(3071): n is a, c, g, or t
  misc_feature (3074)..(3074): n is a, c, g, or t
  misc_feature (3077)..(3077): n is a, c, g, or t
  misc_feature (3080)..(3080): n is a, c, g, or t
  misc_feature (3082)..(3082): n is a, c, g, or t
  misc_feature (3085)..(3085): n is a, c, g, or t
  misc_feature (3087)..(3088): n is a, c, g, or t
  misc_feature (3092)..(3092): n is a, c, g, or t
  misc_feature (3095)..(3098): n is a, c, g, or t
  misc_feature (3100)..(3100): n is a, c, g, or t
  misc_feature (3102)..(3103): n is a, c, g, or t
  misc_feature (3106)..(3109): n is a, c, g, or t
  misc_feature (3112)..(3114): n is a, c, g, or t
  misc_feature (3117)..(3117): n is a, c, g, or t
  misc_feature (3122)..(3123): n is a, c, g, or t
  misc_feature (3127)..(3129): n is a, c, g, or t
  misc_feature (3132)..(3133): n is a, c, g, or t
  misc_feature (3137)..(3137): n is a, c, g, or t
  misc_feature (3141)..(3141): n is a, c, g, or t
  misc_feature (3144)..(3144): n is a, c, g, or t
  misc_feature (3146)..(3147): n is a, c, g, or t
  misc_feature (3150)..(3151): n is a, c, g, or t
  misc_feature (3153)..(3155): n is a, c, g, or t
  misc_feature (3158)..(3158): n is a, c, g, or t
  misc_feature (3161)..(3162): n is a, c, g, or t
  misc_feature (3165)..(3165): n is a, c, g, or t
  misc_feature (3168)..(3169): n is a, c, g, or t
  misc_feature (3172)..(3172): n is a, c, g, or t
  misc_feature (3174)..(3179): n is a, c, g, or t
  misc_feature (3181)..(3182): n is a, c, g, or t
  misc_feature (3184)..(3186): n is a, c, g, or t
  misc_feature (3188)..(3192): n is a, c, g, or t
  misc_feature (3194)..(3194): n is a, c, g, or t
  misc_feature (3197)..(3197): n is a, c, g, or t
  misc_feature (3201)..(3202): n is a, c, g, or t
  misc_feature (3205)..(3206): n is a, c, g, or t
  misc_feature (3208)..(3210): n is a, c, g, or t
  misc_feature (3213)..(3213): n is a, c, g, or t
  misc_feature (3215)..(3217): n is a, c, g, or t
  misc_feature (3220)..(3220): n is a, c, g, or t
  misc_feature (3227)..(3228): n is a, c, g, or t
  misc_feature (3230)..(3230): n is a, c, g, or t
  misc_feature (3235)..(3240): n is a, c, g, or t
  misc_feature (3242)..(3242): n is a, c, g, or t
  misc_feature (3244)..(3246): n is a, c, g, or t
  misc_feature (3249)..(3249): n is a, c, g, or t
  misc_feature (3253)..(3253): n is a, c, g, or t
  misc_feature (3256)..(3257): n is a, c, g, or t
  misc_feature (3260)..(3260): n is a, c, g, or t
  misc_feature (3262)..(3269): n is a, c, g, or t
  misc_feature (3272)..(3274): n is a, c, g, or t
  misc_feature (3278)..(3280): n is a, c, g, or t
  misc_feature (3282)..(3283): n is a, c, g, or t
  misc_feature (3285)..(3287): n is a, c, g, or t
  misc_feature (3289)..(3290): n is a, c, g, or t
  misc_feature (3292)..(3294): n is a, c, g, or t
  misc_feature (3297)..(3297): n is a, c, g, or t
  misc_feature (3299)..(3299): n is a, c, g, or t
  misc_feature (3301)..(3302): n is a, c, g, or t
  misc_feature (3306)..(3307): n is a, c, g, or t
  misc_feature (3309)..(3309): n is a, c, g, or t
  misc_feature (3311)..(3312): n is a, c, g, or t
  misc_feature (3314)..(3315): n is a, c, g, or t
  misc_feature (3321)..(3321): n is a, c, g, or t
  misc_feature (3323)..(3323): n is a, c, g, or t
  misc_feature (3325)..(3325): n is a, c, g, or t
  misc_feature (3328)..(3328): n is a, c, g, or t
  misc_feature (3331)..(3331): n is a, c, g, or t
  misc_feature (3333)..(3334): n is a, c, g, or t
  misc_feature (3336)..(3337): n is a, c, g, or t
  misc_feature (3340)..(3340): n is a, c, g, or t
  misc_feature (3342)..(3343): n is a, c, g, or t
  misc_feature (3346)..(3349): n is a, c, g, or t
  misc_feature (3353)..(3353): n is a, c, g, or t
  misc_feature (3355)..(3356): n is a, c, g, or t
  misc_feature (3358)..(3359): n is a, c, g, or t
  misc_feature (3362)..(3362): n is a, c, g, or t
  misc_feature (3364)..(3364): n is a, c, g, or t
  misc_feature (3366)..(3366): n is a, c, g, or t
  misc_feature (3370)..(3373): n is a, c, g, or t
  misc_feature (3375)..(3377): n is a, c, g, or t
  misc_feature (3379)..(3380): n is a, c, g, or t
  misc_feature (3382)..(3382): n is a, c, g, or t
  misc_feature (3385)..(3385): n is a, c, g, or t
  misc_feature (3389)..(3389): n is a, c, g, or t
  misc_feature (3392)..(3393): n is a, c, g, or t
  misc_feature (3396)..(3399): n is a, c, g, or t
  misc_feature (3401)..(3401): n is a, c, g, or t
  misc_feature (3404)..(3404): n is a, c, g, or t
  misc_feature (3407)..(3407): n is a, c, g, or t
  misc_feature (3411)..(3411): n is a, c, g, or t
  misc_feature (3415)..(3415): n is a, c, g, or t
  misc_feature (3417)..(3417): n is a, c, g, or t
  misc_feature (3420)..(3420): n is a, c, g, or t
  misc_feature (3422)..(3422): n is a, c, g, or t
  misc_feature (3424)..(3433): n is a, c, g, or t
  misc_feature (3435)..(3438): n is a, c, g, or t
  misc_feature (3440)..(3446): n is a, c, g, or t
  misc_feature (3448)..(3449): n is a, c, g, or t
  misc_feature (3452)..(3453): n is a, c, g, or t
  misc_feature (3459)..(3461): n is a, c, g, or t
  misc_feature (3463)..(3463): n is a, c, g, or t
  misc_feature (3465)..(3466): n is a, c, g, or t
  misc_feature (3470)..(3470): n is a, c, g, or t
  misc_feature (3474)..(3474): n is a, c, g, or t
  misc_feature (3477)..(3484): n is a, c, g, or t
  misc_feature (3487)..(3488): n is a, c, g, or t
  misc_feature (3491)..(3496): n is a, c, g, or t
  misc_feature (3499)..(3501): n is a, c, g, or t
  misc_feature (3503)..(3506): n is a, c, g, or t
  misc_feature (3509)..(3509): n is a, c, g, or t
  misc_feature (3511)..(3512): n is a, c, g, or t
  misc_feature (3514)..(3516): n is a, c, g, or t
  misc_feature (3518)..(3519): n is a, c, g, or t
  misc_feature (3521)..(3522): n is a, c, g, or t
  misc_feature (3524)..(3526): n is a, c, g, or t
  misc_feature (3530)..(3535): n is a, c, g, or t
  misc_feature (3538)..(3542): n is a, c, g, or t
  misc_feature (3546)..(3546): n is a, c, g, or t
  misc_feature (3548)..(3548): n is a, c, g, or t
  misc_feature (3553)..(3553): n is a, c, g, or t
  misc_feature (3558)..(3559): n is a, c, g, or t
  misc_feature (3562)..(3562): n is a, c, g, or t
  misc_feature (3564)..(3564): n is a, c, g, or t
  misc_feature (3566)..(3567): n is a, c, g, or t
  misc_feature (3576)..(3576): n is a, c, g, or t
  misc_feature (3578)..(3580): n is a, c, g, or t
  misc_feature (3582)..(3582): n is a, c, g, or t
  misc_feature (3585)..(3586): n is a, c, g, or t
  misc_feature (3589)..(3591): n is a, c, g, or t
  misc_feature (3593)..(3593): n is a, c, g, or t
  misc_feature (3596)..(3597): n is a, c, g, or t
  misc_feature (3599)..(3603): n is a, c, g, or t
  misc_feature (3605)..(3607): n is a, c, g, or t
  misc_feature (3609)..(3614): n is a, c, g, or t
  misc_feature (3616)..(3617): n is a, c, g, or t
  misc_feature (3619)..(3621): n is a, c, g, or t
  misc_feature (3624)..(3624): n is a, c, g, or t
  misc_feature (3628)..(3629): n is a, c, g, or t
  misc_feature (3631)..(3631): n is a, c, g, or t
  misc_feature (3636)..(3638): n is a, c, g, or t
  misc_feature (3640)..(3643): n is a, c, g, or t
  misc_feature (3648)..(3662): n is a, c, g, or t
  misc_feature (3664)..(3664): n is a, c, g, or t
  misc_feature (3666)..(3666): n is a, c, g, or t
  misc_feature (3671)..(3685): n is a, c, g, or t
  misc_feature (3689)..(3689): n is a, c, g, or t
  misc_feature (3692)..(3695): n is a, c, g, or t
  misc_feature (3698)..(3698): n is a, c, g, or t
  misc_feature (3700)..(3704): n is a, c, g, or t
  misc_feature (3708)..(3709): n is a, c, g, or t
  misc_feature (3711)..(3711): n is a, c, g, or t
  misc_feature (3715)..(3715): n is a, c, g, or t
  misc_feature (3717)..(3717): n is a, c, g, or t
  misc_feature (3719)..(3719): n is a, c, g, or t
  misc_feature (3722)..(3723): n is a, c, g, or t
  misc_feature (3727)..(3732): n is a, c, g, or t
  misc_feature (3734)..(3737): n is a, c, g, or t
  misc_feature (3741)..(3741): n is a, c, g, or t
  misc_feature (3744)..(3745): n is a, c, g, or t
  misc_feature (3748)..(3751): n is a, c, g, or t
  misc_feature (3754)..(3756): n is a, c, g, or t
  misc_feature (3758)..(3758): n is a, c, g, or t
  misc_feature (3760)..(3760): n is a, c, g, or t
  misc_feature (3762)..(3762): n is a, c, g, or t
  misc_feature (3768)..(3769): n is a, c, g, or t
  misc_feature (3771)..(3773): n is a, c, g, or t
  misc_feature (3775)..(3775): n is a, c, g, or t
  misc_feature (3777)..(3777): n is a, c, g, or t
  misc_feature (3781)..(3781): n is a, c, g, or t
  misc_feature (3785)..(3785): n is a, c, g, or t
  misc_feature (3787)..(3788): n is a, c, g, or t
  misc_feature (3791)..(3794): n is a, c, g, or t
  misc_feature (3797)..(3798): n is a, c, g, or t
  misc_feature (3801)..(3801): n is a, c, g, or t
  misc_feature (3804)..(3808): n is a, c, g, or t
  misc_feature (3810)..(3815): n is a, c, g, or t
  misc_feature (3817)..(3818): n is a, c, g, or t
  misc_feature (3821)..(3826): n is a, c, g, or t
  misc_feature (3828)..(3832): n is a, c, g, or t
  misc_feature (3834)..(3836): n is a, c, g, or t
  misc_feature (3838)..(3838): n is a, c, g, or t
  misc_feature (3840)..(3840): n is a, c, g, or t
  misc_feature (3843)..(3843): n is a, c, g, or t
  misc_feature (3845)..(3846): n is a, c, g, or t
  misc_feature (3850)..(3850): n is a, c, g, or t
  misc_feature (3854)..(3856): n is a, c, g, or t
  misc_feature (3860)..(3863): n is a, c, g, or t
  misc_feature (3865)..(3868): n is a, c, g, or t
  misc_feature (3870)..(3871): n is a, c, g, or t
  misc_feature (3874)..(3876): n is a, c, g, or t
  misc_feature (3878)..(3881): n is a, c, g, or t
  misc_feature (3883)..(3893): n is a, c, g, or t
  misc_feature (3895)..(3897): n is a, c, g, or t
  misc_feature (3899)..(3900): n is a, c, g, or t
  misc_feature (3904)..(3913): n is a, c, g, or t
  misc_feature (3917)..(3917): n is a, c, g, or t
  misc_feature (3919)..(3919): n is a, c, g, or t
  misc_feature (3921)..(3923): n is a, c, g, or t
  misc_feature (3926)..(3927): n is a, c, g, or t
  misc_feature (3931)..(3931): n is a, c, g, or t
  misc_feature (3934)..(3934): n is a, c, g, or t
  misc_feature (3937)..(3941): n is a, c, g, or t
  misc_feature (3944)..(3945): n is a, c, g, or t
  misc_feature (3947)..(3950): n is a, c, g, or t
  misc_feature (3955)..(3958): n is a, c, g, or t
  misc_feature (3960)..(3962): n is a, c, g, or t
  misc_feature (3964)..(3966): n is a, c, g, or t
  misc_feature (3968)..(3969): n is a, c, g, or t
  misc_feature (3972)..(3975): n is a, c, g, or t
  misc_feature (3977)..(3978): n is a, c, g, or t
  misc_feature (3981)..(3981): n is a, c, g, or t
  misc_feature (3983)..(3988): n is a, c, g, or t
  misc_feature (3991)..(3996): n is a, c, g, or t
  misc_feature (3998)..(4000): n is a, c, g, or t
gtagtgcctcggatgttttccgatgggggtagagcactggatggatgcgggggtcgcgagatctaccaattctaaccaaactccgaataccatcgagttagtccgggagacagacggcgggtgctaaggtccgtcgtcaaaagggaaacagccctaacctacagctaaggtccccaaatcatatctaagtggtgaagcatgtgggatttccaaaacaaccaggaggttggcttagaagcagccatcctttaaagaaagcgtaacagctcactggtctaaataagagatcctgcggcgaaaatgtaacggggctaaagatatgtaccgaagcttagggtgtgcaatttattgcatgcggtagcggagcgttccgtaggccgatgaagcgatctggtaatgggtcgtggaggtatcggaagtgcgaatgcagacatgagtagcgataggagggtgagacaccctcccgccgaaagaccaagggttcctgcttaaagctaatctgagcagggtaagccggcccctaagacgagcccgaagggggtagtcgatgggaaccacgttaatattcgtgggcctggtggtgtgtgacggatctcgtgagttgtatctccttattggattggaggtgcttcgaagaggttccaggaaatagccccaccgtatagaccgtacccgaaaccgacacaggtggtcaggtagagtataccaaggcgtttgagagaagtatcctgaaggaactcggcaaattgcctccgtaccttcggaagaaggaggccctcacattgcgcaagcagtatgagggggcacaggccagggggtagcgactgtttagcaaaaacacaggactctgctaagtcggcttcaagacgacgtatagggtctgacgcctgcccggtgctggaaggttaagaggaggagtgcaagctccgaattgaagccccagtaaacggcggccgtaactataacggtcctaaggtagcgaaattccttgtcgggtaagttccgacctgcacgaatggcgtaacgacttccccactgtctccaggatatgctcagcgaaattgaattctccgtgaagatgcggagtacccgcggttagacggaaagaccccgtgcacctttactgcagcttcagagtggcattaggaaagaactgtgtagaataggtgggaggctttgaaacttgggcgccagtccgagtggagccgaaatgtgaaataccaccctgttgttttctgatgtctaacctcgcaccgttatccggtgcagggaccctctgtggcgggtagtttgactggggcggtcgcctcctaaagagtaacggaggcgcgcgatggtaggctcaggacggttggaaaccgtctgttagagtgcaatggcataagcctgcctgactgcgagactgacgagtcgagcagagacgaaagtcggtcatagtgatccggtggtccctcgtggaagggccatcgctcaacggataaaaggtacgccggggataacaggctgatgattcccaagagctcatatcgacggaatcgtttggcacctcgatgtcggctcatcacatcctggggctggagcaggtcccaagggtttggctgttcgccaattaaagtggtacgtgagctgggttcagaacgtcgcgagacagtttggtccctatctgccgtgggcgtcgaaatttgagaggagttgaccctagtacgagaggaccgggttgaacatacctctggtgtacctgtcgtggcgccagccgcgcagcagggtagctatgtatggacgggataaccgctgaaagcatctaagcgggaagcctccctcgagattagatttcatcgagtcgtagtagaccactacgttgataggttgggtgtggaagcgcagtaatgcgtgaagctaaccaatcctaattactcttttcgcgcttgaagtcccaccatcaatgacantgctganntntnnnnnangtcgntggcggatgattanatcgcaaccagataaatattccctgcacgggcatcgattataacccaaattcacttgttagtgagcgcctgcttcattgcttggtgaccatagcgtttgtgacccacccgatcccatcccgaactcggccgtgaaaccaaactgcgccgatggtactaccgcttaagcgttggaagagtagggcgtcgccaggcattgnagccggcgctnnnnannnaagtgcattggaagaacccattcataattcaaaaggcggaccgctgtcgttcattcgacggatgtccgccttttttcgtttttgccccgttgaaatacaggnnattttggtnnngcgggatggagcagcccgnnnncnnntnnnnnncnnaannngnnnnncnnannnnnnnnncnnncnnnngnnannnnnnttcnttgntngcnngggnnggnnnnnncnggtagctnnncnggntnntannntgnnggtcgtnggttcaaanccnactcccgcnaccannannnnannnnnnnnnnnnngnnntnnnntgtnnnntntnnnnnnannnntgnnnnnnntnnggncnntnnnnnnttnnnnnngnnannnagngnnnnnnnnngnnnntttnnnnnnnnnngnnnnnnnnntgnngnnnaannnnnnnnnnatnnnngnngnncnnnnggtttnnnnnnntcnnnnanncngncnannnngtnnnnnntntncnnnnnnngnagncnnngnctnnnnntccncnnnngnanncannnnnnnnannnnncnnatnnctncnncnntnnntngccnccnnntnannnnnnncnncnnangcnnnnnccntnnnnnnnnngnnncnnnngcnnangnnnnnatnnnncnnnnngcnntnnnnnancanngnccgnntnnncttgncncnnngngnnnnnnnantccggnngnncncntnnnnnnngnnnncgngntacnaannnnnnnnnnaannncnnantgcgnagnnnntnantannnncncgannnnccannnnnnnggcgncnnntctgnngannntnnnnnnnntgnnnncaaggnncnnnnnnccnncngcnnnaanntcancgncgngcntnacnanntgcngannnngntnntcnnnncgnnnttnagccnnttcnnntannccgncgcntcngnnggnncnnnatntanngcnttnnccntnnnnnnanncnnngnnnnntncancgcnntgnntnnnatngnnncgnatccggnntnaacannnnnngntnnncantctncgnnccncnnnnnnnncgnnntgannngnntnnntnngnnntcnancnntcanngncnncnngccatntncngtnagngnngnnccngnnaannnngatncnntnnccnangncggnnnngnnngnncnggntttnttnncannnncngtnganttgnacgngnagngntnnnnnnnnnnannnncnnnnnnngnnaanncgagcnnngntnnttcncacntcnnnnnnnnagnnccnnnnnntcnnncnnnncantnncnnncnncnncnnngccnnnnnnttnnnnngcancntgtgnctgannaangncnncgtcggtcngnnntnccnntannntntcnncnnnnntnnngnnnnnngnngnnncanagcnncnatgcnnngnnnnctcgnnnnnnnnnnnnnnngntngagcnnnnnnnnnnnnnnngccngannnnccngnnnnnaganncngcangncnggnnttgnnnnnnannnnttcntcnncannnnccnnnancngncgtcgnnannncncntatncttnanngcnnnnacnncgnttnnnnntnnnnnntnntcnnnnnntnnnnncnnngncngcntnnatgncacnnnaaannnngnnnntnngtnnncnnnntnnnnnnnnnnntnnngnnaacnnnnnnnnnnatgngngnnnccnngccngcncannnnnctnntnnnnagcgnnnngnnncnnnannggnnnnanncgncnnnnnngtnnnnnnannn

SEQ ID NO: 1087 - DNA, 4000 bp, Escherichia coli
  misc_feature (108)..(108): n is a, c, g, or t
  misc_feature (307)..(307): n is a, c, g, or t
  misc_feature (617)..(617): n is a, c, g, or t
  misc_feature (776)..(776): n is a, c, g, or t
  misc_feature (2257)..(2257): n is a, c, g, or t
  misc_feature (2520)..(2520): n is a, c, g, or t
  misc_feature (2829)..(2829): n is a, c, g, or t
  misc_feature (2837)..(2837): n is a, c, g, or t
  misc_feature (2960)..(2960): n is a, c, g, or t
  misc_feature (3011)..(3011): n is a, c, g, or t
  misc_feature (3110)..(3110): n is a, c, g, or t
  misc_feature (3119)..(3119): n is a, c, g, or t
  misc_feature (3182)..(3182): n is a, c, g, or t
  misc_feature (3199)..(3199): n is a, c, g, or t
  misc_feature (3201)..(3201): n is a, c, g, or t
  misc_feature (3395)..(3395): n is a, c, g, or t
  misc_feature (3443)..(3443): n is a, c, g, or t
  misc_feature (3705)..(3705): n is a, c, g, or t
aaaacctgggatacgcagggcgtcgacaagcacgaacccgggccgggtatccagcgcggccaccgcacgccgcatgccggaaacgttggcgtcctggatgccgtgggnatcaatgtcctgtgcggagaccagcaccacggcccatgacagcgcgtggttcttcaccagcgggaaaaggcgctggcgctggcgtgctgtgagttttttagaatcggtgagttccgccagatctgtgatcgggtgatccggcaagatgcatgcggcgatagcaataggaccggcgcatgcaccccgacccgcctcatcnacccccgcgaccgggccgagaccactcttggatagggtgacctcgtacgtacggagctgctttaacgtgcgcaccgtgcggatgttagtgctgaatatctgggtcgtccactaggcccattcggccaagcggaagcgcaatggctacaaccttgcccacaatgttcttctcggggatggtgccctggtactggtcggccatgtgatagcgggaatccgcagaattagtgcggttgtcgcccatcacaaagacattcccttcaggcaccttcacggggccgaagtagggaccaccacatgcttccgacccngtggactgatccaccgggtaggcgggcggctgcagcgtgtaggaagaatcaatcactttgccattgactttcacgcccgtatccccggcttggcattccactgtctgaccaccagtcgcaataacgcgcttgaccaggtcattctgatccggcgcaacnacccccaccatggacccgaggttctgcagaccacgaatcagagggttggaggagcggcgtgaatcgtagttagcattccacgactcggtgcccgcaaacaccaccacgtcccccggctttgggctgccgaaacgatacgaaattttctccacataaatgcggtcgcctgtgcaaccactacacccgtgcagcgtaggttccatcgactcactcggaataacatacaggcgaccaacaaacgtgtgcagcaacccaatgatcaggatggtggtgaacaccacgacggggatctcgatgtaccacggcagctgccgacggccatcgtccccccgcttattcttcttacgaccagcatcgcggtcatcgtcgtggcgatcatcagcccggctgctgtctacgcgaaagttatcgttcgagtcagtcacgaaagaaaactctaccagttacatcggaaaccctaaacagacttttatacgtctcacatctactaccctcgccacgctagcggtagtacacacaaaaacgccccgcttcatctccgaaacggggcgtcgtgtccatcctgtggatcacatcaagaaaccaagcactactgctcgcggtattccttgatcttggctgccttaccacgcagattacgcaggtagtacagcttagcgcggcgaaccttaccgcgggagacaacctcaatcttgtcgatgttgggtgagtgcaccgggaaagtacgctccacaccaataccgaaagaaatcttacgaaccgtaaaggtctcacggatgccaccgttctgacggcggataacaacacccttgaaaacctgaatacgggacttgtcaccctcaatgaccttcacgtgaacgttcacagtgtcgccggggcggaatttcggaatatcgtcgcgcaactgtgcggcatcgaccttatccagaatgttcatagaaacaatccttaagttctgtaatagaaagaggaacctggcggcgcttcccaccgcaccatcgcgcggtgactaattgggcgctcggccggctcgtatccgagacatgacgtgccactgccaggccaagaccaagcagacaactgcgcaattttcgcacatgaagcgctgtggcgtcaaaaatcgatgcaacaagacgcacatacaacgcctcctgttgacagcacaacaactcatcactactttggtgaacatgttcactgaacctgttcaccctggcgtgttacgcagatgggatcactcatgaccgcacgacaagaacaacgcttggccacagaaaacaccatccttgccactgcagaacagcactttgtcacgcacggataccagaacgcgaccatccgcgccatcgccgcagaagccaatgtgagcactggctccgtcatgtcggttggcgataagaaaacgctgctcatcaggatttttgacacaaagattgcagccatccaccaatcgcgcaacggccacactggcattgctgacncgcccaaccccaccgacgcagtgctggccaccgtctctccattccttacgattttcgccaagcacttggacctatcccgcgagtactttgccacgctggtcagcggctcgcactcctcgatcatcttcaacgaactcgccgaagcgcttgaacgagaatttgcagaactcatcacgcacttcttaccccagcacgctgacaccgccgccagcgctgcccacgcactctacctgggtttcttaggggtgctggtggtatgggcnggcagtgtcgatgccactgtgggcgacgtccagcttcccaccactgagctgcgccgcttcgtcgatttctttttcacctcgcaaggggcacactcatgaacatccttgtactcggggcaacggggaccattggcacaccgctgacacaacgtctccatgacgacgggcacgctgtaaccgcctggtcacgacgtacacatggtgacctctccacacagctcattccgttggacatggtggaagggacagaactgatcatcgacgtcaccgacgccaaacgccgcagctccatgctccccacaatggccnccagtgtngtctccagcgttcaccgcgccgctgtcacaccccgcatcctctgcctgggcatcctcaaccaggacaaaagcacattctcgtattacaaacacaagcaacaacaacatcaggtctacgcatcntccggtctcccctacaccgccgtacgatgcacacaattcaccacatttctnacctcgcttttcgacgccgcaacgcccaccggcctcatcccactaccgacaggggctcggtggcagttgattgatccacgggacgtcgctacgcagctngcatgcctnccccaatcagatgtattgaccctcgctggaccagaaaccctgacatcacgcgaggctgccgancggtatcgcacagcacncngaagcaagcgcatccttgttaacctgcgcgttcccggtgcgttcggcaagtttctgcgtgaagggctgaatctgacaactgaaccggacgctatgggcaccctcacgtaccaaggaaggtaatcaatgactctttttctcgccatcgtcctactcgccgacgtcgccatgtccatacgtcccatggcgttcatncgcgcgtgcctgagcggggtgaacctgccggaaaacttctggtgggtnctgctcgtgatcaaaaccctggcagctgcgggcctcatcgccgaccactggcttgccgacgccggatacgcgggcgtcgggctggcagccaccgtgggcgtggtggtgtacttcctgtgtgccgtcgtggcacacattcgggcgcatttcctgggcagggaattctggctaaattgcctgggaatgttggcactctctctggtcacgctgggttttgtcgtgctatgaccagtcgtactgtgaccagtcgatgaccacagcnccttagttaccaaaacctgcttttcgcagtgcatcagccatgctgccgcccgcagtgtcgttgcggtcattgcggcgctggcgttggctgcgtccattcccacgttgttgacggggcttcttaccggcttgcccacccttcgacttcttcggcccctttgctccgggttcatcattcaaccgcagcgataggccgatgcgctgacgatctacatccacttccatgaccttcaccttgacgacctggccggaacgcaccaccgtgtgcgggtcatccacaaacgtgtccgacatag

SEQ ID NO: 1088 - DNA, 4000 bp, Escherichia coli
  misc_feature (975)..(975): n is a, c, g, or t
  misc_feature (1959)..(1959): n is a, c, g, or t
  misc_feature (1985)..(1985): n is a, c, g, or t
  misc_feature (1988)..(1988): n is a, c, g, or t
  misc_feature (2389)..(2389): n is a, c, g, or t
  misc_feature (2721)..(2721): n is a, c, g, or t
  misc_feature (2724)..(2724): n is a, c, g, or t
  misc_feature (2726)..(2727): n is a, c, g, or t
  misc_feature (2736)..(2743): n is a, c, g, or t
  misc_feature (2745)..(2747): n is a, c, g, or t
  misc_feature (2750)..(2750): n is a, c, g, or t
  misc_feature (2752)..(2752): n is a, c, g, or t
  misc_feature (2755)..(2757): n is a, c, g, or t
  misc_feature (2760)..(2760): n is a, c, g, or t
  misc_feature (2762)..(2763): n is a, c, g, or t
  misc_feature (2765)..(2766): n is a, c, g, or t
  misc_feature (2769)..(2769): n is a, c, g, or t
  misc_feature (2771)..(2772): n is a, c, g, or t
  misc_feature (2775)..(2775): n is a, c, g, or t
  misc_feature (2780)..(2781): n is a, c, g, or t
  misc_feature (2784)..(2784): n is a, c, g, or t
  misc_feature (2786)..(2786): n is a, c, g, or t
  misc_feature (2788)..(2789): n is a, c, g, or t
  misc_feature (2791)..(2791): n is a, c, g, or t
  misc_feature (2793)..(2796): n is a, c, g, or t
  misc_feature (2798)..(2798): n is a, c, g, or t
  misc_feature (2800)..(2802): n is a, c, g, or t
  misc_feature (2804)..(2805): n is a, c, g, or t
  misc_feature (2808)..(2808): n is a, c, g, or t
  misc_feature (2810)..(2812): n is a, c, g, or t
  misc_feature (2814)..(2814): n is a, c, g, or t
  misc_feature (2816)..(2817): n is a, c, g, or t
  misc_feature (2820)..(2820): n is a, c, g, or t
  misc_feature (2822)..(2824): n is a, c, g, or t
  misc_feature (2826)..(2827): n is a, c, g, or t
  misc_feature (2829)..(2829): n is a, c, g, or t
  misc_feature (2831)..(2832): n is a, c, g, or t
  misc_feature (2834)..(2834): n is a, c, g, or t
  misc_feature (2836)..(2836): n is a, c, g, or t
  misc_feature (2839)..(2839): n is a, c, g, or t
  misc_feature (2841)..(2843): n is a, c, g, or t
  misc_feature (2846)..(2850): n is a, c, g, or t
  misc_feature (2852)..(2853): n is a, c, g, or t
  misc_feature (2857)..(2860): n is a, c, g, or t
  misc_feature (2862)..(2862): n is a, c, g, or t
  misc_feature (2865)..(2865): n is a, c, g, or t
  misc_feature (2867)..(2867): n is a, c, g, or t
  misc_feature (2870)..(2870): n is a, c, g, or t
  misc_feature (2872)..(2872): n is a, c, g, or t
  misc_feature (2875)..(2875): n is a, c, g, or t
  misc_feature (2877)..(2878): n is a, c, g, or t
  misc_feature (2882)..(2882): n is a, c, g, or t
  misc_feature (2884)..(2884): n is a, c, g, or t
  misc_feature (2886)..(2888): n is a, c, g, or t
  misc_feature (2891)..(2891): n is a, c, g, or t
  misc_feature (2894)..(2896): n is a, c, g, or t
  misc_feature (2898)..(2899): n is a, c, g, or t
  misc_feature (2903)..(2904): n is a, c, g, or t
  misc_feature (2908)..(2908): n is a, c, g, or t
  misc_feature (2910)..(2915): n is a, c, g, or t
  misc_feature (2921)..(2922): n is a, c, g, or t
  misc_feature (2924)..(2924): n is a, c, g, or t
  misc_feature (2927)..(2928): n is a, c, g, or t
  misc_feature (2930)..(2931): n is a, c, g, or t
  misc_feature (2933)..(2935): n is a, c, g, or t
  misc_feature (2937)..(2940): n is a, c, g, or t
  misc_feature (2944)..(2946): n is a, c, g, or t
  misc_feature (2948)..(2949): n is a, c, g, or t
  misc_feature (2951)..(2952): n is a, c, g, or t
  misc_feature (2954)..(2954): n is a, c, g, or t
  misc_feature (2957)..(2957): n is a, c, g, or t
  misc_feature (2963)..(2964): n is a, c, g, or t
  misc_feature (2966)..(2967): n is a, c, g, or t
  misc_feature (2969)..(2969): n is a, c, g, or t
  misc_feature (2971)..(2976): n is a, c, g, or t
  misc_feature (2978)..(2979): n is a, c, g, or t
  misc_feature (2981)..(2985): n is a, c, g, or t
  misc_feature (2987)..(2991): n is a, c, g, or t
  misc_feature (2993)..(2993): n is a, c, g, or t
  misc_feature (2995)..(2997): n is a, c, g, or t
  misc_feature (2999)..(3000): n is a, c, g, or t
  misc_feature (3002)..(3003): n is a, c, g, or t
  misc_feature (3005)..(3005): n is a, c, g, or t
  misc_feature (3007)..(3015): n is a, c, g, or t
  misc_feature (3018)..(3018): n is a, c, g, or t
  misc_feature (3020)..(3020): n is a, c, g, or t
  misc_feature (3023)..(3024): n is a, c, g, or t
  misc_feature (3027)..(3027): n is a, c, g, or t
  misc_feature (3029)..(3037): n is a, c, g, or t
  misc_feature (3040)..(3041): n is a, c, g, or t
  misc_feature (3043)..(3043): n is a, c, g, or t
  misc_feature (3045)..(3048): n is a, c, g, or t
  misc_feature (3050)..(3051): n is a, c, g, or t
  misc_feature (3054)..(3054): n is a, c, g, or t
  misc_feature (3059)..(3061): n is a, c, g, or t
  misc_feature (3066)..(3073): n is a, c, g, or t
  misc_feature (3075)..(3075): n is a, c, g, or t
  misc_feature (3078)..(3079): n is a, c, g, or t
  misc_feature (3081)..(3081): n is a, c, g, or t
  misc_feature (3084)..(3085): n is a, c, g, or t
  misc_feature (3087)..(3087): n is a, c, g, or t
  misc_feature (3090)..(3090): n is a, c, g, or t
  misc_feature (3097)..(3097): n is a, c, g, or t
  misc_feature (3099)..(3099): n is a, c, g, or t
  misc_feature (3102)..(3103): n is a, c, g, or t
  misc_feature (3108)..(3109): n is a, c, g, or t
  misc_feature (3111)..(3111): n is a, c, g, or t
  misc_feature (3117)..(3117): n is a, c, g, or t
  misc_feature (3120)..(3121): n is a, c, g, or t
  misc_feature (3123)..(3123): n is a, c, g, or t
  misc_feature (3126)..(3127): n is a, c, g, or t
  misc_feature (3135)..(3135): n is a, c, g, or t
  misc_feature (3138)..(3138): n is a, c, g, or t
  misc_feature (3142)..(3144): n is a, c, g, or t
  misc_feature (3147)..(3147): n is a, c, g, or t
  misc_feature (3149)..(3150): n is a, c, g, or t
  misc_feature (3152)..(3153): n is a, c, g, or t
  misc_feature (3155)..(3156): n is a, c, g, or t
  misc_feature (3161)..(3162): n is a, c, g, or t
  misc_feature (3164)..(3164): n is a, c, g, or t
  misc_feature (3167)..(3167): n is a, c, g, or t
  misc_feature (3169)..(3169): n is a, c, g, or t
  misc_feature (3180)..(3180): n is a, c, g, or t
  misc_feature (3192)..(3192): n is a, c, g, or t
  misc_feature (3195)..(3195): n is a, c, g, or t
  misc_feature (3199)..(3199): n is a, c, g, or t
  misc_feature (3207)..(3207): n is a, c, g, or t
  misc_feature (3210)..(3210): n is a, c, g, or t
  misc_feature (3217)..(3217): n is a, c, g, or t
  misc_feature (3219)..(3219): n is a, c, g, or t
  misc_feature (3227)..(3228): n is a, c, g, or t
  misc_feature (3237)..(3237): n is a, c, g, or t
  misc_feature (3243)..(3243): n is a, c, g, or t
  misc_feature (3249)..(3249): n is a, c, g, or t
  misc_feature (3255)..(3255): n is a, c, g, or t
  misc_feature (3265)..(3265): n is a, c, g, or t
  misc_feature (3271)..(3273): n is a, c, g, or t
  misc_feature (3276)..(3276): n is a, c, g, or t
  misc_feature (3285)..(3285): n is a, c, g, or t
  misc_feature (3291)..(3291): n is a, c, g, or t
  misc_feature (3295)..(3295): n is a, c, g, or t
  misc_feature (3300)..(3300): n is a, c, g, or t
  misc_feature (3308)..(3308): n is a, c, g, or t
  misc_feature (3313)..(3313): n is a, c, g, or t
  misc_feature (3327)..(3328): n is a, c, g, or t
  misc_feature (3330)..(3330): n is a, c, g, or t
  misc_feature (3338)..(3338): n is a, c, g, or t
  misc_feature (3342)..(3343): n is a, c, g, or t
  misc_feature (3363)..(3365): n is a, c, g, or t
  misc_feature (3369)..(3369): n is a, c, g, or t
  misc_feature (3371)..(3371): n is a, c, g, or t
  misc_feature (3374)..(3374): n is a, c, g, or t
  misc_feature (3376)..(3376): n is a, c, g, or t
  misc_feature (3383)..(3383): n is a, c, g, or t
  misc_feature (3386)..(3386): n is a, c, g, or t
  misc_feature (3388)..(3388): n is a, c, g, or t
  misc_feature (3390)..(3390): n is a, c, g, or t
  misc_feature (3392)..(3392): n is a, c, g, or t
  misc_feature (3396)..(3396): n is a, c, g, or t
  misc_feature (3400)..(3400): n is a, c, g, or t
  misc_feature (3402)..(3403): n is a, c, g, or t
  misc_feature (3411)..(3411): n is a, c, g, or t
  misc_feature (3415)..(3415): n is a, c, g, or t
  misc_feature (3428)..(3428): n is a, c, g, or t
  misc_feature (3430)..(3431): n is a, c, g, or t
  misc_feature (3433)..(3437): n is a, c, g, or t
  misc_feature (3440)..(3440): n is a, c, g, or t
  misc_feature (3442)..(3442): n is a, c, g, or t
  misc_feature (3444)..(3444): n is a, c, g, or t
  misc_feature (3446)..(3447): n is a, c, g, or t
  misc_feature (3449)..(3449): n is a, c, g, or t
  misc_feature (3451)..(3453): n is a, c, g, or t
  misc_feature (3455)..(3462): n is a, c, g, or t
  misc_feature (3464)..(3465): n is a, c, g, or t
  misc_feature (3467)..(3469): n is a, c, g, or t
  misc_feature (3471)..(3473): n is a, c, g, or t
ggcgcgaaaggctcgcgtccgctcgcgcccgcgggcaaggcggcgaaggccggcgcgctcgcggtcgtggcgatcggccgcttctccctgaagcgcgtcacgccctgggcgggcgtgctggcggtgcgcgtcttcggcagccacggcgcgttccaggcgctcagcgcggcgacgctcgcggtgaacgccgtgcgttgtcgtcgcgccgcgcgagcgctcaacgccgcgctcgcgcgcgcggcggagcggcgcgggaacggcgccgggttctggaagggcggtctgctcaacgaggacgcgacgacgaaagcgccatcggtggctgtcgcgggaggggcgcgtcttcgtgcgttcgacgacgccaaccacccgctggtgatattgcaggatcgcgcgcccgcgttgttccaccccgcgctgcgcgcgctcagtttgccaaccctcatcacgcatttgagcccgcgcgtgctgcgcctcgtcgcgccgggcgcgctgcgcacgctgcggttctacggccacctgctgccggtcgtcgccgggtacgtcaagtgcctcgtcgtggacgcccgcggcgtcttcgccggcgccaagctgagcgaggaggagaagcagaaggtgtgggacgcgaggcacgagtggggcgccgagcgcgttaaacgcatgatcctcgagctcggtgggttctacttgaaggtgggccaggtgttcgccacgaagtcggacctgctgccgccgcagtacatcgcggcgctcaagtcggtgttcgacgattgcgcgccggcgaacgcgagcgccatcgtgaagatcgtcgagaaggatctcggcgggtccgtggactcgctgttcgcggagtttgaccgcgcgcccatggccacggcgaccatcgcgcaggtgcacgtcgcgcggcttcgggacgcgccgcgcacgaaggtggcggtgaaggtgcaggtgcccggctcggagcgcctgatgaanatggacatgcggaacatgctggcggtttccgaattcgccgacgatcggctgcgcgtccggctgccgttcgaccacaccagcatcctgaaggagtacgcggttcaggtgcccctggagtttgacttcaagcgcgaggcgcagatgctgacggtgatcggcgccgccatccaggggcgcgtcccggatgtcaccacgccgcgcgccttcgagcgcctctcgtcgcggcgcgtgctgacgatgagcttcgtggagggcgagccgctcggggacatcatccagagggcgctgcgtggctccgcgggcggcccgcccggatcgcccatcagctcgtcgccggggtaccacgagcgcgccgccgcgggtatgcagacgaagggtggcgtctccgtggacggcaacgcgctggtggcgcgcttagtggaatcgtacggcacgcagatcttcggcatcgggcggttccactccgacccgcaccccgggaacgtgctcgtgggtgaggatggcaaaaccctgagcgtcatcgactttgggcaaacgaaggagttgcgcgacgaaacgaggctcgggatatgccgcctgattttggcgctcgccgcggaccgcgcggaggagacggcgcggtacgccgccgcgctcgggctgcaaatttccggcgcgagcgaagcgttcgccatgacggtgtgttacatcttgttcgacacgcgcatggacctgatcgaggcgcacctctcgcctctggacgcggtcgtgcctcccgagatgcggctggtgaagctggagacgattccggaggacatcttcatgctcatccgcgtcgtcgcgctgattcgcgggatgctcatctcgctcaacgccctcgacgtcaacgcgcggctcatctggcgcccctacgccatggccgcgctgcgcgccgccggcgaacgcgtgccgggctgggcgctggaccacgaggctgcggtggacgaggcggcggtgacgaccccnaacaagacgccgaacgccggcgccgncgncgccgccgccgccgacccgaagtcgggcgcggtgtacgggaagatgaaggcgttggccggctggatgcgcgccaacgatttgccgcacaaccgtaaggctttgacgcctttcgtcgccacgggtttgctcaccgtggagcacgtcgccgccgccatcgagcgcgaagaagaggacaagctcgcgcgggcgttcctgatgttctcgcccgaggacgccaagcggtgccgcgcgatcgcgatgcgcgtcgccgccggcgccgccgcgcgcatggacgccgaggaggcggccggaaaggagggcgccgagcggggcgtgaacgacgcggagaagcggctccgggaacgcgccgaggccaaggcgcgcgaggcgcgagacaagaagcacaagggcaaagggaaangttcgagcgagggcgcggacgcgcgcgacgacgacgtcgacgtatccgtcgtctcgatgaacatcctgacgtcgatgctgcggtggtcgtggcgcgccaagcgctacgtcgccgcggaggcaaaggcggaggcggcgcggctcgaggcggagaagaagcgcgcggcgaacatcgcgaagcgcgaggcggaggagaaggcggtgctcgaggcggcggcggagaaggcgcgggaggaggcggcggagaagaagaaggcggaagaggaagccgccgcgaagaagaagaagaaggcggaagaggaagccgccgcgaagaagaagaaggcggcggangangnngccgccgcnnnnnnnnannnggngncgnnngangnngnngcngnngcngccgnngcngngnngncnnnngngnnngnngangnnncngnngcngnnncnncngnngngnagncnnnggnnnnngnngcgnnnncnccngnggngnagncnncggngncnnnggnggnnncnnccgnngcgnannnnnnggcggnngnggnngnngnnncnnnngcgnnngnngnngnggnggcggnngnngngnnnnnngnngnnnnngnnnnngngnnngnngnngngnnnnnnnnngcngnggnngangnnnnnnnnnagnngnannnngnngcngaggnnnaggcnnnnnnnnangcnnangcnnangcngaggcgnangcnnaagcnnangcggangcnnangcnnaggcggangcngaannngangnngnngnngaggnngnggngnaagcgaaagcngacgcggcaganaangcgncggcggangcnaagacgncngcgacggnngccgcgtcngcgaangctacngccgangcggcgacgnccgcgnnngcngacgccgcngcggangcgncggcngccgccgncgcgncggccgaggcgganncngccgcggnagcnnccgcgtcggccgaggcggannncgcngnggngnaggcggngangnananggcnaacncnncgggggcnaagnggggggagaaagngnngnnnnnggngngngnngngnnngnnnnnnnngnngnnnannngccgacgtcctcggtcgccgccgccgcggcggatcccgccgccgccggccccgcgtcgcccgaggcggcgaatgccgcggtatcgtccgccttgggcacacctaagtcctcgggggcgaagggggggaagaaaggggggaagaagggggggaagaagggggggaaggggaagtgagcggcggtcgcgcccttcttcgttatcgaaatattttttcgtcgttgcgccgttcgcacagctttgcatcgctcgcagagagccgctctcgatattcttcgtccttcttttaacgggtcgcacttccccccacgcgcgccgccatggccaagaagcgcaagaacgtcgaccccgacgcgcccccgccgcctcagtggacgccgcccaccgacgacgtcgagtggcgcgactggatgaaggacagcttctggtgctccgacgacctgcgcaagtacggcgtcgcgcacagcgcgaaggcgtcttttaaaacgccgttccccgttttcgtcggtccggaccgcgcgtgtctctc

SEQ ID NO: 1089 - DNA, 4000 bp, Escherichia coli
  misc_feature (3)..(4): n is a, c, g, or t
  misc_feature (7)..(8): n is a, c, g, or t
  misc_feature (14)..(14): n is a, c, g, or t
  misc_feature (18)..(18): n is a, c, g, or t
  misc_feature (21)..(21): n is a, c, g, or t
  misc_feature (24)..(28): n is a, c, g, or t
  misc_feature (30)..(31): n is a, c, g, or t
  misc_feature (35)..(40): n is a, c, g, or t
  misc_feature (42)..(44): n is a, c, g, or t
  misc_feature (46)..(46): n is a, c, g, or t
  misc_feature (52)..(52): n is a, c, g, or t
  misc_feature (57)..(57): n is a, c, g, or t
  misc_feature (67)..(69): n is a, c, g, or t
  misc_feature (72)..(72): n is a, c, g, or t
  misc_feature (74)..(74): n is a, c, g, or t
  misc_feature (77)..(79): n is a, c, g, or t
  misc_feature (81)..(82): n is a, c, g, or t
  misc_feature (85)..(85): n is a, c, g, or t
  misc_feature (88)..(88): n is a, c, g, or t
  misc_feature (90)..(92): n is a, c, g, or t
  misc_feature (94)..(94): n is a, c, g, or t
  misc_feature (97)..(99): n is a, c, g, or t
  misc_feature (101)..(106): n is a, c, g, or t
  misc_feature (108)..(108): n is a, c, g, or t
  misc_feature (110)..(111): n is a, c, g, or t
  misc_feature (115)..(117): n is a, c, g, or t
  misc_feature (119)..(120): n is a, c, g, or t
  misc_feature (122)..(122): n is a, c, g, or t
  misc_feature (127)..(127): n is a, c, g, or t
  misc_feature (129)..(129): n is a, c, g, or t
  misc_feature (131)..(131): n is a, c, g, or t
  misc_feature (134)..(134): n is a, c, g, or t
  misc_feature (138)..(138): n is a, c, g, or t
  misc_feature (141)..(142): n is a, c, g, or t
  misc_feature (145)..(145): n is a, c, g, or t
  misc_feature (148)..(154): n is a, c, g, or t
  misc_feature (156)..(156): n is a, c, g, or t
  misc_feature (158)..(159): n is a, c, g, or t
  misc_feature (163)..(165): n is a, c, g, or t
  misc_feature (167)..(169): n is a, c, g, or t
  misc_feature (171)..(171): n is a, c, g, or t
  misc_feature (173)..(173): n is a, c, g, or t
  misc_feature (177)..(177): n is a, c, g, or t
  misc_feature (179)..(179): n is a, c, g, or t
  misc_feature (182)..(183): n is a, c, g, or t
  misc_feature (187)..(192): n is a, c, g, or t
  misc_feature (194)..(194): n is a, c, g, or t
  misc_feature (197)..(199): n is a, c, g, or t
  misc_feature (201)..(201): n is a, c, g, or t
  misc_feature (204)..(206): n is a, c, g, or t
  misc_feature (208)..(208): n is a, c, g, or t
  misc_feature (210)..(211): n is a, c, g, or t
  misc_feature (213)..(213): n is a, c, g, or t
  misc_feature (215)..(216): n is a, c, g, or t
  misc_feature (219)..(219): n is a, c, g, or t
  misc_feature (221)..(223): n is a, c, g, or t
  misc_feature (225)..(225): n is a, c, g, or t
  misc_feature (227)..(228): n is a, c, g, or t
  misc_feature (230)..(234): n is a, c, g, or t
  misc_feature (236)..(236): n is a, c, g, or t
  misc_feature (240)..(240): n is a, c, g, or t
  misc_feature (242)..(245): n is a, c, g, or t
  misc_feature (248)..(250): n is a, c, g, or t
  misc_feature (254)..(256): n is a, c, g, or t
  misc_feature (258)..(258): n is a, c, g, or t
  misc_feature (260)..(260): n is a, c, g, or t
  misc_feature (262)..(262): n is a, c, g, or t
  misc_feature (264)..(272): n is a, c, g, or t
  misc_feature (275)..(276): n is a, c, g, or t
  misc_feature (278)..(279): n is a, c, g, or t
  misc_feature (281)..(282): n is a, c, g, or t
  misc_feature (284)..(289): n is a, c, g, or t
  misc_feature (291)..(293): n is a, c, g, or t
  misc_feature (296)..(296): n is a, c, g, or t
  misc_feature (299)..(301): n is a, c, g, or t
  misc_feature (303)..(305): n is a, c, g, or t
  misc_feature (307)..(309): n is a, c, g, or t
  misc_feature (318)..(318): n is a, c, g, or t
  misc_feature (324)..(324): n is a, c, g, or t
  misc_feature (327)..(327): n is a, c, g, or t
  misc_feature (331)..(332): n is a, c, g, or t
  misc_feature (336)..(336): n is a, c, g, or t
  misc_feature (339)..(340): n is a, c, g, or t
  misc_feature (343)..(343): n is a, c, g, or t
  misc_feature (347)..(347): n is a, c, g, or t
  misc_feature (350)..(351): n is a, c, g, or t
  misc_feature (353)..(353): n is a, c, g, or t
  misc_feature (355)..(355): n is a, c, g, or t
  misc_feature (358)..(359): n is a, c, g, or t
  misc_feature (363)..(363): n is a, c, g, or t
  misc_feature (365)..(365): n is a, c, g, or t
  misc_feature (369)..(371): n is a, c, g, or t
  misc_feature (373)..(373): n is a, c, g, or t
  misc_feature (377)..(380): n is a, c, g, or t
  misc_feature (382)..(386): n is a, c, g, or t
  misc_feature (388)..(388): n is a, c, g, or t
  misc_feature (390)..(391): n is a, c, g, or t
  misc_feature (394)..(395): n is a, c, g, or t
  misc_feature (397)..(398): n is a, c, g, or t
  misc_feature (400)..(401): n is a, c, g, or t
  misc_feature (404)..(408): n is a, c, g, or t
  misc_feature (411)..(413): n is a, c, g, or t
  misc_feature (418)..(418): n is a, c, g, or t
  misc_feature (420)..(422): n is a, c, g, or t
  misc_feature (425)..(425): n is a, c, g, or t
  misc_feature (428)..(429): n is a, c, g, or t
  misc_feature (431)..(431): n is a, c, g, or t
  misc_feature (437)..(437): n is a, c, g, or t
  misc_feature (444)..(444): n is a, c, g, or t
  misc_feature (449)..(453): n is a, c, g, or t
  misc_feature (456)..(456): n is a, c, g, or t
  misc_feature (460)..(464): n is a, c, g, or t
  misc_feature (466)..(466): n is a, c, g, or t
  misc_feature (468)..(470): n is a, c, g, or t
  misc_feature (472)..(472): n is a, c, g, or t
  misc_feature (474)..(476): n is a, c, g, or t
  misc_feature (479)..(480): n is a, c, g, or t
  misc_feature (482)..(483): n is a, c, g, or t
  misc_feature (489)..(489): n is a, c, g, or t
  misc_feature (491)..(493): n is a, c, g, or t
  misc_feature (495)..(497): n is a, c, g, or t
  misc_feature (504)..(505): n is a, c, g, or t
  misc_feature (511)..(513): n is a, c, g, or t
  misc_feature (518)..(524): n is a, c, g, or t
  misc_feature (534)..(539): n is a, c, g, or t
  misc_feature (542)..(543): n is a, c, g, or t
  misc_feature (545)..(550): n is a, c, g, or t
  misc_feature (554)..(555): n is a, c, g, or t
  misc_feature (557)..(558): n is a, c, g, or t
  misc_feature (560)..(561): n is a, c, g, or t
  misc_feature (566)..(567): n is a, c, g, or t
  misc_feature (570)..(571): n is a, c, g, or t
  misc_feature (573)..(574): n is a, c, g, or t
  misc_feature (577)..(579): n is a, c, g, or t
  misc_feature (582)..(584): n is a, c, g, or t
  misc_feature (586)..(586): n is a, c, g, or t
  misc_feature (588)..(588): n is a, c, g, or t
  misc_feature (593)..(593): n is a, c, g, or t
  misc_feature (595)..(595): n is a, c, g, or t
  misc_feature (597)..(599): n is a, c, g, or t
  misc_feature (603)..(603): n is a, c, g, or t
  misc_feature (608)..(610): n is a, c, g, or t
  misc_feature (613)..(613): n is a, c, g, or t
  misc_feature (616)..(618): n is a, c, g, or t
  misc_feature (621)..(624): n is a, c, g, or t
  misc_feature (626)..(627): n is a, c, g, or t
  misc_feature (631)..(631): n is a, c, g, or t
  misc_feature (635)..(637): n is a, c, g, or t
  misc_feature (639)..(640): n is a, c, g, or t
  misc_feature (642)..(644): n is a, c, g, or t
  misc_feature (646)..(646): n is a, c, g, or t
  misc_feature (648)..(648): n is a, c, g, or t
  misc_feature (650)..(650): n is a, c, g, or t
  misc_feature (652)..(653): n is a, c, g, or t
  misc_feature (655)..(656): n is a, c, g, or t
  misc_feature (658)..(661): n is a, c, g, or t
  misc_feature (664)..(665): n is a, c, g, or t
  misc_feature (667)..(673): n is a, c, g, or t
  misc_feature (679)..(681): n is a, c, g, or t
  misc_feature (683)..(683): n is a, c, g, or t
  misc_feature (685)..(685): n is a, c, g, or t
  misc_feature (687)..(689): n is a, c, g, or t
  misc_feature (692)..(693): n is a, c, g, or t
  misc_feature (695)..(696): n is a, c, g, or t
  misc_feature (698)..(698): n is a, c, g, or t
  misc_feature (700)..(700): n is a, c, g, or t
  misc_feature (702)..(702): n is a, c, g, or t
  misc_feature (704)..(705): n is a, c, g, or t
  misc_feature (707)..(708): n is a, c, g, or t
  misc_feature (711)..(713): n is a, c, g, or t
  misc_feature (715)..(715): n is a, c, g, or t
  misc_feature (718)..(720): n is a, c, g, or t
  misc_feature (722)..(722): n is a, c, g, or t
  misc_feature (724)..(724): n is a, c, g, or t
  misc_feature (727)..(727): n is a, c, g, or t
  misc_feature (730)..(730): n is a, c, g, or t
  misc_feature (732)..(732): n is a, c, g, or t
  misc_feature (734)..(736): n is a, c, g, or t
  misc_feature (738)..(740): n is a, c, g, or t
  misc_feature (743)..(744): n is a, c, g, or t
  misc_feature (746)..(746): n is a, c, g, or t
  misc_feature (751)..(754): n is a, c, g, or t
  misc_feature (756)..(756): n is a, c, g, or t
  misc_feature (758)..(758): n is a, c, g, or t
  misc_feature (763)..(764): n is a, c, g, or t
  misc_feature (766)..(766): n is a, c, g, or t
  misc_feature (768)..(774): n is a, c, g, or t
  misc_feature (776)..(778): n is a, c, g, or t
  misc_feature (782)..(783): n is a, c, g, or t
  misc_feature (786)..(789): n is a, c, g, or t
  misc_feature (792)..(792): n is a, c, g, or t
  misc_feature (795)..(795): n is a, c, g, or t
  misc_feature (800)..(800): n is a, c, g, or t
  misc_feature (802)..(802): n is a, c, g, or t
  misc_feature (805)..(806): n is a, c, g, or t
  misc_feature (808)..(810): n is a, c, g, or t
  misc_feature (813)..(814): n is a, c, g, or t
  misc_feature (817)..(818): n is a, c, g, or t
  misc_feature (821)..(823): n is a, c, g, or t
  misc_feature (826)..(826): n is a, c, g, or t
  misc_feature (829)..(829): n is a, c, g, or t
  misc_feature (831)..(831): n is a, c, g, or t
  misc_feature (833)..(833): n is a, c, g, or t
  misc_feature (836)..(836): n is a, c, g, or t
  misc_feature (842)..(844): n is a, c, g, or t
  misc_feature (846)..(846): n is a, c, g, or t
  misc_feature (850)..(850): n is a, c, g, or t
  misc_feature (852)..(852): n is a, c, g, or t
  misc_feature (860)..(860): n is a, c, g, or t
  misc_feature (863)..(867): n is a, c, g, or t
  misc_feature (873)..(873): n is a, c, g, or t
  misc_feature (875)..(875): n is a, c, g, or t
  misc_feature (877)..(877): n is a, c, g, or t
  misc_feature (886)..(886): n is a, c, g, or t
  misc_feature (888)..(889): n is a, c, g, or t
  misc_feature (891)..(892): n is a, c, g, or t
  misc_feature (894)..(894): n is a, c, g, or t
  misc_feature (897)..(897): n is a, c, g, or t
  misc_feature (900)..(902): n is a, c, g, or t
  misc_feature (907)..(907): n is a, c, g, or t
  misc_feature (909)..(909): n is a, c, g, or t
  misc_feature (913)..(915): n is a, c, g, or t
  misc_feature (918)..(920): n is a, c, g, or t
  misc_feature (927)..(928): n is a, c, g, or t
  misc_feature (931)..(931): n is a, c, g, or t
  misc_feature (939)..(941): n is a, c, g, or t
  misc_feature (947)..(947): n is a, c, g, or t
  misc_feature (949)..(950): n is a, c, g, or t
  misc_feature (952)..(954): n is a, c, g, or t
  misc_feature (956)..(957): n is a, c, g, or t
  misc_feature (959)..(960): n is a, c, g, or t
  misc_feature (1303)..(1304): n is a, c, g, or t
  misc_feature (1307)..(1307): n is a, c, g, or t
  misc_feature (1309)..(1311): n is a, c, g, or t
  misc_feature (1315)..(1316): n is a, c, g, or t
  misc_feature (1319)..(1319): n is a, c, g, or t
  misc_feature (1325)..(1325): n is a, c, g, or t
  misc_feature (1330)..(1331): n is a, c, g, or t
  misc_feature (1366)..(1366): n is a, c, g, or t
  misc_feature (1390)..(1390): n is a, c, g, or t
  misc_feature (1410)..(1410): n is a, c, g, or t
  misc_feature (1424)..(1424): n is a, c, g, or t
  misc_feature (1986)..(1986): n is a, c, g, or t
  misc_feature (1992)..(1992): n is a, c, g, or t
  misc_feature (3569)..(3569): n is a, c, g, or t
ggnntanntgacgngggnggngannnnngnnatgnnnnnngnnngngcgccnggtgncgcgcgcgtnnnggngnggnnncnntgncgnannngncgnnngnnnnnncngnntttnnnanngnattgngnanatnattnaannaantcnnnnnnnancnnttgnnncnnngntngatngntgnnacgnnnnnnanatnnngnttnnnantnngntnnctngnnngncnngnnnnngntcgntnnnntgnnntttnnncnantnannnnnnnnncgnncnncnngnnnnnngnnntgntgnnngnnntnnngcgcgtagncggcgncgncgcnngcgncgnncgnctcntcnntngnttnntcgntngttnnntncgtnnnngnnnnngngnngcnncnnanncgnnnnnaannntcgtngnnngcntgnngnggcgcncgaggancgcgnnnnnganggcnnnnntnannncnannntcnncnnaatcgncnnnannntcgagannatccannngatcnnnnnnntcgtcgcggnnnnnncgnngnnnnnncggnngnnannaccgnngannannatnnngannngnancacgnanannncgangacgnnnatnatnnngannnncnncgtnaacnnncnnannnancntngnncnntnnnngcnncnnnnnnngcgacnnncngnannncgnncnncncncncnncnnccnnncnatnnngncnatngtngncnnngnnnatnncncgaannnncncncaaanncncnnnnnnncnnncgtnncgnnnncancgncgccncngcnncnnncgnngcnntcnnngcngcngntncgncggatnnnanggcncncatcgcgnccnnnnncgcgtntncntcggcgtcnanngnngncancgnnntcgtnancgcnnnggnnntttcgtnngcntcttcctnnncttccncnngnnncnncnngagcgccgcgatggcgttcgccgcgagctccgcgcgccaaacggcgacgtagtgcttgcagtctcggtcgatcgccgcggattcttcagagtacacggcaaactcaatccctctgtccaacataaatccccccaccgcatcgtcgccctctgtttcgtcgtcaccgcccgcatccacatcacgcgcgcgcccgagcgcgcgcaacacgcaccgctcgcacccatccccgcgttcggcgcacgccccgctcctcgcccgcgcgcccgcgcgctccaaccgacacctcgcgctcgcgctcgccgcctcgcaccgcatccccgacgacccaccgacacccaccagnnccncnnncgcnncgncgccgncgccnncgtcgatcaccgccccccacgcgcgcgcgcggcancgttccgcgtccgtcgtcatcgancgcaacgaagaacccgtcgncatccaggcgtcgnctctcgcgtcggcgagcccagaaccagggcgcgatcgcccatcctcgtgcgcgcgcgcgaccgcgatgacgcacgcggtcaacaccgcgcgcgcgacgagagggaccgcgccgcgacgacgcgcgacgttcgccggtttcgtcgtcctccgcggcatcgcgcgggcgtgtggcgcgcgtcgcgcggatcgtcgtcggctctgacgccggttcgtctcccgtcagaccaaccggcgtttgtgtatgtacaaacagtataaaatacttttctttcgagacgaccgaggccaagagaccgttgggccgcggggcgctcgatgcccgatgcgtcgggggattcgcgcgcgtcgtcggcgtccgacggcagttcgcgcgcgaccggcgacgcgggatgacggcggagaccaccgcccgtcgcccggacgcgcgaacgcgggagaacgggcgcccgcgggaacggtcgaggaggaaacgacgccgcgcgcggagtgatgatttcgtggggcgacgctcggaatggacgcgtggacggcgtcgcgggcgacccgcgtgggcggcggtgncggcgntggtggtcgtcgcggtgacgtgtgggacgtggggggagatcgtggagggttcggggacgtgcgcgagcgggtgcggggcggcggagggttgggggagttgcggcgcggaggacgcgtgcgcgtgcgagccgacgagggatgggttggattgcggcgccgcgcgggttgcggcgcacgcgttcgagatcggggatggatctgggatggcgtttgaggcgatcgatggcggtaactctgggatggcgacgacgagcgcgatggtggtggatggggaaacgtacgcggcgatagccgtcgggtggacggatgggtgcgcggacgcgttcgcgagattcgccgacgtcggtgtgagggcttggcgcggtgggacgtggccggagaggggtgcggtagcgatgctgaacgtggaggacgcgacgccgaggggatgggtagggtcttgtgcgcatccgagggcgtccgcgtcgtcgtcggagggatgggctccgtcgcgcggtccgttcctcgtagcggatggtgtgcacgcgtacaccgtcgtgaacgcgtggttacagtcgagcggtgagcttggattcgtcatttcgaaacgacaagcgaacggaggtggcacgcccgaggagcaccacgagaagacgagcgcgggatacactgcagacgcggcggcgattggatcgagcggcgacttgatcgtcttggcgacgccatcagcgacgagctctagagtgaagctgttggtgtatccgagcggtgatattagtactgctggacaaggggcgacggtgaaagaagtggggttgccgacgctggctgcggcgtgttcggcgtgccacgcgagcagggatggggtaaagttgacggcggcggcggcaacagtgattagttcgagcacgagcgtgctcttcgccggtcgagcacgagtttcggcgttgcaagattatcccgccatagttagaatcgatccatactcgcagacgacggcgaatggtgttgagatgtactttaaggatgcctcggctatcgacgaagcatgcgaaggcgcgtctctggcgtcatcttcattgggtagatacaccgcgttcaccgcattggcagtgatggacgagtttgcctacgtcgcgacatctagcgtcacacacgggggtagcgtgtgcggatctgcgtgctctactcgagtctcgtgcttgtacagggtcaggtcggcgtttagcgcgggcgattcagccttggaacacgttcgactgtacggatcgtcgggctcgctagctaaagatgcgatcgcgatcacgacggtgatcgaagaagctacgagcggtggctcagtgtatattttaacgacgtccgattttatggattcatacgcgtcgaccagcatagtcaaagtgagagtcagcggcgactctggctgtggctcgtcgtgcatgacggtgacgggtacgtatttgtcagcgtcaccgatgcagacaatgaccctcgtgccggtgatgggtgcgctgttcactgtctctagagatagtcttggctcgcgagacttttacagaagtctatcgttcactgaaattgagaatgtttctccgacnaagggtcccgtcggcggaggcacacgcattctcatctacggcgtcggatttccgtacgatgctagttggacttctgatggagtgctggcgtacccagcggcgtgtcggttcgagcacgacggtaacccagtttacgtgcacgcagtggtcgtgaactcgacggcgatcgagtgtgtgactccatcttacgccgcattcgcgacgacaggttcgtacgtatccgaagttgccatcagtttcgatggttatcccttggcacagaacgacgtcacgttctttgacgactccacgtgggttggaggacccacatatttcatgtactatgacgttccgcacgttagggagacaaagctcacaaactcgccaatcgagtctgctctatacacgggagaagcgccagacggacaagtcgctgttctagctcttgacgg

SEQ ID NO: 1090 - DNA, 4000 bp, Escherichia coli
  misc_feature (1607)..(1607): n is a, c, g, or t
  misc_feature (1611)..(1611): n is a, c, g, or t
  misc_feature (1776)..(1777): n is a, c, g, or t
  misc_feature (1880)..(1880): n is a, c, g, or t
  misc_feature (1987)..(1990): n is a, c, g, or t
  misc_feature (1994)..(1994): n is a, c, g, or t
tcgcggcggtggtcgtggtggcggcggtggtcgcggcggcggtcgcggcggcggacgcggcggcggcgccaacgcgacgagcatgaactggcaacagcaaagcttctattgagcgcggtgtcacccttttttcaaataaattcgcagtagattacattcttttatccgtcgtgtggactagaaccctattcgactagaaccgtgattgtatcaaacgcctactctcctctctatttcacgcacttctttagatgcctcaggacgtcgccgaccaaatacagactgccagtgacgaggacgttgacgcgcgccggcgccacctctcgcgctcgatgtcgaatgagactgagcgcttgatgaatgctcgaaaccacgacacctcgagtgtcttgagctttttctgcgagcacgttcgcacgtttgacgatgatatcgtcccacgtacgcgcacacctgtcttgccaagaggtcgcctttgcgtccccgcacttgtctaacccgctcgtggtgctatccggcgggctaaaaatagcgcgctctaactgtacgtttgaagtcgtgtggaaaacatccgcgaccggttcgagtaaatcctccggtttgcgatcatccatgcagttgaaaagcatgatgttgtgctccgccgccgtcaccgctcgcgcggtgctcgtaaaccattcggcgctgtggcgcatggattcgatggtgtgcgcgccgtcgagataaaacgtcaagttcatcacatcgggatcgtgcatcacctgcgatcgacccggccacgtcgtcttctctaacccgacgcgaaagctctccggtaactcgtttcgcgcgaacgaagcctccatctcctccgcccacggttggttcgtggcgttcgcccactcccgcaccaactccacggcgacggcggcgttgacgcgttggtgcggtcccgccaaccccacttcgatctcactcccgccctcgtagctgtctaaatctctcgcgacgactaacggcgaaccaacctcggcggcgcgacgctcgagcgcgaccatcgcctcgggtttttgcggcgccgtaaacgttcgcacgcccggcttcatgatccccgccttctccgtcgcgattttccccaaagtatcccctaaaatatccacgtgatccatcccgagcgacgtgatcccgcacgccgccggcgcgcgcaccacgttcgtcgcgtccaggcgcccccccaaccccacctccagcacgcacgcctccacccccgcgctcgagaaaattcgcagccccaacagcgtcaaaaacctaaagtacgccggcatccccagatctccgcaccgcgccgcgatcgcgtcccgcgtccaccaaaactccctcgcgaacgtctcctcgtccaccatcgccccgtcgatccgaaatcgctctcgcacgtccatcaagtgcgggctcgtgaacgtccccacccgcgtcccgctcgccctgagcatcccctccaccatcgcgcacgtcgatcccttccccttcgtccccgccacgtgcaccacgtcgagcgcgtcgacgcgacctcgcaggtccagcctcgagacgtacgtctccagctgcgcgaactgcgcctcccacgtcancgcncccgggtccgcgcgttttttacccgtgatcgtcttcgcgagctcgcgcaccgccgcgtcgtacgcgcggtcgtcgtcgcgcatcgtcgtcgtcgtcgcgaaagtgtcgtcgtcgttcgattcgtttcgtttcgattcgacgcgttcgccgacggcgcgcgcgcgnnttcgacgccgtcgcgcgcgcggattatttttatctcgcgattcgccgcgtcggcgatcgcggcgcggtcgcgcgcgcgcgcgtcgcgcgatcgcgcgcgcggngggcggtcgaggcggcctcgtcgttttatatagcgaaagtgtcgtatttaaggagtctctcgttcgcgtcgagtcacgacccgtcgagagcgtcgtaacaccccggnnnngagngacggcgcgcgcacaccgcgacgcgcgcggtcgcgtcgcgcgcgcgtcgccgcggtcgctcggactcgattccgacgacgcaaagagcgcgatggcgtcgcccgcgcgacggacgcgcgagacggacgacgcgacggtgaacgccatgggtggcgatcgaaacgtgttcgcgtcgcgcgcgtgcgacgcgtgccgcgcgctcgggtcgttcatggtgctcgtcgtgctggcgatcgtcgggctgacgtactacgccacggtggtggtcgtgtacggaccggtggcggcggaggggggggaggacgcgggcttggcgacgggggcgctgtgcgcgtatcacgtcttcgcgttcatgctgctgtggtcgtactttgcgtgcgtgctgacggcgccgggagacgtgccgagggggtggacgccggcgccggaggatcccgaggaggcggcgtcggaggcgaagaagtcgaacagcgaaaagagacggcggttttgtaaaaagtgcgcggcgtggaagccgacgcggacgcaccactgctcggtgtgcaaacgatgcgtgttgaagatggatcatcactgcgtgtgggtcgcgaattgcgtgggggcgtataactataaattttttctgcagtttttggcgtacacgttcttggcgacggtgctggatgcgattttactgttgagcaattttatagatttcttcaaagacgtcgaggagagtcaggctgcgggaagccaaggggcggacgcgaaggtcgatccggcggaaggaacggagttagcggtggtgtttgtgacgtttatagtcaacgtggcgttctcggcgtcgttactgggctttttagtgatgcacggtaacttgatcctgagcaacatgacgacgatcgaaatgtacgaaaagaaaaagacgcttccgtggaagtacgacttgggaaggttcagaaacttcaaggaagtgtttggagagaacgttttcatgtggttcctccccgtgcattcgagctcgcacttggaaaagatgcgcgtgaacacggggatttcagacggggaatgtttagaaggcgccgcgtacgccagggcgtgcgaaagcgcgcaacgagaggcgacgatcgggaatagaaaaggtcgagcgtagatttattggatgcaagcatagatttgtcgagcgcgcgtcgcgtccatggagatgtcgacgtcgcgagcgatacaagtgactagaaagacgaagcgcgggactattgtgtagtatacatgcactcgctactgtctgcgtctttcgctaccctcgcctcggtttgctcatgatttctttcaacatctgccgcctcgccagctctctcggcgcgttcgccgcctctattttcttctccagcgccaacttcttctcgctcaaattctccaacaactcgtatcgcagctgcggcatcgctcgcgagcgtctatcgtaattctcaatcgccgtcttcgcgctcgaactgcgcgtcatccgaagcgcacgtcgacgcattcgtcagtcacccgcgcgccttcgtcgttacgcgtcgccgtcgagtcctcgcgcgcgctcgctcggctcgcaacaccaatcgcacctcatcgccttcaccgcccgctcgagcgtcggcaaatcgctcgtcgcgctcgcctcgctctgtatcgccgcgttcagcgtcgtcgttcgcagcacctccgccgcgtctcgcacgttcgccgccgtcgcgtcgacgcacgcgcgcgcgaacccatcgacgaagtgcgtcccgcgcttcgcgatgaaactcgcgacttcgcccccccccgcgccgtcgccgccgccgacgagcgcgtgcatcgcgccctgcgtcaccgtgtcgctcaccgcggacgccgcggtggagagcgtggacgagagcgcgtccatggcgcgtcgcgatgtcgcgcgcggggcgcgactcgacgcgcgcggcatttcgccgccgtcggcgcgtcatgcgcgccgtcgtctcggcgcgcgcgcgaagcgcgcgaag

SEQ ID NO: 1091 - DNA, 4000 bp, Escherichia coli
  misc_feature (1985)..(1985): n is a, c, g, or t
  misc_feature (1987)..(1987): n is a, c, g, or t
  misc_feature (2422)..(2422): n is a, c, g, or t
  misc_feature (2468)..(4000): n is a, c, g, or t
aagaaaatccaaaggttgatattatactctctagtagcatcaatgatgatttctcaccgatatattctagtgttttagaaaactcaattgaagagcttcctccaactgtaaataatcaatcaaaaattgcttttaatagaacatcccttcaaccaaaaccaagaaacagttcccttccagaaaataataatttaatattaatgaatttagaagatgataaaacttcttctattctttctcaaaccatcgttgaagctccaacccaaacttctgatatgccagaaactctttctactgctatcgttgaaagtaagagtaatgtcggagatttatctcaacatagtataagaattttaaatattgaaaaagaaaatgaaggtaaaaatgagaacaatcaagaaagtcaatgtctttctaaactcgaaaccctttccataaatactaacaaggaacaatcattccttaaagaagatagtatgatatccaatagaaagagtattatttcagacagaaagagtatcagatcaaaaactgatattagccaaatgaatttggaaaatattaaaatgtctcgttccaacatttcattatcttcaagaagattatctatttgtactacatcaactacaaataatacctctttccttacaccaaataatagtaaaagattatctattattaataccagctttaatgatgtatcaatggatagtcttcatccaatggtaggtcatacctcattaatcattccaaatgatacttcttcagaaagaaagagatattcattaaatgcttataagcaaaatcgtaacagtttacgtataccatcaagtacttctatgttaaattcatttaattctactaattctaaacaccatacttccaagattatcaattcaaaaagtcaacattcaattttgaattctgaaaataaattagaaaataataatattaaaaataatgaacctcttatgattttagatgaattgaaggatgataaacaacttcatgtcattaaaccaacttctagtaatctccaattagaagttgtagaaaatagtagtactagtgaaatagaaaatgctcctaaaacagaagataataccgaagttacaccaactgcagttactgaatccaaaataaaaattgaagaattaacaccaacagaaaataaaccaattataacgaaaccagtaagagaacttatatcaccaaaaaacccatatattaaattatttaatggtgtcattgattctaaagcccttaccataacaccaccatttgtaacctttttagaaatgcaaaaaacattaattgatatggatattgattaccgtgtcttgaataattgtttcaagattcgttgtcaaaaaatcttcaataatattgattcaccagaagacttagaagcaatcgctaaagcttcaccagtaatgtctcctcttcatacccctgtaaatacaccatcatccactccatcaccacatctaaatggtaaaaatacaccaattaatagaagtaagaaatctcttagtgatgaagttattactactgctagtccaagagttaaagccattaattctgatcaggtatcttccaaatgttatagtttccattcccatggatctggtaaattaaagtcattagtaaattcaattatatgtgctaaaccatcttcaccaccaaatcaatcacgtggtaatgaccaaaagcgtttattctctcttataaaacgtaaaaaaacgcaatcactcgtaatatttaccatggaaatttgtcgtattaaaaatcgtgatgaactttacattataaaattcaaacgtcgaaagggtgatgtttggctctttagagatctctatcaacaaattatttccagattacccttaagaacttaagtttgtccttttttttaattaaccatatacaaatattacaaatattattttttatttttatttttattattattttttttttttttttantnaaataattaatataatttaaaaaaaataataataataataatataataataataataataggggaaaacaaatatatataaaacaaatatatataaaaggaaaaagaaaaaaaagaaaatattttttattttagttcattcatataaatattttatctttatatatataattttattttaatattaacacaactatctttttttttattattattattattattaagaaaatacaaaaaaaaagtcacaattttaattttcttcaactatttttattactatttcattatttctttatactattcttataatatttattacaaaatcacaatttttctctttaaactaatcaacaaaaaaaaaaaaaaaaaaaaaaaaaaaaaaaaaaaaaaaaaaaaaaaaaaaaaaaaaaaaaaaaaaaaaaaaaaaaaaaanaaaaaaaaaaaaaaattaaaaaaaaaaaaaaaaaaaaaaaaaaaannnnnnnnnnnnnnnnnnnnnnnnnnnnnnnnnnnnnnnnnnnnnnnnnnnnnnnnnnnnnnnnnnnnnnnnnnnnnnnnnnnnnnnnnnnnnnnnnnnnnnnnnnnnnnnnnnnnnnnnnnnnnnnnnnnnnnnnnnnnnnnnnnnnnnnnnnnnnnnnnnnnnnnnnnnnnnnnnnnnnnnnnnnnnnnnnnnnnnnnnnnnnnnnnnnnnnnnnnnnnnnnnnnnnnnnnnnnnnnnnnnnnnnnnnnnnnnnnnnnnnnnnnnnnnnnnnnnnnnnnnnnnnnnnnnnnnnnnnnnnnnnnnnnnnnnnnnnnnnnnnnnnnnnnnnnnnnnnnnnnnnnnnnnnnnnnnnnnnnnnnnnnnnnnnnnnnnnnnnnnnnnnnnnnnnnnnnnnnnnnnnnnnnnnnnnnnnnnnnnnnnnnnnnnnnnnnnnnnnnnnnnnnnnnnnnnnnnnnnnnnnnnnnnnnnnnnnnnnnnnnnnnnnnnnnnnnnnnnnnnnnnnnnnnnnnnnnnnnnnnnnnnnnnnnnnnnnnnnnnnnnnnnnnnnnnnnnnnnnnnnnnnnnnnnnnnnnnnnnnnnnnnnnnnnnnnnnnnnnnnnnnnnnnnnnnnnnnnnnnnnnnnnnnnnnnnnnnnnnnnnnnnnnnnnnnnnnnnnnnnnnnnnnnnnnnnnnnnnnnnnnnnnnnnnnnnnnnnnnnnnnnnnnnnnnnnnnnnnnnnnnnnnnnnnnnnnnnnnnnnnnnnnnnnnnnnnnnnnnnnnnnnnnnnnnnnnnnnnnnnnnnnnnnnnnnnnnnnnnnnnnnnnnnnnnnnnnnnnnnnnnnnnnnnnnnnnnnnnnnnnnnnnnnnnnnnnnnnnnnnnnnnnnnnnnnnnnnnnnnnnnnnnnnnnnnnnnnnnnnnnnnnnnnnnnnnnnnnnnnnnnnnnnnnnnnnnnnnnnnnnnnnnnnnnnnnnnnnnnnnnnnnnnnnnnnnnnnnnnnnnnnnnnnnnnnnnnnnnnnnnnnnnnnnnnnnnnnnnnnnnnnnnnnnnnnnnnnnnnnnnnnnnnnnnnnnnnnnnnnnnnnnnnnnnnnnnnnnnnnnnnnnnnnnnnnnnnnnnnnnnnnnnnnnnnnnnnnnnnnnnnnnnnnnnnnnnnnnnnnnnnnnnnnnnnnnnnnnnnnnnnnnnnnnnnnnnnnnnnnnnnnnnnnnnnnnnnnnnnnnnnnnnnnnnnnnnnnnnnnnnnnnnnnnnnnnnnnnnnnnnnnnnnnnnnnnnnnnnnnnnnnnnnnnnnnnnnnnnnnnnnnnnnnnnnnnnnnnnnnnnnnnnnnnnnnnnnnnnnnnnnnnnnnnnnnnnnnnnnnnnnnnnnnnnnnnnnnnnnnnnnnnnnnnnnnnnnnnnnnnnnnnnnnnnnnnnnnnnnnnnnnnnnnnnnnnnnnnnnnnnnnnnnnnnnnnnnnnnnnnnnnnnnnnnnnnnnnnnnnnnnnnnnnnnnnnnnnnnnnnnnnnnnnnnnnnnnnnnnnnnnnnnnnnnnnnnnnnnnnnnnnnnnnnnnnn

SEQ ID NO: 1092 - DNA, 4000 bp, Escherichia coli
  misc_feature (1289)..(1289): n is a, c, g, or t
  misc_feature (2304)..(2304): n is a, c, g, or t
  misc_feature (2452)..(2452): n is a, c, g, or t
  misc_feature (3297)..(3297): n is a, c, g, or t
  misc_feature (3327)..(3327): n is a, c, g, or t
  misc_feature (3342)..(3342): n is a, c, g, or t
  misc_feature (3381)..(3381): n is a, c, g, or t
  misc_feature (3393)..(3393): n is a, c, g, or t
  misc_feature (3434)..(3434): n is a, c, g, or t
  misc_feature (3479)..(3479): n is a, c, g, or t
  misc_feature (3483)..(3483): n is a, c, g, or t
  misc_feature (3765)..(3765): n is a, c, g, or t
ttgcattatgtctcttgttctccatatagagttccaattgcaagattatctgctgcccaagcaagcataagagccaaaaaataaatcgattcttataaatttaagataaattcttaactaacagaactacacataggccaggtatgtagtttgtttaaaaatcgttgatttacttgggtatttaagaatctttattaagaatgaaggcttttccttgtcaaaaaaacatttacaggaaagcctaaattaaatagtttcgcccctaattaacttaacaacaagtaaaacaaatgaaaactatactagcaacaatcgtaagtatgttcttattcgtatcttttgcaaatgctcaagctaaatcttgcgctgatttaatcaaaggttacgatgcagcagtaaaaacagcaaaattagatgcagcagcaactaaaaaagctggtgatcttagaaaagcagctggtgatgcactagcagctaaaaaagaagctgattgcgttaaatcaatcaacgccgcttctgctgttctagctccggctaagaagtaagcatttttttttaaagtgctaacttctggttagcactttaaaaatccccctcctctaaaattactcaaaatagaagtttttcactaagtttttaaaaagttattaaaaattacaaatccatttcgtctataagatagtattttttgtagattaggttaaatatattttatgagccctacgttagttcaaagtatagctttaataatatttgttgtagcaattcttcatacattttctgtaaaattttttaaatctctagctcagaaatttccaaggcatcataatatttttgatatgttgggagaggttgaaattgtttttggattttgggctatagttttggttttaattatattctttttactaggaaaaactgaaacagttaattatttaaataaccaaagttatgttgagccattatttgtttttgtaataatggtaatagcagctagtaagccgattttagatttttcattatcttgtgttaaaaaaatatcagcattgttacctgttaataaatctttaagtctttttttaattacaatgtcttttgtgcctttgttgggttcatttataacagagcctgcagcaatgactttgggggcattaattttaagagatcatttttactcaaaaaaaatttcaaataaatttaaatatggaatcattggaactttatttgtaaatgtaagcataggtggagctatgacaccatttgctgcgcctcccattcttatggttgcngctaaatggaattgggatttaaatttcatgattaatacttttgcgtggaggactgcacttgccgtttttgtaaatagtataattcttacttttctttttagaaatgaacttactaaattaggagaatctaagattaaaacaattaaaattccgtcttttgttttgattctacatttaattttacttttaggagtaatcttttttgttcatgatttaataatttttcttggaatttttttaatatttttagcggttgtaaatgcctttaatcaatatcaagataagctgattattaatcaagcttttctagtttcgttatttttagcaggattagtggttttaggaggacaacaaaaatggtggcttcaaacagttcttgctaaattaaccccagatcagatttactatgttgcaacagccttaacagctgttacagataatgctgctcttacttatttagcctcgcttgttgatggcctttcagaccaattcaagtacgcaattgcagcaggagcaattactggtggaggattaactgtaattgcaaacgctcctaaccctgcaggttattcaattttaaataaaaaattctctggaggtatcgttagtcctttgtatttgtttttatccgctttgggacctacgattgttgcaattatttgttataaaattatataaatagcggaataatttttcgtaaacttattattataataagacagccaacaactgttaaaatcattttaatactcatttttgaggtagcttttgcagcgtaaggagctattaaaaaaccaccaattataagcccagctaacgcttcccagtctgtaattttaactaaaaatacaaaagtagttgctgatgctaaattaataaaaaattcggaagcattaacagttccaataactttttttggcaacatttttccacctaataaacttgttgtaacaacaggaccccagccacctccaccagcgccatccacaaatccaccggttaccgcaagaggaanaacagctgaatttttttgtttaaattgtaattttatttttgaataggcttttgcaattagaaatattcccatgaagaataaataaatagaaattacgattgataaatagggaattttaactttagttattactaaagctccaagaatngccccaacgatcccaggtatcagaagttttttaaataattttgtatcaacatttccaattttccagtgatttaatcctgacgatcctgagacaaaaatttcagctatatgaatataagcgaccgctttaacaggagagattccgtagcctaataaaaaagctgtacctgtcacaccataagccattcctaaactaccatcgattaatgcagcaatcgatccaaacaataaagcccagaaaaataaatcactgttaaaaggagtggggtctattcctcgataataggttagcattgctattgctgagataactaataaaccaaataaaattttaaatactttattactcattatataaatttattatttttcaaataatgttattagttaataacaatgtttcaagtgttagataaatttaaacaaccaatatttgtgcttattgcaggttctattctacttgcccttgcatttgggattagacactcctttggaatatttttaattcctattagtgaaaagaatgagtggggcagagaagtgtttgcaatgggtcttgcttttcaaaatttaatgtggggaatttggcaaccttttaccggtagaatttctgacaagataggttctggtgttgtcgtatttgtcggcagcattctttattcattaggtttatttttaatgggatctctttcaacaaaaacaggatttattattgcatcaggaattttaggaattggaatatcaggagttacatttccaatttttggagcaattagcaggtctgtaacgccagagaaaagaagcatttcaattggaattgcaatgtcgagcgcatcccttggacantttataatgttgcctgcatctttagtgttnttgcaaaactttggnccaactttagcctttggtattttatctgttttcacactngtaatgttagtnctcgccgttcctatgtttgaaaagccaattcaacaaacagntgctcaagatttgtcattaagagaaatattaacagaagcttttanccanaaaggattttggctgttatgcattggattctttgtatgtggctttcatattctttttattatgactcatgcgccggcattcttaattgatagaggtctatcaccgcaaatagggactattgtattagctttaataggactatttaatatttttggaacttattacgcaggatttttaggaggtaagattagaaaacctttactcttaagttctatttatgcatcacgtgcagtgattattttaatttttattttatttcctgttacaaatttaacagcctanatatttgctgctttaatgggagtgctttggctttcaacaattccactaactcaaggaacaatcacaacagtttttggtgttaaaaatatgagcatgctctatggaattgcttttttatttcatcaagtgggagcttttttaggtggttggttggggggcaaagtttatgatgtgacaggctcttatgatattgtttggtatatttcaattgcacttggagtatttggggcaatta

SEQ ID NO: 1093 - DNA, 4000 bp, Escherichia coli
  misc_feature (704)..(704): n is a, c, g, or t
  misc_feature (3402)..(3402): n is a, c, g, or t
  misc_feature (3924)..(3924): n is a, c, g, or t
  misc_feature (3962)..(3962): n is a, c, g, or t
gttaccttgaacaacatataaaatttagccatcaaacaataattgatgaagttgctagtgtgttgccagaagagcgtatctatgaaacatggaagggcgaaaaaatccttaatggacttggattctcagatgaagaaatgttacaagatccaaatttgttttctggaggataccaagttaaagtaaatcttgcaaagttactactcctggaacctaatttattattacttgatgaacctacaaattatcttgatatacattccattagatggcttaaaaaatttctaaaagactggaatgaagaactcatactcataacgcatgatagaaatttcatggatagtattatcactcacacacttaatattcatcgtggtaattttagaaaatttccaggtaatacaaagaagattaaggagcaaattttgcaagaagaagaaatttatgaaaaaacacgtatcaatcaggagagagaaagagaaaaaactcaggcttggatcgacaggtttaagtcaaaagctacacttgctagcagagctcaatcaagagcaaaaatgttagaaaaaatggaagtcaaagagaagctccaagcaattgtaaatctagattttaatttcaactatcttaactataatagtaagcaaaacctcatgaaagtaacagatattagttttggttatgatccaaataaaatactaattaanaatttatctttcaatgttcagaaaggagataaaatttgtataattggtaaaaatggtaaaggtaaatcaactcttttaaaattactctctcaagaaatcgatgttctaaatggagagattaatattcatgaaaaagtcgaaattgggtattttggtcaaatgaatatagatagattgaataatgataattcaatctatgaggagatccaatctgttgatccatcaataccggagacaaaagtaagaacaatatgcgctcatatgatgtttcccgggaaggcttctaataaaaaaattggaatactctcagggggtgaaagaagtcgtgttacattaggaagaatattattaaatcctgttaatctgttatttttagatgagcctacaaatcacctagatatggagtctacggaaacactcatggaggcagtccaaagatttgaaggttcagtaataatggttacccatgacgaatatttcttaaataaaattgcaaataaattaattatctatgatgaaggtaaggctttcttttataatggcaactatagagattttcaaaaaaaaattgggtggaaagatatttaaattaatacaaatacttaatttgttttggcggagggggagggattcgaacccccgaacgagttgccccgttgccggttttcaagaccggtgctttcaaccactcagccacccctccggcatttttgattatacaatcaaaaaatatacaaatatcattatcaaataaaatctatatttaaaagtcttaaatttatcatcatttaaataaaatataaatttggaaaaattattttaattatcacatcatcagttttgttatgtaataataaagttttatgtatgaaaggatagaatatgcctaaaatgcttataactgtaaatatatcgaaaggttttaaaacctggactgatatggcaaagtcacttgaagacgaagctggcgctaatggggcgaaaattatatgggctggaacaaacccagacgagtcgtctgtttatgtaatgatggatgttcctgatccagagtttatgcaaacatttggcttgcgtcccgatatcaaaaaagcccgtgaagaggccggtgctgatgttgcttcaacaactgtaataactcctataggtgattattggctgggttagtttgatatatgatcaaaagtccgttaagatatccaggtggaaaatcacgcgccattaatttcataggtaagtttattcctaacttttttaaaacttatagagaaccattttttggtgggggctctctaggtttccatgtatatcaaaactcattaaccaaccataaaacagataaaaaacaaaaaggaaatttaatatgactgtgccttatccaaatacaaaactttatattgctggcaattgggtagatgccatcggaggtgaaaccattgatgtcatgaaccctgtaaccggaaaaccgattggaaatgtcgcacatgctagaattgcagatctcgaccttgcaatagatgctgcacaatcagggtttaaggtttggaaagaaacctcagcatataaccgttacaaaatgatgcggaatgctgctatgaatttaagagatcgtattgatgaagttgcagatattttaactcaagaacagggtaaacctctggcacaatcaaaagccgaaactaatcttgccatagatatcattgattggtttgctgaagagggtaggagaacctatggtaggattatacctgcacgtatagatggagttcaacaaatggtagtaaaagagccagtaggacctgtagcaggctttacaccatggaatttcccactgaatcagagtgttagaaaaatttctgctgcaattgctgccggttgttcaattataataaaagcagcagaagaaacacccgcaagtactgccgcattagtaaagtgtttcgcagatgctgaaattccagctggtgtaataaatctcgtatatggaatcccatcagagatatcggaatatttaataccacaccctattataaaaaaagtaacctttaccggttcaactgccgtagggaagcagttggctgcattagctggtgctcatatgaaaaaggtaacaatggaacttggaggacacgctccagctattgtttgtgaagatgcaaatatagacacagcactcaaagtacttgttgaaaataaatatcgaaatgcaggtcaagtctgtgtttcacctactcgttttatagtccatgaaaaatgttttaatgaatttgtgaaacgatttactgaaatggtaaaaaatataaaagttggtaatggcttagacccagaaacacagatgggtcctcttgctcacgatagaagagttgaatctgtagaatcatttgtaacagatgcggtaaataaaggggcaaaaatagaaaccggtggaaatagaattggtaatgaaggatattttttcgaacctaccgttctcactgaagtctcattagatactagaataatgaatgaagaaccttttggacccatagcaccaataattccatttaaagattttgatgaggcaattgaagaagcaaatcgtctcaattatggacttgctgcatatgcatatagtacatctgccgattcaatcagagaactcggttctagaattgaaagcggtatgatctctattaatcatcatggaatagcactaatngagacaccgtttggcggtatcaaagattcaggatatggttctgaaggaggtttggaagcaattgaaggttatatgaatactaagtttattactcaaaagtctttttaacttatagtttattttgataagcaaaatttctatactttaaacagattaattataatattttaacccttactttgaaataagtcttttgctaatgatcatatgtgtgttattgagatatatctcaatcacatagaaaaccatcactaatgaaagactttaacgaaatgggacttcctgagtccctaacacacacccttaatcatttaaaatttgataaaccaacccaaatacaatccattgctatccctatagcattggaaggaaaagatattttaggatctgcgcaaactggtacaggtaaaaccgctgcttttgcaattccattaattgttaatttatataataagcccacaagtaaggctttagtcatggcacctacacgtgagttagctacacaggtaatgagccaattcncttcattgctcggtagaaaaactaaaatcaaaagtgcnttactaatcggtggtgactcaatgtttaaacaattaaa

SEQ ID NO: 1094 - DNA, 4000 bp, Escherichia coli
  misc_feature (6)..(6): n is a, c, g, or t
  misc_feature (8)..(8): n is a, c, g, or t
  misc_feature (10)..(10): n is a, c, g, or t
  misc_feature (14)..(14): n is a, c, g, or t
  misc_feature (18)..(18): n is a, c, g, or t
  misc_feature (20)..(22): n is a, c, g, or t
  misc_feature (28)..(29): n is a, c, g, or t
  misc_feature (33)..(33): n is a, c, g, or t
  misc_feature (38)..(40): n is a, c, g, or t
  misc_feature (42)..(42): n is a, c, g, or t
  misc_feature (46)..(46): n is a, c, g, or t
  misc_feature (49)..(49): n is a, c, g, or t
  misc_feature (51)..(51): n is a, c, g, or t
  misc_feature (54)..(54): n is a, c, g, or t
  misc_feature (58)..(59): n is a, c, g, or t
  misc_feature (61)..(61): n is a, c, g, or t
  misc_feature (63)..(63): n is a, c, g, or t
  misc_feature (65)..(65): n is a, c, g, or t
  misc_feature (69)..(70): n is a, c, g, or t
  misc_feature (75)..(75): n is a, c, g, or t
  misc_feature (78)..(78): n is a, c, g, or t
  misc_feature (80)..(80): n is a, c, g, or t
  misc_feature (82)..(82): n is a, c, g, or t
  misc_feature (90)..(90): n is a, c, g, or t
  misc_feature (93)..(93): n is a, c, g, or t
  misc_feature (95)..(97): n is a, c, g, or t
  misc_feature (99)..(99): n is a, c, g, or t
  misc_feature (106)..(106): n is a, c, g, or t
  misc_feature (108)..(108): n is a, c, g, or t
  misc_feature (111)..(111): n is a, c, g, or t
  misc_feature (115)..(116): n is a, c, g, or t
  misc_feature (118)..(118): n is a, c, g, or t
  misc_feature (120)..(122): n is a, c, g, or t
  misc_feature (124)..(124): n is a, c, g, or t
  misc_feature (126)..(126): n is a, c, g, or t
  misc_feature (128)..(128): n is a, c, g, or t
  misc_feature (132)..(135): n is a, c, g, or t
  misc_feature (137)..(137): n is a, c, g, or t
  misc_feature (141)..(141): n is a, c, g, or t
  misc_feature (147)..(148): n is a, c, g, or t
  misc_feature (151)..(151): n is a, c, g, or t
  misc_feature (154)..(157): n is a, c, g, or t
  misc_feature (159)..(159): n is a, c, g, or t
  misc_feature (161)..(161): n is a, c, g, or t
  misc_feature (163)..(164): n is a, c, g, or t
  misc_feature (167)..(167): n is a, c, g, or t
  misc_feature (169)..(170): n is a, c, g, or t
  misc_feature (172)..(173): n is a, c, g, or t
  misc_feature (180)..(181): n is a, c, g, or t
  misc_feature (183)..(185): n is a, c, g, or t
  misc_feature (188)..(188): n is a, c, g, or t
  misc_feature (190)..(190): n is a, c, g, or t
  misc_feature (192)..(192): n is a, c, g, or t
  misc_feature (194)..(194): n is a, c, g, or t
  misc_feature (196)..(196): n is a, c, g, or t
  misc_feature (201)..(201): n is a, c, g, or t
  misc_feature (204)..(204): n is a, c, g, or t
  misc_feature (207)..(207): n is a, c, g, or t
  misc_feature (209)..(209): n is a, c, g, or t
  misc_feature (212)..(212): n is a, c, g, or t
  misc_feature (222)..(223): n is a, c, g, or t
  misc_feature (225)..(225): n is a, c, g, or t
  misc_feature (228)..(228): n is a, c, g, or t
  misc_feature (230)..(230): n is a, c, g, or t
  misc_feature (233)..(233): n is a, c, g, or t
  misc_feature (236)..(246): n is a, c, g, or t
  misc_feature (250)..(250): n is a, c, g, or t
  misc_feature (254)..(254): n is a, c, g, or t
  misc_feature (259)..(259): n is a, c, g, or t
  misc_feature (262)..(262): n is a, c, g, or t
  misc_feature (264)..(269): n is a, c, g, or t
  misc_feature (272)..(272): n is a, c, g, or t
  misc_feature (275)..(275): n is a, c, g, or t
  misc_feature (277)..(278): n is a, c, g, or t
  misc_feature (280)..(286): n is a, c, g, or t
  misc_feature (292)..(293): n is a, c, g, or t
  misc_feature (295)..(295): n is a, c, g, or t
  misc_feature (297)..(297): n is a, c, g, or t
  misc_feature (304)..(307): n is a, c, g, or t
  misc_feature (310)..(310): n is a, c, g, or t
  misc_feature (314)..(314): n is a, c, g, or t
  misc_feature (316)..(316): n is a, c, g, or t
  misc_feature (321)..(324): n is a, c, g, or t
  misc_feature (327)..(327): n is a, c, g, or t
  misc_feature (330)..(330): n is a, c, g, or t
  misc_feature (332)..(332): n is a, c, g, or t
  misc_feature (334)..(335): n is a, c, g, or t
  misc_feature (340)..(340): n is a, c, g, or t
  misc_feature (343)..(343): n is a, c, g, or t
  misc_feature (350)..(353): n is a, c, g, or t
  misc_feature (359)..(359): n is a, c, g, or t
  misc_feature (362)..(362): n is a, c, g, or t
  misc_feature (366)..(368): n is a, c, g, or t
  misc_feature (372)..(372): n is a, c, g, or t
  misc_feature (376)..(376): n is a, c, g, or t
  misc_feature (381)..(381): n is a, c, g, or t
  misc_feature (385)..(386): n is a, c, g, or t
  misc_feature (388)..(388): n is a, c, g, or t
  misc_feature (390)..(395): n is a, c, g, or t
  misc_feature (397)..(398): n is a, c, g, or t
  misc_feature (401)..(401): n is a, c, g, or t
  misc_feature (403)..(404): n is a, c, g, or t
  misc_feature (406)..(412): n is a, c, g, or t
  misc_feature (415)..(421): n is a, c, g, or t
  misc_feature (423)..(423): n is a, c, g, or t
  misc_feature (426)..(426): n is a, c, g, or t
  misc_feature (429)..(434): n is a, c, g, or t
  misc_feature (436)..(436): n is a, c, g, or t
  misc_feature (438)..(442): n is a, c, g, or t
  misc_feature (445)..(445): n is a, c, g, or t
  misc_feature (447)..(453): n is a, c, g, or t
  misc_feature (456)..(456): n is a, c, g, or t
  misc_feature (458)..(458): n is a, c, g, or t
  misc_feature (460)..(462): n is a, c, g, or t
  misc_feature (466)..(467): n is a, c, g, or t
  misc_feature (469)..(469): n is a, c, g, or t
  misc_feature (475)..(479): n is a, c, g, or t
  misc_feature (493)..(494): n is a, c, g, or t
  misc_feature (496)..(496): n is a, c, g, or t
  misc_feature (498)..(498): n is a, c, g, or t
  misc_feature (502)..(502): n is a, c, g, or t
  misc_feature (504)..(507): n is a, c, g, or t
  misc_feature (511)..(521): n is a, c, g, or t
  misc_feature (523)..(525): n is a, c, g, or t
  misc_feature (527)..(527): n is a, c, g, or t
  misc_feature (529)..(530): n is a, c, g, or t
  misc_feature (532)..(532): n is a, c, g, or t
  misc_feature (1991)..(1991): n is a, c, g, or t
  misc_feature (2525)..(2525): n is a, c, g, or t
  misc_feature (2529)..(2529): n is a, c, g, or t
  misc_feature (2533)..(2533): n is a, c, g, or t
  misc_feature (2535)..(2535): n is a, c, g, or t
  misc_feature (2537)..(2538): n is a, c, g, or t
  misc_feature (2540)..(2541): n is a, c, g, or t
  misc_feature (2545)..(2545): n is a, c, g, or t
  misc_feature (2550)..(2552): n is a, c, g, or t
  misc_feature (2560)..(2560): n is a, c, g, or t
  misc_feature (2638)..(2638): n is a, c, g, or t
  misc_feature (2641)..(2641): n is a, c, g, or t
  misc_feature (2644)..(2644): n is a, c, g, or t
  misc_feature (2663)..(2664): n is a, c, g, or t
  misc_feature (2669)..(2669): n is a, c, g, or t
  misc_feature (2672)..(2672): n is a, c, g, or t
  misc_feature (2679)..(2679): n is a, c, g, or t
  misc_feature (2704)..(2704): n is a, c, g, or t
  misc_feature (2708)..(2709): n is a, c, g, or t
  misc_feature (2715)..(2715): n is a, c, g, or t
  misc_feature (2734)..(2736): n is a, c, g, or t
  misc_feature (2741)..(2741): n is a, c, g, or t
  misc_feature (2754)..(2754): n is a, c, g, or t
  misc_feature (2757)..(2757): n is a, c, g, or t
  misc_feature (2760)..(2760): n is a, c, g, or t
  misc_feature (2762)..(2763): n is a, c, g, or t
  misc_feature (2765)..(2765): n is a, c, g, or t
  misc_feature (2779)..(2780): n is a, c, g, or t
  misc_feature (2789)..(2789): n is a, c, g, or t
  misc_feature (2791)..(2792): n is a, c, g, or t
  misc_feature (2797)..(2797): n is a, c, g, or t
  misc_feature (2806)..(2807): n is a, c, g, or t
  misc_feature (2818)..(2818): n is a, c, g, or t
  misc_feature (2820)..(2820): n is a, c, g, or t
  misc_feature (2822)..(2822): n is a, c, g, or t
  misc_feature (2825)..(2825): n is a, c, g, or t
  misc_feature (2828)..(2828): n is a, c, g, or t
  misc_feature (2831)..(2831): n is a, c, g, or t
  misc_feature (2833)..(2833): n is a, c, g, or t
  misc_feature (2838)..(2838): n is a, c, g, or t
  misc_feature (2845)..(2845): n is a, c, g, or t
  misc_feature (2852)..(2853): n is a, c, g, or t
  misc_feature (2856)..(2856): n is a, c, g, or t
  misc_feature (2862)..(2862): n is a, c, g, or t
  misc_feature (2866)..(2866): n is a, c, g, or t
  misc_feature (2868)..(2868): n is a, c, g, or t
  misc_feature (2870)..(2871): n is a, c, g, or t
  misc_feature (2873)..(2874): n is a, c, g, or t
  misc_feature (2876)..(2876): n is a, c, g, or t
  misc_feature (2879)..(2879): n is a, c, g, or t
  misc_feature (2881)..(2881): n is a, c, g, or t
  misc_feature (2883)..(2883): n is a, c, g, or t
  misc_feature (2889)..(2889): n is a, c, g, or t
  misc_feature (2892)..(2894): n is a, c, g, or t
  misc_feature (2896)..(2897): n is a, c, g, or t
  misc_feature (2901)..(2901): n is a, c, g, or t
  misc_feature (2910)..(2910): n is a, c, g, or t
  misc_feature (2913)..(2913): n is a, c, g, or t
  misc_feature (2916)..(2916): n is a, c, g, or t
  misc_feature (2920)..(2920): n is a, c, g, or t
  misc_feature (2922)..(2922): n is a, c, g, or t
  misc_feature (2924)..(2924): n is a, c, g, or t
  misc_feature (2927)..(2927): n is a, c, g, or t
  misc_feature (2931)..(2931): n is a, c, g, or t
  misc_feature (2936)..(2936): n is a, c, g, or t
  misc_feature (2940)..(2940): n is a, c, g, or t
  misc_feature (2943)..(2943): n is a, c, g, or t
  misc_feature (2952)..(2952): n is a, c, g, or t
  misc_feature (2957)..(2958): n is a, c, g, or t
  misc_feature (2960)..(2964): n is a, c, g, or t
  misc_feature (2966)..(2966): n is a, c, g, or t
  misc_feature (2968)..(2974): n is a, c, g, or t
  misc_feature (2976)..(2976): n is a, c, g, or t
  misc_feature (2978)..(2978): n is a, c, g, or t
  misc_feature (2980)..(2980): n is a, c, g, or t
  misc_feature (2982)..(2985): n is a, c, g, or t
  misc_feature (2987)..(2987): n is a, c, g, or t
  misc_feature (2989)..(2989): n is a, c, g, or t
  misc_feature (2991)..(2992): n is a, c, g, or t
  misc_feature (2994)..(2995): n is a, c, g, or t
  misc_feature (2997)..(2998): n is a, c, g, or t
  misc_feature (3001)..(3005): n is a, c, g, or t
  misc_feature (3007)..(3007): n is a, c, g, or t
  misc_feature (3009)..(3012): n is a, c, g, or t
  misc_feature (3016)..(3016): n is a, c, g, or t
  misc_feature (3018)..(3021): n is a, c, g, or t
  misc_feature (3023)..(3024): n is a, c, g, or t
  misc_feature (3026)..(3030): n is a, c, g, or t
  misc_feature (3032)..(3034): n is a, c, g, or t
  misc_feature (3036)..(3041): n is a, c, g, or t
  misc_feature (3043)..(3045): n is a, c, g, or t
  misc_feature (3047)..(3048): n is a, c, g, or t
  misc_feature (3052)..(3052): n is a, c, g, or t
  misc_feature (3055)..(3056): n is a, c, g, or t
  misc_feature (3058)..(3060): n is a, c, g, or t
  misc_feature (3063)..(3063): n is a, c, g, or t
  misc_feature (3065)..(3069): n is a, c, g, or t
  misc_feature (3074)..(3074): n is a, c, g, or t
  misc_feature (3076)..(3076): n is a, c, g, or t
  misc_feature (3078)..(3083): n is a, c, g, or t
  misc_feature (3085)..(3086): n is a, c, g, or t
  misc_feature (3088)..(3089): n is a, c, g, or t
  misc_feature (3092)..(3096): n is a, c, g, or t
  misc_feature (3098)..(3108): n is a, c, g, or t
  misc_feature (3110)..(3111): n is a, c, g, or t
  misc_feature (3113)..(3115): n is a, c, g, or t
  misc_feature (3117)..(3119): n is a, c, g, or t
  misc_feature (3123)..(3128): n is a, c, g, or t
  misc_feature (3130)..(3130): n is a, c, g, or t
  misc_feature (3136)..(3136): n is a, c, g, or t
  misc_feature (3138)..(3143): n is a, c, g, or t
  misc_feature (3145)..(3146): n is a, c, g, or t
  misc_feature (3148)..(3151): n is a, c, g, or t
  misc_feature (3153)..(3154): n is a, c, g, or t
  misc_feature (3156)..(3156): n is a, c, g, or t
  misc_feature (3158)..(3159): n is a, c, g, or t
  misc_feature (3162)..(3162): n is a, c, g, or t
  misc_feature (3165)..(3169): n is a, c, g, or t
  misc_feature (3172)..(3176): n is a, c, g, or t
  misc_feature (3178)..(3178): n is a, c, g, or t
  misc_feature (3180)..(3180): n is a, c, g, or t
  misc_feature (3182)..(3187): n is a, c, g, or t
  misc_feature (3189)..(3191): n is a, c, g, or t
  misc_feature (3194)..(3195): n is a, c, g, or t
  misc_feature (3197)..(3197): n is a, c, g, or t
  misc_feature (3199)..(3200): n is a, c, g, or t
  misc_feature (3203)..(3203): n is a, c, g, or t
  misc_feature (3207)..(3208): n is a, c, g, or t
  misc_feature (3213)..(3213): n is a, c, g, or t
  misc_feature (3216)..(3217): n is a, c, g, or t
  misc_feature (3219)..(3219): n is a, c, g, or t
  misc_feature (3222)..(3223): n is a, c, g, or t
  misc_feature (3229)..(3234): n is a, c, g, or t
  misc_feature (3241)..(3241): n is a, c, g, or t
  misc_feature (3246)..(3247): n is a, c, g, or t
  misc_feature (3249)..(3250): n is a, c, g, or t
  misc_feature (3253)..(3253): n is a, c, g, or t
  misc_feature (3262)..(3262): n is a, c, g, or t
  misc_feature (3265)..(3266): n is a, c, g, or t
  misc_feature (3268)..(3268): n is a, c, g, or t
  misc_feature (3270)..(3271): n is a, c, g, or t
  misc_feature (3289)..(4000): n is a, c, g, or t
ggatgncnangtgnaggngnnnagggannaggnggatnnncngcanaancnagnggannangngnaggnncaggnganangngaaaaggnggntnnncngcaatancnagnggannangnnnangngnaggnnnnangggnaaaggnnganggnnnngnantnnagnannannatggggnnannnaantnangntnataanggnganantgntaaaccaaanncnccntntgntannnnnnnnnnnaatngtanaccanaancnnnnnntanacnannannnnnnncaagtnnancnaatgaannnnaanatcntngagannnngangantntnntccanatncaccaannnncccatntcnaccnnntacnccancaagnccannancnnnnnnanntcnannannnnnnncannnnnnncnaangannnnnnanannnnnganannnnnnngantntnnnccanntncaccannnnncccatgtcaacctnntncnccancnnnnccannnnnnnnnnnannncnannanaaggtgaagaatgtggtccagattcaccaaatggcccatgtcaacctgatactccaccaagtccaccatccccaccatctccaccatatgaaggtgaagaccaaggagagggtgaagaatgtggaccaaattcaccaaatggtccatgtgaacctgatgttccttcttctccacctaatgatgatgttcaaggaaatgaccaaggtgaaaaccaaggagaaggtgaagaatgtggaccaaattcaccaaatggtccatgtgaacctgatgttccttccaccttaccatgcgatccaacatctgatccaaattgcttaccaattccttcatgtgatccatctgttgatccaagttgtggaaatgatgatccatacaacgatccagccgatgaaccagccgaagtttctgataatgaaaatgaaggaattgatgtaggtgaagttgatgaagttaatgataataatgatattgctaatgaatctgatattgaataaaaatatgatttaattaatatgaagataatatataaaaaataaattagcaataaatatagattttagtagagataaaaaaataaaaataatataacatttacttatttaattaatatttttatttttattttattgtcctctatattgttaaaatcaattttttgattgattttaaaaatgtaatttataaaagaaaaatataaataaatatttacttaaatataatattggttaattgtttttttattgttataatatgaaaaattacaaaatagaaattgtaaaaatttataaaaaacagtatatatttcatttatgaaaaaaatatattttaaattttatttttaaaaaaaatatatttaaaatatccataagttatataataaacaatgagtttaaatttatggaagtaaataaatttagcataagaaaaaccaatactaaatttattataaaattactcaataatagcttaaataatttaatataaaaatatttaagaattatgattaatagatctagaaacagatatttataaagaaattatatatggtaatacattttggtttcaagctcaaaatttgaaatattttagattttaaaataacagctttaattaaggtttgtaacattaatccgctagtttttataaaatatttaatagatcatgacgctgatattaataaagaaaataaaaatggtgatataacattaattaaagtaagtcataatgaaaatagttctattattaagtatttgattgaacatagatcagacttagctaaaggaaataaaaatgaggaaataaaaatgaggaaataaaaatggggatataccaacttaatattacatataaaataaaaaaaataaatgaataaataaatgaataaacaagcaaataaatagtaaagaaatatattgatgaaactttttttttttttttttttttttttttaaacatttanatattaatattgtagtattttattcttaacaaaaaatactacatatattaatatctaacttttattatattaaaattaaatatttttatgtgttattatttagttaaagtctcagaatgatagtatatactttcttattgttattatataagtaaataatattataattgaatattataaattaatatagactacataaatatatgtaatgtaattacattgtggcaacgaatgtggtgcatttcgccaatttttataatacaaaatttcaatacgccatttatttttaatggcttgtaaaattttttgttaacgtcataaaaatttttaatacaattatatgtaaaaaaataaatgtataaataaataaataaataaagaatgtaataatattagtaaataaaataaaataaaataaaataaatagtataatatgaatatagagtacagattgaattaaataaaataaaataaaataaaataaaataaaataaaataaaataaaataaaataaaataaaataaaataaaatanatantatnanannannatanagtannnattgaatnaaataaaataaaataaaataaaataaaataaaataaaataaaataaaataaaataaaataaaataaaatagaataaantanaanataagaaaatagaataaannaaganaanaataaanaaaaaaaaaatttaataaaacatantaanntaaaanaaaaattattaaagaaaannntattnaagaagaagaatntanaantnnanaaaataagagaaannaatataatnannatttnataaaacanntattaaattantnanaanaanaananaaatnttgatantaaagannatntatganttanantnnannantcnananaggtanatnnngnngaanaattaaaanatntantaantncnatnacantactnaaanaanttttaaagnaaatnntnnnnnanannnnnnntnantnannnntnantnntnnanncannnnnantnnnngaantnnnnannannnnnannntnnnnnntnnnannacantannannnttnannnnntatanantnnnnnntnnannaannnnntnnnnnnnnnnntnnannngnnnaaannnnnnanaaaaanannnnnnannannnnannanannaanaannnnnaannnnnananannnnnnannnaannanannaanaatnnaaatnttnnanaannaaaaannnnnnaaaaaanaaaannannaanaaaaaaaanaannanannaaaaaaaaataactatannnnnnnnnnnnnnnnnnnnnnnnnnnnnnnnnnnnnnnnnnnnnnnnnnnnnnnnnnnnnnnnnnnnnnnnnnnnnnnnnnnnnnnnnnnnnnnnnnnnnnnnnnnnnnnnnnnnnnnnnnnnnnnnnnnnnnnnnnnnnnnnnnnnnnnnnnnnnnnnnnnnnnnnnnnnnnnnnnnnnnnnnnnnnnnnnnnnnnnnnnnnnnnnnnnnnnnnnnnnnnnnnnnnnnnnnnnnnnnnnnnnnnnnnnnnnnnnnnnnnnnnnnnnnnnnnnnnnnnnnnnnnnnnnnnnnnnnnnnnnnnnnnnnnnnnnnnnnnnnnnnnnnnnnnnnnnnnnnnnnnnnnnnnnnnnnnnnnnnnnnnnnnnnnnnnnnnnnnnnnnnnnnnnnnnnnnnnnnnnnnnnnnnnnnnnnnnnnnnnnnnnnnnnnnnnnnnnnnnnnnnnnnnnnnnnnnnnnnnnnnnnnnnnnnnnnnnnnnnnnnnnnnnnnnnnnnnnnnnnnnnnnnnnnnnnnnnnnnnnnnnnnnnnnnnnnnnnnnnnnnnnnnnnnnnnnnnnnnnnnnnnnnnnnnnnnnnnnnnnnnnnnnnnnnnnnnnnnnnnnnnnnnnnnnnnnnnnnnnnnnnnnnnnnnnnnnnnnnnnnnnnnnnnnnnnnnnnnnnnnnnnnnnnnnnnnnnnnnnnnnnnnnnnnnnnnnnnnnnnnnnnnnnnnnnn

SEQ ID NO: 1095 - DNA, 4000 bp, Escherichia coli
  misc_feature (1)..(18): n is a, c, g, or t
  misc_feature (20)..(29): n is a, c, g, or t
  misc_feature (31)..(36): n is a, c, g, or t
  misc_feature (38)..(38): n is a, c, g, or t
  misc_feature (40)..(41): n is a, c, g, or t
  misc_feature (43)..(49): n is a, c, g, or t
  misc_feature (51)..(59): n is a, c, g, or t
  misc_feature (61)..(65): n is a, c, g, or t
  misc_feature (70)..(80): n is a, c, g, or t
  misc_feature (82)..(82): n is a, c, g, or t
  misc_feature (85)..(88): n is a, c, g, or t
  misc_feature (90)..(98): n is a, c, g, or t
  misc_feature (101)..(111): n is a, c, g, or t
  misc_feature (113)..(113): n is a, c, g, or t
  misc_feature (115)..(116): n is a, c, g, or t
  misc_feature (118)..(128): n is a, c, g, or t
  misc_feature (130)..(130): n is a, c, g, or t
  misc_feature (132)..(135): n is a, c, g, or t
  misc_feature (137)..(145): n is a, c, g, or t
  misc_feature (147)..(173): n is a, c, g, or t
  misc_feature (175)..(177): n is a, c, g, or t
  misc_feature (180)..(180): n is a, c, g, or t
  misc_feature (183)..(191): n is a, c, g, or t
  misc_feature (193)..(201): n is a, c, g, or t
  misc_feature (203)..(203): n is a, c, g, or t
  misc_feature (205)..(207): n is a, c, g, or t
  misc_feature (209)..(212): n is a, c, g, or t
  misc_feature (214)..(224): n is a, c, g, or t
  misc_feature (226)..(228): n is a, c, g, or t
  misc_feature (230)..(230): n is a, c, g, or t
  misc_feature (232)..(233): n is a, c, g, or t
  misc_feature (235)..(248): n is a, c, g, or t
  misc_feature (250)..(256): n is a, c, g, or t
  misc_feature (258)..(268): n is a, c, g, or t
  misc_feature (270)..(272): n is a, c, g, or t
  misc_feature (274)..(282): n is a, c, g, or t
  misc_feature (284)..(289): n is a, c, g, or t
  misc_feature (292)..(293): n is a, c, g, or t
  misc_feature (295)..(299): n is a, c, g, or t
  misc_feature (301)..(302): n is a, c, g, or t
  misc_feature (305)..(306): n is a, c, g, or t
  misc_feature (308)..(311): n is a, c, g, or t
  misc_feature (313)..(324): n is a, c, g, or t
  misc_feature (326)..(333): n is a, c, g, or t
  misc_feature (335)..(340): n is a, c, g, or t
  misc_feature (342)..(342): n is a, c, g, or t
  misc_feature (344)..(350): n is a, c, g, or t
  misc_feature (352)..(353): n is a, c, g, or t
  misc_feature (355)..(372): n is a, c, g, or t
  misc_feature (374)..(375): n is a, c, g, or t
  misc_feature (377)..(381): n is a, c, g, or t
  misc_feature (383)..(390): n is a, c, g, or t
  misc_feature (393)..(393): n is a, c, g, or t
  misc_feature (395)..(399): n is a, c, g, or t
  misc_feature (401)..(402): n is a, c, g, or t
  misc_feature (404)..(406): n is a, c, g, or t
  misc_feature (408)..(408): n is a, c, g, or t
  misc_feature (410)..(423): n is a, c, g, or t
  misc_feature (425)..(425): n is a, c, g, or t
  misc_feature (427)..(434): n is a, c, g, or t
  misc_feature (436)..(449): n is a, c, g, or t
  misc_feature (452)..(458): n is a, c, g, or t
  misc_feature (460)..(460): n is a, c, g, or t
  misc_feature (462)..(499): n is a, c, g, or t
  misc_feature (501)..(503): n is a, c, g, or t
  misc_feature (505)..(508): n is a, c, g, or t
  misc_feature (510)..(516): n is a, c, g, or t
  misc_feature (519)..(541): n is a, c, g, or t
  misc_feature (543)..(547): n is a, c, g, or t
  misc_feature (549)..(552): n is a, c, g, or t
  misc_feature (554)..(555): n is a, c, g, or t
  misc_feature (557)..(557): n is a, c, g, or t
  misc_feature (559)..(559): n is a, c, g, or t
  misc_feature (561)..(567): n is a, c, g, or t
  misc_feature (569)..(570): n is a, c, g, or t
  misc_feature (572)..(573): n is a, c, g, or t
  misc_feature (575)..(582): n is a, c, g, or t
  misc_feature (584)..(585): n is a, c, g, or t
  misc_feature (587)..(588): n is a, c, g, or t
  misc_feature (590)..(590): n is a, c, g, or t
  misc_feature (592)..(596): n is a, c, g, or t
  misc_feature (598)..(600): n is a, c, g, or t
  misc_feature (603)..(604): n is a, c, g, or t
  misc_feature (607)..(610): n is a, c, g, or t
  misc_feature (612)..(614): n is a, c, g, or t
  misc_feature (616)..(618): n is a, c, g, or t
  misc_feature (620)..(629): n is a, c, g, or t
  misc_feature (633)..(634): n is a, c, g, or t
  misc_feature (636)..(639): n is a, c, g, or t
  misc_feature (642)..(644): n is a, c, g, or t
  misc_feature (646)..(649): n is a, c, g, or t
  misc_feature (651)..(659): n is a, c, g, or t
  misc_feature (661)..(666): n is a, c, g, or t
  misc_feature (668)..(671): n is a, c, g, or t
  misc_feature (674)..(679): n is a, c, g, or t
  misc_feature (681)..(689): n is a, c, g, or t
  misc_feature (691)..(700): n is a, c, g, or t
  misc_feature (702)..(705): n is a, c, g, or t
  misc_feature (707)..(709): n is a, c, g, or t
  misc_feature (711)..(711): n is a, c, g, or t
  misc_feature (713)..(733): n is a, c, g, or t
  misc_feature (735)..(748): n is a, c, g, or t
  misc_feature (750)..(751): n is a, c, g, or t
  misc_feature (753)..(757): n is a, c, g, or t
  misc_feature (759)..(759): n is a, c, g, or t
  misc_feature (761)..(771): n is a, c, g, or t
  misc_feature (773)..(774): n is a, c, g, or t
  misc_feature (777)..(779): n is a, c, g, or t
  misc_feature (781)..(781): n is a, c, g, or t
  misc_feature (783)..(790): n is a, c, g, or t
  misc_feature (792)..(795): n is a, c, g, or t
  misc_feature (798)..(801): n is a, c, g, or t
  misc_feature (803)..(805): n is a, c, g, or t
  misc_feature (807)..(808): n is a, c, g, or t
  misc_feature (810)..(814): n is a, c, g, or t
  misc_feature (816)..(817): n is a, c, g, or t
  misc_feature (819)..(829): n is a, c, g, or t
  misc_feature (831)..(835): n is a, c, g, or t
  misc_feature (840)..(841): n is a, c, g, or t
  misc_feature (843)..(850): n is a, c, g, or t
  misc_feature (852)..(853): n is a, c, g, or t
  misc_feature (855)..(859): n is a, c, g, or t
  misc_feature (861)..(865): n is a, c, g, or t
  misc_feature (867)..(875): n is a, c, g, or t
  misc_feature (877)..(880): n is a, c, g, or t
  misc_feature (883)..(883): n is a, c, g, or t
  misc_feature (886)..(893): n is a, c, g, or t
  misc_feature (895)..(899): n is a, c, g, or t
  misc_feature (901)..(903): n is a, c, g, or t
  misc_feature (906)..(914): n is a, c, g, or t
  misc_feature (916)..(918): n is a, c, g, or t
  misc_feature (921)..(929): n is a, c, g, or t
  misc_feature (931)..(931): n is a, c, g, or t
  misc_feature (933)..(934): n is a, c, g, or t
  misc_feature (936)..(936): n is a, c, g, or t
  misc_feature (938)..(940): n is a, c, g, or t
  misc_feature (943)..(943): n is a, c, g, or t
  misc_feature (945)..(949): n is a, c, g, or t
  misc_feature (952)..(952): n is a, c, g, or t
  misc_feature (954)..(963): n is a, c, g, or t
  misc_feature (965)..(967): n is a, c, g, or t
  misc_feature (969)..(976): n is a, c, g, or t
  misc_feature (978)..(978): n is a, c, g, or t
  misc_feature (980)..(981): n is a, c, g, or t
  misc_feature (986)..(992): n is a, c, g, or t
  misc_feature (994)..(1001): n is a, c, g, or t
  misc_feature (1003)..(1005): n is a, c, g, or t
  misc_feature (1007)..(1007): n is a, c, g, or t
  misc_feature (1010)..(1013): n is a, c, g, or t
  misc_feature (1015)..(1018): n is a, c, g, or t
  misc_feature (1020)..(1021): n is a, c, g, or t
  misc_feature (1023)..(1024): n is a, c, g, or t
  misc_feature (1026)..(1028): n is a, c, g, or t
  misc_feature (1032)..(1033): n is a, c, g, or t
  misc_feature (1035)..(1039): n is a, c, g, or t
  misc_feature (1041)..(1042): n is a, c, g, or t
  misc_feature (1044)..(1045): n is a, c, g, or t
  misc_feature (1047)..(1047): n is a, c, g, or t
  misc_feature (1051)..(1051): n is a, c, g, or t
  misc_feature (1053)..(1057): n is a, c, g, or t
  misc_feature (1059)..(1060): n is a, c, g, or t
  misc_feature (1062)..(1063): n is a, c, g, or t
  misc_feature (1066)..(1066): n is a, c, g, or t
  misc_feature (1068)..(1072): n is a, c, g, or t
  misc_feature (1076)..(1078): n is a, c, g, or t
  misc_feature (1081)..(1081): n is a, c, g, or t
  misc_feature (1083)..(1093): n is a, c, g, or t
  misc_feature (1095)..(1096): n is a, c, g, or t
  misc_feature (1098)..(1098): n is a, c, g, or t
  misc_feature (1102)..(1102): n is a, c, g, or t
  misc_feature (1104)..(1105): n is a, c, g, or t
  misc_feature (1107)..(1107): n is a, c, g, or t
  misc_feature (1110)..(1110): n is a, c, g, or t
  misc_feature (1114)..(1114): n is a, c, g, or t
  misc_feature (1116)..(1116): n is a, c, g, or t
  misc_feature (1118)..(1118): n is a, c, g, or t
  misc_feature (1120)..(1120): n is a, c, g, or t
  misc_feature (1122)..(1123): n is a, c, g, or t
  misc_feature (1125)..(1125): n is a, c, g, or t
  misc_feature (1127)..(1127): n is a, c, g, or t
  misc_feature (1129)..(1129): n is a, c, g, or t
  misc_feature (1132)..(1133): n is a, c, g, or t
  misc_feature (1135)..(1137): n is a, c, g, or t
  misc_feature (1139)..(1139): n is a, c, g, or t
  misc_feature (1141)..(1144): n is a, c, g, or t
  misc_feature (1146)..(1148): n is a, c, g, or t
  misc_feature (1150)..(1150): n is a, c, g, or t
  misc_feature (1152)..(1152): n is a, c, g, or t
  misc_feature (1154)..(1155): n is a, c, g, or t
  misc_feature (1157)..(1159): n is a, c, g, or t
  misc_feature (1162)..(1163): n is a, c, g, or t
  misc_feature (1165)..(1167): n is a, c, g, or t
  misc_feature (1169)..(1171): n is a, c, g, or t
  misc_feature (1176)..(1177): n is a, c, g, or t
  misc_feature (1179)..(1179): n is a, c, g, or t
  misc_feature (1182)..(1186): n is a, c, g, or t
  misc_feature (1189)..(1191): n is a, c, g, or t
  misc_feature (1195)..(1195): n is a, c, g, or t
  misc_feature (1198)..(1204): n is a, c, g, or t
  misc_feature (1206)..(1207): n is a, c, g, or t
  misc_feature (1210)..(1210): n is a, c, g, or t
  misc_feature (1212)..(1217): n is a, c, g, or t
  misc_feature (1219)..(1223): n is a, c, g, or t
  misc_feature (1225)..(1227): n is a, c, g, or t
  misc_feature (1229)..(1230): n is a, c, g, or t
  misc_feature (1232)..(1232): n is a, c, g, or t
  misc_feature (1234)..(1238): n is a, c, g, or t
  misc_feature (1240)..(1240): n is a, c, g, or t
  misc_feature (1243)..(1245): n is a, c, g, or t
  misc_feature (1249)..(1249): n is a, c, g, or t
  misc_feature (1251)..(1252): n is a, c, g, or t
  misc_feature (1255)..(1256): n is a, c, g, or t
  misc_feature (1258)..(1259): n is a, c, g, or t
  misc_feature (1261)..(1261): n is a, c, g, or t
  misc_feature (1264)..(1264): n is a, c, g, or t
  misc_feature (1266)..(1266): n is a, c, g, or t
  misc_feature (1268)..(1274): n is a, c, g, or t
  misc_feature (1276)..(1277): n is a, c, g, or t
  misc_feature (1280)..(1284): n is a, c, g, or t
  misc_feature (1287)..(1287): n is a, c, g, or t
  misc_feature (1289)..(1289): n is a, c, g, or t
  misc_feature (1291)..(1293): n is a, c, g, or t
  misc_feature (1295)..(1298): n is a, c, g, or t
  misc_feature (1302)..(1302): n is a, c, g, or t
  misc_feature (1304)..(1304): n is a, c, g, or t
  misc_feature (1306)..(1306): n is a, c, g, or t
  misc_feature (1309)..(1318): n is a, c, g, or t
  misc_feature (1320)..(1321): n is a, c, g, or t
  misc_feature (1323)..(1323): n is a, c, g, or t
  misc_feature (1327)..(1327): n is a, c, g, or t
  misc_feature (1330)..(1331): n is a, c, g, or t
  misc_feature (1333)..(1333): n is a, c, g, or t
  misc_feature (1336)..(1337): n is a, c, g, or t
  misc_feature (1341)..(1341): n is a, c, g, or t
  misc_feature (1345)..(1348): n is a, c, g, or t
  misc_feature (1351)..(1351): n is a, c, g, or t
  misc_feature (1356)..(1360): n is a, c, g, or t
  misc_feature (1362)..(1363): n is a, c, g, or t
  misc_feature (1366)..(1369): n is a, c, g, or t
  misc_feature (1371)..(1371): n is a, c, g, or t
  misc_feature (1373)..(1374): n is a, c, g, or t
  misc_feature (1376)..(1377): n is a, c, g, or t
  misc_feature (1380)..(1380): n is a, c, g, or t
  misc_feature (1383)..(1384): n is a, c, g, or t
  misc_feature (1387)..(1387): n is a, c, g, or t
  misc_feature (1389)..(1390): n is a, c, g, or t
  misc_feature (1392)..(1393): n is a, c, g, or t
  misc_feature (1395)..(1395): n is a, c, g, or t
  misc_feature (1398)..(1399): n is a, c, g, or t
  misc_feature (1402)..(1403): n is a, c, g, or t
  misc_feature (1405)..(1405): n is a, c, g, or t
  misc_feature (1408)..(1408): n is a, c, g, or t
  misc_feature (1410)..(1410): n is a, c, g, or t
  misc_feature (1412)..(1414): n is a, c, g, or t
  misc_feature (1420)..(1420): n is a, c, g, or t
  misc_feature (1422)..(1422): n is a, c, g, or t
  misc_feature (1425)..(1426): n is a, c, g, or t
  misc_feature (1429)..(1430): n is a, c, g, or t
  misc_feature (1432)..(1432): n is a, c, g, or t
  misc_feature (1434)..(1435): n is a, c, g, or t
  misc_feature (1438)..(1438): n is a, c, g, or t
  misc_feature (1443)..(1443): n is a, c, g, or t
  misc_feature (1446)..(1447): n is a, c, g, or t
  misc_feature (1449)..(1450): n is a, c, g, or t
  misc_feature (1453)..(1453): n is a, c, g, or t
  misc_feature (1456)..(1456): n is a, c, g, or t
  misc_feature (1464)..(1464): n is a, c, g, or t
  misc_feature (1466)..(1466): n is a, c, g, or t
  misc_feature (1468)..(1468): n is a, c, g, or t
  misc_feature (1470)..(1470): n is a, c, g, or t
  misc_feature (1474)..(1474): n is a, c, g, or t
  misc_feature (1483)..(1483): n is a, c, g, or t
  misc_feature (1486)..(1486): n is a, c, g, or t
  misc_feature (1488)..(1488): n is a, c, g, or t
  misc_feature (1490)..(1490): n is a, c, g, or t
  misc_feature (1492)..(1493): n is a, c, g, or t
  misc_feature (1495)..(1495): n is a, c, g, or t
  misc_feature (1497)..(1499): n is a, c, g, or t
  misc_feature (1501)..(1507): n is a, c, g, or t
  misc_feature (1518)..(1518): n is a, c, g, or t
  misc_feature (1520)..(1524): n is a, c, g, or t
  misc_feature (1527)..(1528): n is a, c, g, or t
  misc_feature (1531)..(1531): n is a, c, g, or t
  misc_feature (1535)..(1536): n is a, c, g, or t
  misc_feature (1538)..(1543): n is a, c, g, or t
  misc_feature (1545)..(1546): n is a, c, g, or t
  misc_feature (1549)..(1549): n is a, c, g, or t
  misc_feature (1551)..(1555): n is a, c, g, or t
  misc_feature (1557)..(1557): n is a, c, g, or t
  misc_feature (1562)..(1562): n is a, c, g, or t
  misc_feature (1564)..(1564): n is a, c, g, or t
  misc_feature (1569)..(1571): n is a, c, g, or t
  misc_feature (1574)..(1574): n is a, c, g, or t
  misc_feature (1576)..(1576): n is a, c, g, or t
  misc_feature (1582)..(1583): n is a, c, g, or t
  misc_feature (1588)..(1588): n is a, c, g, or t
  misc_feature (1593)..(1593): n is a, c, g, or t
  misc_feature (1599)..(1600): n is a, c, g, or t
  misc_feature (1605)..(1605): n is a, c, g, or t
  misc_feature (1610)..(1610): n is a, c, g, or t
  misc_feature (1613)..(1613): n is a, c, g, or t
  misc_feature (1617)..(1618): n is a, c, g, or t
  misc_feature (1621)..(1622): n is a, c, g, or t
  misc_feature (1626)..(1627): n is a, c, g, or t
  misc_feature (1629)..(1631): n is a, c, g, or t
  misc_feature (1636)..(1637): n is a, c, g, or t
  misc_feature (1639)..(1640): n is a, c, g, or t
  misc_feature (1642)..(1643): n is a, c, g, or t
  misc_feature (1647)..(1647): n is a, c, g, or t
  misc_feature (1651)..(1651): n is a, c, g, or t
  misc_feature (1653)..(1654): n is a, c, g, or t
  misc_feature (1656)..(1657): n is a, c, g, or t
  misc_feature (1661)..(1661): n is a, c, g, or t
  misc_feature (1663)..(1663): n is a, c, g, or t
  misc_feature (1667)..(1667): n is a, c, g, or t
  misc_feature (1672)..(1672): n is a, c, g, or t
  misc_feature (1674)..(1674): n is a, c, g, or t
  misc_feature (1676)..(1676): n is a, c, g, or t
  misc_feature (1681)..(1682): n is a, c, g, or t
  misc_feature (1688)..(1689): n is a, c, g, or t
  misc_feature (1695)..(1695): n is a, c, g, or t
  misc_feature (1699)..(1699): n is a, c, g, or t
  misc_feature (1702)..(1702): n is a, c, g, or t
  misc_feature (1705)..(1706): n is a, c, g, or t
  misc_feature (1708)..(1708): n is a, c, g, or t
  misc_feature (1712)..(1712): n is a, c, g, or t
  misc_feature (1714)..(1714): n is a, c, g, or t
  misc_feature (1716)..(1717): n is a, c, g, or t
  misc_feature (1719)..(1719): n is a, c, g, or t
  misc_feature (1722)..(1726): n is a, c, g, or t
  misc_feature (1735)..(1735): n is a, c, g, or t
  misc_feature (1737)..(1737): n is a, c, g, or t
  misc_feature (1747)..(1747): n is a, c, g, or t
  misc_feature (1750)..(1750): n is a, c, g, or t
  misc_feature (1752)..(1752): n is a, c, g, or t
  misc_feature (1754)..(1754): n is a, c, g, or t
  misc_feature (1762)..(1762): n is a, c, g, or t
  misc_feature (1770)..(1771): n is a, c, g, or t
  misc_feature (1774)..(1775): n is a, c, g, or t
  misc_feature (1777)..(1777): n is a, c, g, or t
  misc_feature (1779)..(1779): n is a, c, g, or t
  misc_feature (1787)..(1787): n is a, c, g, or t
  misc_feature (1797)..(1797): n is a, c, g, or t
  misc_feature (1840)..(1840): n is a, c, g, or t
  misc_feature (1848)..(1848): n is a, c, g, or t
  misc_feature (2236)..(2236): n is a, c, g, or t
  misc_feature (2362)..(2362): n is a, c, g, or t
  misc_feature (2445)..(2445): n is a, c, g, or t
  misc_feature (3529)..(3529): n is a, c, g, or t
  misc_feature (3571)..(3571): n is a, c, g, or t
  misc_feature (3772)..(3772): n is a, c, g, or t
  misc_feature (3805)..(3805): n is a, c, g, or t
  misc_feature (3890)..(3890): n is a, c, g, or t
  misc_feature (3961)..(3961): n is a, c, g, or t
  misc_feature (3976)..(3976): n is a, c, g, or t
nnnnnnnnnnnnnnnnnncnnnnnnnnnncnnnnnncncnncnnnnnnnannnnnnnnncnnnnncgacnnnnnnnnnnncntcnnnngnnnnnnnnncgnnnnnnnnnnncncnncnnnnnnnnnnncntnnnngnnnnnnnnntnnnnnnnnnnnnnnnnnnnnnnnnnnntnnnctnatnnnnnnnnngnnnnnnnnnangnnncnnnngnnnnnnnnnnncnnncngnncnnnnnnnnnnnnnngnnnnnnnannnnnnnnnnntnnngnnnnnnnnncnnnnnncgnncnnnnngnngcnnannnncnnnnnnnnnnnnannnnnnnngnnnnnntnannnnnnncnncnnnnnnnnnnnnnnnnnncnncnnnnncnnnnnnnncgncnnnnncnnannngncnnnnnnnnnnnnnncncnnnnnnnncnnnnnnnnnnnnnnccnnnnnnncncnnnnnnnnnnnnnnnnnnnnnnnnnnnnnnnnnnnnnnannncnnnntnnnnnnncannnnnnnnnnnnnnnnnnnnnnntnnnnntnnnncnncncngnnnnnnncnncnncnnnnnnnncnncnncncnnnnngnnncgnnacnnnngnnncnnncnnnnnnnnnncganntnnnngannncnnnnannnnnnnnncnnnnnnannnntcnnnnnntnnnnnnnnntnnnnnnnnnngnnnncnnngngnnnnnnnnnnnnnnnnnnnnngnnnnnnnnnnnnnngnntnnnnngntnnnnnnnnnnncnncgnnntngnnnnnnnngnnnnggnnnncnnngnngnnnnngnngnnnnnnnnnnngnnnnntgctnngnnnnnnnngnntnnnnngnnnnngnnnnnnnnncnnnngcngcnnnnnnnncnnnnncnnnctnnnnnnnnncnnnctnnnnnnnnncntnntncnnntgngnnnnngcntnnnnnnnnnnannntnnnnnnnngncnnggcannnnnnncnnnnnnnntnnncntgnnnntnnnngnngnntnnntctnngnnnnngnntnntncgtntnnnnngnntnngcngnnnnngcgnnngcngnnnnnnnnnnngnngnggcngnntncgncgcngncncntnngncncnganncnnncncnnnngnnncngncnnannnganncnnncnnngcctnntncgnnnnngcnnntgcngcnnnnnnngnngcntnnnnnncnnnnncnnncnnancnnnnncngcnnntgcngnngcnncnncngcngncnnnnnnncnncgnnnnnagncntnnncnnnncagncngngcnnnnnnnnnngnngnctgngcnncnttnnctgncgcnnnngcngcggnnnnngnngtnnnngnanncnnagnctnngcngnntnntnagnntgnncnggntntnnnggctgngncgnntcnngngnntgngccgnttnngnngtntgngccggttncngngnctgngctgactcntgngncngnncngnnncnnnnnnnggcgcaggctnannnnncgnngcnggcnnannnnnngnngcngnnnnntnagccngngccgnnngtncnggctgnncgggngcagnagcctnngccgncgtancantctnntcnntctnncnnncgccnncnncnngctncgcngnngnngccngngcanccggntncnccgcnntattcnnctcggncgcncgntgnncntcancngnntncgnnnnngcgggggcngncgaagacgcngantntnccgaagcnttatcctnngcnngntnggcgttcnccgccacagnggcagcaggttgtacaggttgtgattgtaccggcgcctgcganccttgcgntgcagaagcagaagtatcagcagcaggtgaagcagcagcatttttcacggacataccgggctgcacagccgcgtgcgcagcgcccggagccggtgctgcggtggcaggcgcatccgaggaagaagcgggcgcttccacacccattgacgcaccctcagccgaggaggcggcagccgcatcctgcccctggttcagagcggctttcctcttttgccggtaggtgtacatgtacacgagcccggcgaaggcaagctgcagaataagggcctgcacaaagtcaagcggctgttcctcacgaaccgcaccaaagggatcctccaaacccagcagcccaaagataaaaatcgaaacattattcgcaatatgcagaccgataccggcttcaagnccgccggtgtaccagcacaagaacccggcgatcagagccatcgtcagcacagaaagcagaccccacagtccgtaaccatgcagcaccataaagataggcgctggaataataattgcccaaacgggnttcttcagccaccgacccacggtctgcatgagataaccgcggaagagcagttcctcggcgtagcactggaacggaactattancagaataagcacaatgtacagccagaacatgccggaattcagcggatgcacgctgttctgcgtggtcaaagaaccatccagagtcgcgaaccctacatagtaaagaccgaaaatgaggaacccaaagcctaggaaaacacctaaataggaccaccgcatgcggcccgcaatggagtgaatcagccctaagggtttgaagttggtaatcaggcgcgcaatgaaaatcgccggaatcaccggaatgatggtaataaggagcgcaataaaaacaagcggggtcttaaaaacgttcgcgtaaatacgctgcagatcggtcaggtaatcgtaagggacgcgcagcatcacggcgaatgccagcagcgcaaagctcacaatcagcaggagcacaaaatagatgccggcaatcagcaagccctcaagaaccggggtgaaccaacgcgcacgcgggttcacatgcgataaccggtgatagggcagctcgctggcgcgttccagaagttccttacgggtaaggcggttactcctgtaatactcagcggaggcgaaggtagactcagcgccgtacccgtaactttctgcctgatgcgggctcagcatcgtgggcatattttgggtattagtgactgcgccaggtggttggtttgttggaatgaactcagaaccgtgatgtccgggttcctgctggtgattagtgctcatagtatccataatagaggggaccctcccccgaatgtcacaccggggccatctgtgcgggttgccttacggtgtaataatttacctgcctatgaacttttcgggcttatattttatgggaaatatgccataatttgagggttaccgtagtttaaaatttgaggctactcgtgcctacgcttccgggtgtttttggcgccagtagtgaaggaaggttcagatggctctcgtcttcaatccgcccccaaattggcccaaaccgcctgccgggtggtctcctaccccgacgtggcggcccgatcccgcatggggtcctgttcccgaaggttggcagctgtggattgaggagcccgagcctgagaatgagcaggcaccctcgacggcggantcttcatctgccgcatcgggctcttctgagggttcttccagngcgaagccctcgccatcgtcaagctctgagcagagcggtgagtctgcgcaggattctgccccgaagcagcgtaccgcgccgaccatttccgaacagtttgccgagcagaaaacttcccatcagcagacccctgagcagaagactcaggcggagtctgcccacgctcaggatgcggcgtccaggagttccgagccgcgcgangccgcgggtgagcgtgcgggcgcatccggttcnggtgcagcggcaggctcttcggccgagtcgcaggtgcgttccgagcagagcgtttctgagactcccgtgaaccgtcagagcggcnccgccgaggctccaaagcctcaggtttcggagcctacccgcgagcccgctcgcgatacccacaatgccccntccgcgccggagacnagcgcacagcagccgggagtcgcg

SEQ ID NO: 1096 - DNA, 4000 bp, Escherichia coli
  misc_feature (797)..(797): n is a, c, g, or t
  misc_feature (1985)..(1985): n is a, c, g, or t
  misc_feature (3137)..(3137): n is a, c, g, or t
  misc_feature (3182)..(3182): n is a, c, g, or t
  misc_feature (3212)..(3212): n is a, c, g, or t
  misc_feature (3519)..(3519): n is a, c, g, or t
  misc_feature (3600)..(3600): n is a, c, g, or t
  misc_feature (3660)..(3660): n is a, c, g, or t
acatccccctaatattgacccgacagagcatatcaatgcatatttaaacgctttggctggtattgcaactgctaacgctattaagagaacgtccggcggaatcgggaaaaaagaggattcacaaaatgcgagtataaagagcgcccacgtactatgaggcctttctgcccaatgtattgtccaatcatagagcctccttatataatttgcttttctagtgacgtgctctttttcaattgattccattatctaattatgcaaacgacaaatgctgtgttgtaatgattagttaaagttgcatagtctctgtaagttacccgttacttagctactctttcttcgccaccttaggtatgtagatacaatacggctcttctgccatgtagtctcctgtttcgtagaacgcacgtgctctgcaaccttcgcaaaccttcttgtattcgcataggccacacttgcctccaagcaaatcaggctgtctgagtttggcgaaaacagcagaatccttccagatatctacaaacttctgcttcttgatgtgtccggcttcaactggcagatatccacatgggaagacctctcccttgtgagaaacaaagcatactccggtcccggccaggcatccttttgtcattgcggccattccgtgagtcttcggtgtgatcttgacaccctcttcttttgcccgttcgcgcattattctgaaatagtgaggtgaacaggtagccttagtctggatcactgcctctttggatagatcatagaaaagattaaggagctcctcgtacttttcagcnggcagcatctggtcctccgcaatttcaacaccgcaacctaccggaacgagcataaatatatgaatcgcctcggcgcccaagttaacggcaaggttatacaagtcgcgaaactgatgtgcgttgtgctttgcaatagtacagttaacctgcatacccattcccagcgccaataaatttttgaatccttttatggccagctcaaacgatcctttcaatttgcggaattcgtcgtgagtagctgcatctgcaccgtcaaggcttatagcaaccctggatacacctgagtcaacaattttcttcgccatagcctcatctaccaatgtaccattggtagccagtgcgactgttaagccttgtttcaccgcgtattttgcaatatcgaatatgtctgggcgaaaaagcggttctcctccgcttaagacaagaatagggttacccgcttctactattgcatcgacgagttcgaaggattctttcgtggtcaaatcatcattcatcagctgggtacttacgtctatccttctacagtgaatacactccagattacagccagcagtcgtttcccagaaaacaagccgaagtttgttctgcatatttctcatatattcactggaaaccttggcgtccccatgtccttttatttgtgagtatacttccttgatagttccttcaggcatgccatgcggcataccctgtgaacctgaaccgttaccgtgatcatccttcattcttgcccccagtattctttctacattattggtaaaatgcgttaaattgtttgtccttgacaaggcaatttagcactgtaatattaaaattttgcataatatttacgattttacccttattttgcataaattcaaatacaaaaatatctaattaatcataaatgcgggtgttatgaagaccagagaaaaaataacaatatatgatacaacattgcgagatggcagccaatctgagggtatctcgttttctctgcaggataaagtaggaatagcacttaagctcgatgatctcggcgtagattatattgagggcggttatccattatctaatcccaaagataagaattttttcaaagagatcagaaaaaattcgttacagaacgctaaggttgccgcatttggcagtacaaagcgggcgaataaaaaggcatcggaagatcctggaataaaagcactgctnttaacagagatgactgtcgtaacaatcgtagccaagagttgggatttccatgtaacagatgttctcaaggtatcgttggatgaaaatctgaaaatggtatcggaaacagtcgaatatttgaaatcaaaaggaagagaagttattctcgatgcagaacatttttttgacgggtacaagaataattccagatattcattaaaagtattgaaggctgcacagaattcaggggtggatacaattgtcctttgtgataccaacggaggatgtttgccgcaagaagtggaaaagatcactggaagtgttatgggtaagataaaagtgccgctgggcatacatactcacaacgacggtgaacttgctgtggctaataccattgctgccataaattccggagcaaggcatgtacaggggacaataaacgggcttggagagagatgtggcaatgcgaatctctgttcggtaataccgaatctggtattgaaaaataaatttaagtgtcttggcaattcggaactcaagaaacttacggaaatatcaagatatgtcaacgaagtggcaaattttgtacccatggcgaatcagccttttgtaggttcaagtgcttttgcacacaaaggcggtttgcacgtaaatgcaatacagaagaacaaaagtacttacgagcatatagagccggagacagttggaaacgagagaaggattttaatatccgaactctccggaagctcaaatattctcaaaaaggtagaaaaatataagattgcacacgataagaaaataatgaagaagattctgaacaaagtccaggatatggagaacgaggggtatcattttgaatctgcagaaggttcattcgacctcctggtcaagaaggtgataggaaagcacaaaggtttttttgaacttgaagatttcagggtaactgtggaaagaggaaaagatggaaaatctactactcgtgcaaacgttaagataaaggttaatggtgtagaggagctgacggttagtgatggggatggtcctgtaaatgcccttgacggcgcattgcgaaaggcccttgagaaattctacccatctctttcggatatgcatctgatagattttaaggtacgtgttattaatcctaaagaggcaactgccgcgaaggtaagngtaataattgaatctcacgatcacaaagatacctggggtactgtnggtgtgtctggaaacctgatagaggcgagntggaaagcacttgtagaaagtattgaatataaacttttaaaggacgaagatggagactgaattaccaacaaaatacaatcctaaggagatagaggataaatggtacagcttttgggaagagggcaatttttttcattgcgaaccggatcctgccaagaaaccatatactatagtaattccacctccaaatgttacaggtgtcttacatatggggcatgctctcaataatatcctgcaggatattttgataagatggagaaggatgcagggatacaacacactatggatgccgggaacagatcacgcnggcatagcaactcagaatgtcgttgaaaggaaattggcgaaacaaggtacaaaccggcatgagcttggaagggaaaagttnatcgaggaggtgtggaaatggaaaaaagagtacggttcagaaatcatgaaacagcttagnaaactgggttcatcgtgtgattgggaaagagaaagattcacgatggacgaaggtttgtcaaaagccgttaaagaggcatttgttaaactgtatgaaaaaggatttatttataaaggaaaatacattgttaactggtgcccaaggtgccttaccgccatttcagatgatgaggtagaacatgaagatcatgaagggcacctctggcatatcagatatccttttcgggatgcacctcacctgtttgttactattgcgacaacacgtccggaaacgatgctgggtgatgttgccgtcgcggtaaatccggaggatgaacgatataaggatatgataggcgaga

SEQ ID NO: 1097 - DNA, 4000 bp, Escherichia coli
  misc_feature (1)..(4): n is a, c, g, or t
  misc_feature (6)..(6): n is a, c, g, or t
  misc_feature (8)..(10): n is a, c, g, or t
  misc_feature (12)..(13): n is a, c, g, or t
  misc_feature (19)..(19): n is a, c, g, or t
  misc_feature (25)..(26): n is a, c, g, or t
  misc_feature (28)..(32): n is a, c, g, or t
  misc_feature (35)..(36): n is a, c, g, or t
  misc_feature (42)..(42): n is a, c, g, or t
  misc_feature (44)..(44): n is a, c, g, or t
  misc_feature (47)..(48): n is a, c, g, or t
  misc_feature (50)..(50): n is a, c, g, or t
  misc_feature (52)..(53): n is a, c, g, or t
  misc_feature (56)..(56): n is a, c, g, or t
  misc_feature (59)..(63): n is a, c, g, or t
  misc_feature (65)..(66): n is a, c, g, or t
  misc_feature (68)..(70): n is a, c, g, or t
  misc_feature (74)..(75): n is a, c, g, or t
  misc_feature (78)..(78): n is a, c, g, or t
  misc_feature (80)..(82): n is a, c, g, or t
  misc_feature (85)..(85): n is a, c, g, or t
  misc_feature (90)..(91): n is a, c, g, or t
  misc_feature (93)..(95): n is a, c, g, or t
  misc_feature (101)..(102): n is a, c, g, or t
  misc_feature (104)..(104): n is a, c, g, or t
  misc_feature (106)..(107): n is a, c, g, or t
  misc_feature (110)..(110): n is a, c, g, or t
  misc_feature (112)..(112): n is a, c, g, or t
  misc_feature (114)..(115): n is a, c, g, or t
  misc_feature (119)..(119): n is a, c, g, or t
  misc_feature (122)..(123): n is a, c, g, or t
  misc_feature (125)..(126): n is a, c, g, or t
  misc_feature (128)..(129): n is a, c, g, or t
  misc_feature (139)..(139): n is a, c, g, or t
  misc_feature (141)..(142): n is a, c, g, or t
  misc_feature (144)..(145): n is a, c, g, or t
  misc_feature (147)..(147): n is a, c, g, or t
  misc_feature (149)..(151): n is a, c, g, or t
  misc_feature (153)..(158): n is a, c, g, or t
  misc_feature (160)..(164): n is a, c, g, or t
  misc_feature (166)..(168): n is a, c, g, or t
  misc_feature (171)..(172): n is a, c, g, or t
  misc_feature (174)..(174): n is a, c, g, or t
  misc_feature (176)..(178): n is a, c, g, or t
  misc_feature (182)..(183): n is a, c, g, or t
  misc_feature (187)..(187): n is a, c, g, or t
  misc_feature (189)..(189): n is a, c, g, or t
  misc_feature (192)..(192): n is a, c, g, or t
  misc_feature (195)..(196): n is a, c, g, or t
  misc_feature (198)..(199): n is a, c, g, or t
  misc_feature (201)..(201): n is a, c, g, or t
  misc_feature (203)..(203): n is a, c, g, or t
  misc_feature (206)..(208): n is a, c, g, or t
  misc_feature (211)..(213): n is a, c, g, or t
  misc_feature (217)..(218): n is a, c, g, or t
  misc_feature (222)..(222): n is a, c, g, or t
  misc_feature (224)..(225): n is a, c, g, or t
  misc_feature (228)..(228): n is a, c, g, or t
  misc_feature (231)..(232): n is a, c, g, or t
  misc_feature (234)..(234): n is a, c, g, or t
  misc_feature (236)..(239): n is a, c, g, or t
  misc_feature (241)..(241): n is a, c, g, or t
  misc_feature (243)..(244): n is a, c, g, or t
  misc_feature (247)..(250): n is a, c, g, or t
  misc_feature (253)..(253): n is a, c, g, or t
  misc_feature (255)..(258): n is a, c, g, or t
  misc_feature (261)..(261): n is a, c, g, or t
  misc_feature (263)..(265): n is a, c, g, or t
  misc_feature (268)..(275): n is a, c, g, or t
  misc_feature (277)..(277): n is a, c, g, or t
  misc_feature (279)..(279): n is a, c, g, or t
  misc_feature (281)..(285): n is a, c, g, or t
  misc_feature (287)..(289): n is a, c, g, or t
  misc_feature (291)..(294): n is a, c, g, or t
  misc_feature (300)..(301): n is a, c, g, or t
  misc_feature (305)..(305): n is a, c, g, or t
  misc_feature (310)..(310): n is a, c, g, or t
  misc_feature (314)..(316): n is a, c, g, or t
  misc_feature (318)..(318): n is a, c, g, or t
  misc_feature (320)..(320): n is a, c, g, or t
  misc_feature (322)..(322): n is a, c, g, or t
  misc_feature (327)..(327): n is a, c, g, or t
  misc_feature (335)..(336): n is a, c, g, or t
  misc_feature (338)..(338): n is a, c, g, or t
  misc_feature (343)..(349): n is a, c, g, or t
  misc_feature (351)..(351): n is a, c, g, or t
  misc_feature (354)..(354): n is a, c, g, or t
  misc_feature (359)..(359): n is a, c, g, or t
  misc_feature (364)..(365): n is a, c, g, or t
  misc_feature (368)..(369): n is a, c, g, or t
  misc_feature (371)..(371): n is a, c, g, or t
  misc_feature (374)..(375): n is a, c, g, or t
  misc_feature (381)..(382): n is a, c, g, or t
  misc_feature (384)..(384): n is a, c, g, or t
  misc_feature (386)..(387): n is a, c, g, or t
  misc_feature (389)..(389): n is a, c, g, or t
  misc_feature (391)..(392): n is a, c, g, or t
  misc_feature (395)..(396): n is a, c, g, or t
  misc_feature (399)..(404): n is a, c, g, or t
  misc_feature (406)..(413): n is a, c, g, or t
  misc_feature (415)..(415): n is a, c, g, or t
  misc_feature (419)..(422): n is a, c, g, or t
  misc_feature (425)..(426): n is a, c, g, or t
  misc_feature (430)..(431): n is a, c, g, or t
  misc_feature (436)..(436): n is a, c, g, or t
  misc_feature (438)..(440): n is a, c, g, or t
  misc_feature (443)..(443): n is a, c, g, or t
  misc_feature (447)..(448): n is a, c, g, or t
  misc_feature (450)..(451): n is a, c, g, or t
  misc_feature (453)..(453): n is a, c, g, or t
  misc_feature (457)..(457): n is a, c, g, or t
  misc_feature (460)..(462): n is a, c, g, or t
  misc_feature (464)..(464): n is a, c, g, or t
  misc_feature (470)..(471): n is a, c, g, or t
  misc_feature (475)..(475): n is a, c, g, or t
  misc_feature (478)..(478): n is a, c, g, or t
  misc_feature (480)..(480): n is a, c, g, or t
  misc_feature (493)..(493): n is a, c, g, or t
  misc_feature (498)..(498): n is a, c, g, or t
  misc_feature (503)..(504): n is a, c, g, or t
  misc_feature (507)..(508): n is a, c, g, or t
  misc_feature (510)..(511): n is a, c, g, or t
  misc_feature (514)..(515): n is a, c, g, or t
  misc_feature (519)..(519): n is a, c, g, or t
  misc_feature (523)..(523): n is a, c, g, or t
  misc_feature (526)..(528): n is a, c, g, or t
  misc_feature (532)..(532): n is a, c, g, or t
  misc_feature (535)..(535): n is a, c, g, or t
  misc_feature (537)..(537): n is a, c, g, or t
  misc_feature (539)..(539): n is a, c, g, or t
  misc_feature (541)..(541): n is a, c, g, or t
  misc_feature (543)..(544): n is a, c, g, or t
  misc_feature (549)..(549): n is a, c, g, or t
  misc_feature (554)..(556): n is a, c, g, or t
  misc_feature (561)..(561): n is a, c, g, or t
nnnntngnnnanntaaaanaaaaannannnnncannaaaaangnaanngntnnttnagnnnnntnntnnnttcnnccnannnatnttttnncnnnaaaaanngntnntgntngnntggnggnngnntnnttttttgcancnncnncnannngnnnnnnannnnncnnnaanncnannnaagnnggantnatnctnntnncntngtnnnttnnnattnnttcnannttnccnntnannnntncnncgnnnnaanannnngtngnnnccnnnnnnnntncnannnnngnnncnnnnttttcnncggngtcgncggnnnangntnataanaaaagcannanaaaannnnnnngnaanaaaanaaaanncannantannaagaannantnnantnncannaannnnnncnnnnnnnnantgannnnaanncaannttgtnannnaangtgnntnntnaagnggnnngntgggannaacnccnancaaaaaaattttnttttnaagannganngnncgnngaangagngannnaaanaangncngncnnggaancaatnnnttttncgtaaaacaaaatttagggtttagcgcccgtatcgattttacaaaatcttttttgaagctttcccacgagccaggctagaccaaaagtgcctttgcgcttctgaaaaggtggaataacgccatattcttctcgcaggttctgttgtattaagataatccctgagcgtaaccggtgctgaaaatatgcttgcatctgctggattcaataccgctatttcgagtgcgagggtaattcgcgcatttcttttttctccactgttcttatgtgattattttcgtatagttcaaccttgcgcactcgcgtcaatcgcgtacaaacgctagttacaggtagggcactaggaatatgtttgcgaaatgctaaaaataattcgaatggtgttcacaattcctccccctttccttttgatagaagtcgcccttatgttcaaccgtgtttttctaaactctttctcgcagaaacactagcaggaagtataaaccaattcaagcaagtgctgataaagcccaagttataaagcccattaatggcgacccattcatcggaatgctggagacaccggtcacgtctgctcctatcgtatccaactttttatcgaatcttccagcatacagaactggggtatcgccattattaagaggagttgaagttggccttgcgcacggtttctttgtagctggacctttcattaaacttggaccacttcgagcatctgatgccgccgaagtagctggttgcctatctggtgctggtctcattcttattcttacagcgtgcttaagcatctatggtgccacagcttttcaacgtgatgatgttgtcggcgtgaaaactttgagtggacgagctatcaatcgtgatccgttgcaaacttctgacggttgggcttccttcacctcaggatggcttgtggggggattatctggcgtcgcatggtgttatatcctgacccaagtgcttccgtattactcttgatttcagtactgaaccttagaaatgaggtactagttgtaaatatgtccaccactagtatcatcattcctttcaaactacaaatatgtatattcttacataccaataatttcctattttcccggcaatgataatattgagctctcgaaagatcctttgatttgagtctttggaaatcaatcggagcagtgatattgagcattttcaagcatttttcacagaatagccacgtgctccttgaagttcctaaaaccaagtaagcgggacaaaaaaaagcaggacaaaagcgggaagagcgaataaatgccgagagagaacatggtatgaacaaaaaaatgttggcatttggcgccaccgcggatcgaacgcgggacctttagatcttcagtctaacgctctcccaactgagctatggcaccgctttacaactagtgttctagttcgcattcgggtcggaaggcatatttacaaagtaaatacatcttttattctataatttagggtattttagggtatcagctaacaagcatttcgcaaaagatacgagtatgcattcattaaacttttcgtcaatcgttatctcaaaagtacttatttacccgttttgataatttaaagaacacataaacacacaaactggaaagtagcagtgcacattcgtgcatactacatgagtgaagcggaaatacgtaagtatatcatattgaagttccaagaagggaaccgatcctcactttcatacttaatttttcggtaattgttgttctcagctgagctcgaatagtaagctttgaacggtcttaaaagtatattccttcagcatgacaaaaattaaagaagcccctgttttttatcctacacgaaaggatatgttaggctccttcgaaaagtacatagggaaaatagagtccgaacttgcacagcacgggattgcaagaatagttccaccacgaagttggcaaccacggcaaagtggatacaaaagcctgcaatttgtttcggaacaaccgattaaacagcatgtagtaggaagcaagggcttttttcgaacagttcttgtagaatgcaagccgacgtcgattcagaaagagtttaaagttagagcaggagcagctgaaaatcaaccatcacaagcagcattgaaagataactcacttttagaacgcgagttttggaaaaatataacaacttctcctcctgtgtattgcgccgatatacctggaacactgtttgatagaaatataaagggatggcaaatgtcagatttaaatactatcttaacacgtactttgaggaagaatggttcaaatataccaggtgtaagttctgcatacctatattttggaatgtggcgttctttatttgcgtggcacacggaagatgctgacctttacagcttgaactatcttcattttggggcaccaaagttttggtattcaattgctccatgtcatagggaacgttttgaaacattattacgtgggagattccctgaactatctagctcatgcccagaatttttacggcataaggagtttcttgtgtctcctacgattctccatcagaatggcataccattctatcgatccatgcagtatccgggcgaatttatcgttacttatccgggaagctatcatagtggatttaattgtggatttaattgcgcagaaagtacgaattttgctactcgcgcatggatacctatcggtagaagggcaaatatttgcaaatgtgtcagtgattcagttcgcattgatatgtctttatttaagtttgaggacagaaaaatcccacaacaatcagaagagcgtaaaacacggtctgggaacctgaattatactacgaaaaaaaaaaaacgaaagagtatctcttcgaatcattcaacgaaacaatgtgtatctaccattaagctaaagaaatcgatactgaaaggagctctaaaaagagtggcttgctccaggaaaagactcagatactcaaaattgcttgcgttattggagcaggatctaagccttactccaggatctcttaagaatatgaaagatgagttgattgttataaaagatttatatcgctgctgatgtccgggggaaccaaataaatttctgtctagttgcatgacttgtgtttattatatttgttaattagaacagaattcatgtattggaaatctatatattataacaaaagtgaacatcgtagcgatcacttggggcaaactttgacaaatacttaatgaagtaaaaatcatgctctttattctgaacgagtgaaagcgtattaaatgatgcctgtactgatattaattgctcttcatttgatgttgtatcatacacctcagcagttgcggcgatatcctcaacttcaggtgaagttggtatgaagcactcaaagcctccaaaattaccagacatccatgcacgatgctcatttattgaatccgctttaacaaaacataacgtggat

SEQ ID NO: 1098 - DNA, 4000 bp, Escherichia coli
  misc_feature (461)..(461): n is a, c, g, or t
  misc_feature (626)..(626): n is a, c, g, or t
  misc_feature (1292)..(1292): n is a, c, g, or t
  misc_feature (1322)..(1322): n is a, c, g, or t
  misc_feature (1469)..(1469): n is a, c, g, or t
  misc_feature (1583)..(1583): n is a, c, g, or t
  misc_feature (1589)..(1589): n is a, c, g, or t
  misc_feature (2696)..(2696): n is a, c, g, or t
  misc_feature (3366)..(3366): n is a, c, g, or t
tggcaagctggttttataacacccaatagacggcatctgccaaaggagcctttatgaaatttgcaattctgtttgctactggcgccgcctgccttgccactgccgcaatggccgataatgcgatccttgttcaatcaacaacgtcgacaaaaaacgccggtctttatgattatattctgccaatggtcaaagccgataccggcatcacggtgaatgtggtcgcggttggaaccggggcggcgatcaagaatgccatgaattgtgatggtgatgtccttttggtgcatagccggaaacgcgaagaccagttcgttgccgctggttatgccaagcagcgttatgatgtcatgtataatgattttgtggtgattggtccggcgggtgatccggccggcattgctagcggcaaggatgtcatcgctgcaatggtgaaaatcgccaattcgaaatcaaaatttgcntcacgtggggatgattcgggaacgcatagcaaggaaaaatccttgtgggcaacggcaaagattgatcaggcggcaagttcgggtgactggtaccgcgaaaccggctcgggtatgggtgcgaccttgaatgccgctgttggcatgggcgcctatgctttgagtgancgcgcctcatggggcgcacatgcgaataaggcagatttcagaatcatggtcgagggtgatcaaaggcttttcaacccctatggtgtcatgcttgttgattcgcaaaaatgcccgaatgtcaaatcaaaggaaggccagatatttatcgattggctaatttcggcaaaaggccaagctgccattgccaatttcaaattagatggtaaacagcttttttttccaaacgcacaatagattttcgattatggcacaagaagaatcttgccaatatgatcgcttgactccatcaggtgatgcgctgcggctgcctcagcaaatgaaaagattgcatatgtttctggtgcaatggtttggtctttaaattttggccaaacatgcatctctaatgatcggcagattgcagatttttcggcgatagaacgtggccgcaagcgcgcgcctgttacggtgagatgtttgctatggatctggccaaaatcgatctcggctatttttccaccgcgaagattgataatcatcaaacgcccaccatgggcaagaagcttgacctccttcggtaaataatcaccgccaataatatcaatgataacatcaacgccgcgaccgttagtcaggttacgtgccacttccacaaaatcgtcttttctataattgatcgcagcgtcngcgccaaatctgcgaattgccgcacatttngtttcgtttcgtgcagtggcaaaaacagtggcgccaaatgccttggcaaccttaatcgccgcaaagccaataccgcttgtgccaccttgaaccaatacggtttcaccagcttgcagctggcagcgatccatcatatttgtccatacngtgcagaaaacctcaggcaagcctgccgcatcaatgaccgacaccccgtcgggaatgcccatacattggccttctggcgcaatcgcatattcagcatagccgccaccaattaanagcgcncagaccatatcgcccggccgaaagcgttcacataattctccaacagcaacaatttcgcccgaaacctcaagccccataatgtcgggcgcaccgggcggcactggatatttcccctcgcgttcgcgcaaatcggcaccattgacgccggcggcatgcactttgatcaaaacgtcactccccgttgcaaccggcacaggaacagtgatgatttccaatgattctggtccaccagggatatgaacgccaactgtacgcatggttttttggtactgttgcattacggtcgtcctaattatgatctggaaagctttattgttggaaaatttgtcaatatttaacacgacaatcaagccgcagccacttgaaacaaaaatttcaaaaaacttggagatattttggcggaaactataagattttcgttgacatcaaaggtcaaattaacctttactcacctaataatttgaattcaaaaaaatcaaaaatctttcggaggaataaatgaaaacttacaaagtagctgcgctgagtatagcggctttgacactggcttctggcgccgcaatggcaggcgcccacggatcatacccttcaaagccagttaaaattgttgtcggcttttctgcaggtggcggcactgacatcacatccaggggttttgcatcttttcttcatgagtctgagagcatggctggacagcccgcatatattgttaacgttcccggcgcatctgggcagaagggtgcaaagcaagttcttggtgaaaagccagatggttacacactttacatgataaatattggcacctttatcgtcggggagttggcaaagggtgcggacgcaccatacagtgtaaaaaatgactgggaaaaccttggctgcatgtctcaacttgtgacctccatacaagtacatcaatcccaccctgcaaaaacaatgaaagaatttgttgactgggcaaagtctgatggaaaaacagttacttggggaacatctggcgcaacaacgatgcactctggaattggtgtgactttctttgaaaaacatggcattccccataagatggtgccattcaagggcggcgcaccggcaagagctgctctggtctcncaatctgttcaagctgtttttggcggcaacaatacaattgctggtttcgaagatattatgcgtccgttggcaactgctggtgccacccgcgactctacgatgaaggatcttccaacatttagtgagcaaggcatgtcgggagctgactttactggtctattctgcctattctcgccaaagggtgtttcggatgaagtcaaaactaaaattgacgctgctatccaagacgttgttaaattgaagggattcaaaggcttcatgaagaagaacaaccttggagctttctacaccagcccatcagacgcacttaaagctcaagatgctatgtatcaagcgatgatccctgtaatggaaaaattgacaggaaaatagaagaagcaattaaatagtcttttgaggggtgggccaagactagcctgccccttaattattcacgacagcattattgaaattgagtgcagaatgcaggatcacaaatacaaagtaaaaattgaatatggcgtagcagccatcgtggcctttattggaatattttttatttttcaggcgctaacgataaaaatatccaatgaagccgttggcccacgaacaatgcccatggcactggccattagcttagttttaggagcaatttggctatggctaagggcataccgtggaaaagtgggcnctgttcagtctggctatgggtttattgacagcgacacaaaaagaataacgctcgtaattggatgtggtgttttgtttgtgaccacattttggctttttggatttttcatgtccgtgattactggctatgttgcagcgctcttatcttttggtgtcaggagtgggcctaaaatcattatttcaacaattgtcatggcggtaatgcttcaatggctctttatgggcgtcatgaggttaaatgatcccaaaggagaattaattgacatgcggcctcttactgacttcataagtgggaactagttaagttatgatttttgcagatattattggaggctttcaaaccttctttgccgacccttttgctatctattttgtttttcttgccgcatttgttggaatggtatttggagctttaccaggactaacagccgctgccgcaattgcgatgatgttacctatccttattgtttacaatgatgtaattggcggtttgtcaggcctggcttttttgtacgtcgtagggaaatctggccgctacggtgggtctattgcggcaattttattcaacacccccggaactgcagcatctgctgcaaccatgcaggacggctatcccatgtcccaatctgggcgag

SEQ ID NO: 1099 - DNA, 4000 bp, Escherichia coli
ggctcgtaggcgaaggcgatcgtcccgttggggccgggacgcaacaccccgaagccgtcgagccggaactcctgcccgtgctgggcggcatggcgcacctcgaagacaaagcggtcgatctcgcccgcagcctccagttcaccgacgcccgcctctcgcagcaggccgcgcagcacaccgtcgtcgcgtttgagcaactccgaaaaaacaatgcttacgcccggctccttgacgatgaacgtcccgagctggggcacgacgagccgcttgtgcgacccgagatattgcgatatggtctgaaccaacacgattgaaatccacttttaaaatccggttcaaaaatacccttttccgatgaaaaaagcaaaattcggcacggattttcaaaataatcgggcaaactattggttatacgaaaaatattcgtttgatttgcatcccgaaatttcaaaaaatccggacaagctactttggcccgaaattacggatgtagcgaagacggattgccgaaacttacacgaaccagccatgaaagacaagtacattgacctcatcgaacagacgttcgacttcccgcaggatgagttctcggtcgaagacaacgagttgaatttccatgacatcccgctcatggaactgatcaaacagtacggtacgccgctcaagataacgtacctgccgaagatctcgcaacagatcaaccgcgccaagcgcatgttcaacgtggcgatggcgaaggtcgactacaaaggctcgtacaactattgttactgcaccaagtcgagccatttctcgttcgtgctggaggaggccatgaagaacgacgtccacctggaaacgtcgtcggcatacgacatacatataatcaatgcgctttacgacggcggcatcatcgacaaagaccgttacatcatctgcaacgggttcaagcgcccgcagtacgtggagaacatcgcccagctggtgaacgacggcttcgtcaacacgatccccgtgctggacaacaaggaggagctcgacctgttcgaggacgccttcaccaagaaatgcaaggtcggcatccgcatcgcctgcgaggaggaacccaagttcgagttctacacctcgcggctgggtatccgctacaacgacatcctcgacttctacaaggccaagctcaagaacagcaagaagttccagctcaagatgctgcatttcttcatcaacacgggcatcaaggacacggcctactactggaacgagttgtcgaagtgcatgaacgtctactgcgaactcaaagccatctgccccgagctggacagcctcaacatcggcggcggattccccatcaagaactcgctcaacttcgaatacgactacgaatacctgaccgaggagatcatcgcccagatcaagaacatctgccaccgcaacgacacggaggaacccaacatcttcaccgagttcgggtcgttcaccgtaggcgaaagcggcgcggcgctctactcgatcgtcaaccagaaacagcagaacgaccgcgagaactggtacatgatcgactcgtcgttcatcactaccctgcccgacacgtggggcatcaaccagcgttacatcatgctggcggtgaacaactgggatcgcgaataccagcgcgtactgctcggggggctgacctgcgacagcgaggatttctacaatgccgaatcacacaccaacgccatattcctgcccaagctcgaaccgggtaacacacaatacatcgggttcttccacacgggtgcctaccaggagtcgctgggcggtttcggcggcatccagcactgcctgatcccggcacccaagcacatcatcatcgaccgcgacaagagcgacaacgaatattatacgaggctcttcgccaaggagcaatcctaccgctcgatgctgaggatactcggctactaaggccgcagtcccggggctttctgccggcggccgctcccgccccgagaacggggcggaaatacatttctgcggaatatcgatgcattaatccgcaaaaaataggaataaccgaataatttgattacctttgtcagcataaacaagggtttatattgaattcttctttcgtgcgtatttgtttccgcggtactttggcggactgtcccatctcagaatagatctcattatcagcttctttgttcataaacggcctcttggaggcaacaggcatcggaggtgatgcaaaaagaaaatgatggtgatttttttacagacaagcacgaaatccatgtcccataattccgtataccgagggaaaggccgccgaatctggcaccttttctgctttcaacacaggtatcggacagcggaaacacgatgaaaccgacggatacagtcccgcgacaggggcgatagccgcataacaacatagaatggcaaaacgaataacgacaggtaaaagagaccgggaaaagctcaaggagcaaaaacgacaggaaaagcaaaaacgcaaggacgaacgcaaaagcggcggtacgagttctttcgaggatatgatagcctatgtggacgagaacggcatactgcacaccacgccccaggatgtcaaacccaagacggagatagacgtctcgcagatcgagatttcgacacccaagcaggaggaaatggaaatactgccctccacagggcgcgtcgagtacttcaccgcctcgaaaggctacggcttcataaaggatgccgacagcggcgaaaaatactttttccacatctcttccgcacctgacaccattgccgaaggagacaaagtaacatttgaaattgaacgcgggacgcgcggattggccgcagtacgtatatcaatcataaacaaacaataattaaaaacaagaacgatgaacatttatgtttcacatctgagctggggtacgaaaagcgacagcctgcagaaccttttttcacagtacggcgaggtatcctcggctaacgtaatcaccgaccgcgaaacgggccgctcgcgtggcttcggcttcgtggagatgcctaacgagaccgaaggacaggctgcgatcgacgcgctcgacggcaccgacttcgaaggcaagaccatcggggtcaatgtcgcaaagcccaaggcagacagacctgccggcggttacggcggtggcaaccgtggcggcggttacggcggcggctacggcaacaggagatactaagcttccatacggaatatatcacccctgcttcatgcgattgaggcaggggtctcttttttgcccggtcagtcaaggctatgaggaaatccacgaagggtgcagcgtatcggaaaggggcagacggacgccggagcatcgggagaaaggaggaaattgcaggccgcaccggccaggctggcatgccgggtcacacggggagcaccccagaatttcgcccgaatcacgacaaggctgaaagcagggcacacaccggatcggaaataaacaggaaaagaacaatcttccgaacaaacaactaacaaacgacgacttgcaagcggttatgcattgtcggccggtaaacaggatggaaacgcgtcgagcgacaaggaaccgagtttgcgaaccgtttcctcgaaattgtcgccgccgttgagcgcggctttcttgattttgctcttgtaattatagatcgtctgcggcgaacagcgcaggaaatcggcgatctggttcacgtcggaaaccccgagccggatcagcgcgaagatgcgcagttcggtgttgaggcgcccttcttcgggcgtatagcggctctggggattgagcagggcgttgaatttctccacgaaattgggatagaggttcaggaaggcacggtcgaaattgcggcacaactcctcttcctccctgccgggagcctgcaacgaaaggtcatgcaggcggtcgaattgtttattcctgatcttcaggtttatatcgcggcggtatttgtccagtttgttgatatagatggcgcactggttcatgaaataacccaggtaacgctccttgaccaggttcgc

SEQ ID NO: 1100 - DNA, 4000 bp, Escherichia coli
  misc_feature (1985)..(1985): n is a, c, g, or t
aaaaaataaaaaaaaaaaaataatcatgattatgtatttaaattaataagaaaaaaatatgtttaaatttatttaattgaaaattttattttatttattttttatatttatttttagttgtaaattatttatttaaaatgattaaattccataaataatttttaataaaaaaaaagtttctttcattaatatagaaatttcaatagatgttttattttttttttttaatttttcttttaataatattttaattattttgaaaaataatagaaaataggataatataattttaataatttatggaaaattaaaatttaacaattaaaattaatataaaacaaataaaatttttgatttatcataaaaatttgatatatatatatataaaaacttaaattaataatacttatattaaaatatgtaacttaaatttattaactatttaccgtttctacaatgacaaggaattaaaggtgctccaaagaattcacttacttaccttagtcaatggtatcttaaaaatgttgaacaagaataaataaaatataaaaattaaaaataaatagataaaaaaataattattattacaacagttatataaatgttataatataataataaattaattataaatattaaacataaaaataaaaatattattttatgtaaaaacttatatatatatattaatattaaatgtgttatgttatgagtcagaaatttatttgtcttccttaaattgacagaataagcagcttttatcataatttacaacactaatttatttttctttgactgacataatattgtctccggcaaactattgctatgaaatttatggcatataattatgtcaatttcattaatatattttatgataaagagttactagcatttaattattataaattaaatgcttttatcttaatacattgggagttatacgttatttatattactatatgattcaatatatttgaagcttatttttcatgtatttcacatattctaatagttaggtatatgatagtcaagaatatatatatatttctttttataattattgttgttgggtattgaaatttggtattttgaaataataatttgaaatttatttaattatagctctaaattttttatttaaattattaactttgtcataatattatatagaaggtataaattattggtctattaattatttattttatgttaaaaaaattaaattagtttcaatatttcacattaaatatttaattattattaaataataatattattataaaaattatatatttaaatagatataaataaaataaatagtaatttaaaatattctaacgtattaatcattattattaatattaatatatatatatatatattagattattacttttttttgtttaattataattaacattataagatttccatacaatattcttgaatattaataggaattagtaaattagtatcgttattctagtattacccgcaattaaaaaaatattattaattttacattttttttaatataaccaaaaaaggatataaatccgtaatattgattaaatatatttagtataaaaataaaaataataataaaaaataattttatttattgtaatcataatactcataataataataataatactcataataataataataataataatataataataataataataataatataataataataataataatataataataataataataatattagtggtaataattttaagagatttaattaactaaaacgttaattataaaaaagaaaattaatctttaactgctattgtggttaaacatttaaatactttaaaaattcagatcttatttaataactaaccttaaaaataaataatatttaataaaaatttcatatgctaagaaatataatttttaattttattaatttatttgtttttttcataattttttttaaaaactttaanaaattaaaaaaaaaaaaaaaaaaactattaaagttcaatatttaataaacaatatacatattaattattgtacattcattttttaataattataaataatgtaacctagtaatctcatagtaaattaaaaagaaaacatataaaattatatcttataaactttactttataatattttatttaattagaaaattacaaatttattaaatatgtaacacaatattaaaataatatattgttaatatttttttttatcatttatattctttcatatttataatatatgaataatatattttaatataatttaatatattatttaagtaatgaaaatgaaacaaaaaatttaatttaaattattattatttatataatatttattctatatagaaattattattttaaaaaaaatatataaataataatttatttcatctttttttatttctctaaattccgccaaattatttggttcaaaagaatttatattttatagatttagtttatttaattatagatatatttaataaaaaatgaagactctcgctgttttcactactttattagctgttaccactgctaagaaatgtattgttaaggaaaacaatgccgctgctaatgatgctgctgctgtttccgatgctgaagaagttagtgctgcacttgagaatccagaagattctgctgtagaatctgatggtgatgatactgataaaaagaagaagcttccatccgacttcaaatggggagctgctactgctgcttaccaagttgaaggtgcttggaatgaagaaggtcgtggtgaatctgtttgggatcacttcactcatctttatccaaagaatgttgaatctggtgatagatcaaacaaaaattccactaacggtaatgttgcttgtgattcttaccacaaattcgatgaagatgttaagatgatgaaaatcatgaatgctactcactaccgtttctccatttcatggccacgtcttttcccagatggtcaagctagaaaggttaatggtaagtggaatgttaatgaaaagggtgctgaatactatgatatggttataaacactcttattgccaataacattactccacttgctactctttaccactgggatcttccatatgaacttcataaaaagtatggtggttggttagattatcactctcaagatgatttcgctaagtatgccgaattctgtttcgaacgtttcggtgaccgtgtcaagaattggatcaccattaacgaaccatgggttaattgtgtttctggttaccgtcttggtccaggtaaagctccatatagatgtactggtgaagccccacgtaagctccaaaacgatactgctggtctcgatttagaaggaggttgttcttacgaaattggtccatctcaatactctaaggattctgaagttcttccagccaaccgtccaccacaaagattagaagatgtttggtgttcacacaacattcttcttggacatgctaaagctgttaaggtttaccgtgagaagttccaaaaggaacaaaagggtcttattggtattaccattgatggtgaagctcaaattccatgggaagaaccaggtatgtctgaagaagaattagaaaacaacaagaagtacgcaaacttagctgctgaattccgtattggttggtactctgatccaccaattgttggtgattacccagaatcagttaagcaaagaatgggtaaggatatgcctgtctttactgaagaagaaaaggctcttttaaagggatcatcctcagacttcttaggttggaacacttacacttctcactgggctgctcaagttaagaatgaagatggtacttacgttgaaccaccaactgatgaagaagccaactttgaaaactctaagagagatatgtgggatgataactgtaagggacgtggagatggatggacttgtattcctccaactcttggttctcaagctggttcatcctggaacaccaagtatggtccaactattcgtgtt

SEQ ID NO: 1101 - DNA, 4000 bp, Escherichia coli
  misc_feature (549)..(549): n is a, c, g, or t
  misc_feature (2271)..(2271): n is a, c, g, or t
cacgacattcaaggaattggaatgtacggagaattgaatcagccagaaataccgcaatacagagcagcgattagcatcattaaaacaattgaaaaattgacgtatagaaaattaggagacaccgaagaattggaaatgttagcacgagagatagaacaaaaatttaaaaattaatgagtagtaccgacttcgtgtgcaggggtgttttcatcatgacagtcacaactgcacagatgagttttgtgattattcatacagtcaatacactcaaaatgttttcgagtttcacacggagcacaaatcatataataatcatgattaatacatgaatttgaatatttctttagacatagaggaacaaaatgggttttttacacattcaaagaagtttcagagttaagaaaaacaggagatcagaacaatggaaaaaagcattgtcaaaatttattaaataatttaacaaccatccattaattgaaaatatatcacaaaacatcttgcatcacatgtaaaaaaacaattgcagaggcggagcgaatgaatctaganatagatgcaagggatttttttaaagatccattaacagagtcagagttaagaaaaatagtcaaaatgacagggaaaaagccattggaattacttcgaaaaagagataaaacatacaaagaaatggatttagaaaaaaatgaaaaaacagattcagagttaatcaaactaatggtaaaaaatccaggactgatattgcgtccaatcataattttaaaagataaggcgttggttgggaaaatagacgttaaaaatataaaaaactaaccagaattttctcggacaaaaattctaattgcttccaaatgagagcaatttgctgtttttccattaccgtgatgaaacttataataatttttgaagccaaggcactcacaggaatcagaagttacaaaatatgatttttcaggattcgaggtagacctaatttgaaacaaatctttttcgattttagacacgcatccagaatcaactagtttttgtgctttcttgattgttgcatcactgctcataacatcacgacaataatttagacattttaaccttgtttgaaacaactgcacatgagtgcaataataaaacacatgcaaacaagaataatctcagaatttaaacatattttgtttaattttttgttcatgcatttggcatcagcacttaatcagcaacatgacagcaaaacaagcagagatgctaaaaaacatgaaacacgaatgtacctaaaacaaatacgtcaaaaattataattttgattaatgttaaaaattaattaaaatgtttattttttattatgcagtaggtacagtgtacaaatttattaaattttaaattcaaactttgcaccgttgctttgaaagtatttttgtattggaaccctaatgtgtttttgagtgtatttagctaaaagggcattcagtattttgtcggcataactaaccaatattttttttcgctcccgtgttgtttgagatgaaagggtccccatttcctcatatatgttattttgaatcataacaaggtatgcacgatcaacatcatcctgtatacgttctaacaaatccaggcttttttcccttaaccgtatattgtcggatttcatgatagttggaatttgtttaataaaatttatttgagttttttgatttgattcaaaaaattccatcatttttaaaaaattaaactcactctgcacatcgtcattttttttatatatcagcttatttttgtcaggcttagtttgaagatagccaataagttccaggattttaagagcgctggatatagcagccttgtcaccgccaatttttcgaacaatatcatttgtcaatttccaattaccagttaattcgagtattttatcatcatatttggttgtcaatcagtatgattttcgaacccggtagttaaatcatgcccaaaatagaacgtaacgaaaagatgacagtttctaataatattataagctatttttatcaaaatacaatattgagtatgaaaaaatacattgccacacgcactgcaacaatgtttggcgtattattaattacattactaattacgatattgctggtaggttccaacatggatacgattctaaaacaaggggttgtttttcaagtacgatctgagattattgaaaatcctgcaatagcagaaagtttttcatcagttaaagattttgaagcattcatccaagatcaaacagatcaaagaataaaacatctnggattagatgagccgtggtattcgcctcaaagaattggacttaccatgtacaagatagtcctgttggattttggacaggctacatttctcacaagtgattcaggatcttcggatgtaaaagatattatttttgaaaagttgccaaaaacaattctgctattcacgtcagctacagtgattatttccataataggaatatttgttggtgcgctagctgcaagcaaagttggctcgatagtagatagaattacatcgagttttgcaataatcagctccagttttccagtgtggtggattggaatgttaatgatatttttattcgcgttcacgtatcaaattttcccagcaagagcgactccggacattccagcaacaagtccagaatacctgggagctttgttgtatcacatggcattgccgctaatcacaattgtaatgatcgggtttggatcttgggcatatctggtaaggaatttcatggtgggcatcatgcaagaagatttcatagtagcaaaaaagacaattggaattaaacaaagcaagataacgtacactcatgccttaaaaaatgccgcgcccccaataattacaattctagcacttagtttgtcaggatcacttggaggggcgataatcacagaggccgtatttgattggccaggtatgggaagactatactttgaggcaataacagtcatggatttgccagtaattatcggtgcgacatacatcttgacagtattttttctagtaagcatattcattgcagatttgctttatggctattttgaccccagaatacggagcagtgcaggcgaatagcaatgagcaacataacaccccaggagataaagaaggagtttcttaaaagtaaaatgggaattgcaggaattgtaattcttacaattttaattttaacatcaatcatcacaatgatcataattccaatagaaacttttcaagaatggaacaatcccgaaagttggatcacttatccaaaagcggcaattccaatttgggtaaacttatttttgacagaaaaaattccggagcataaaattctagcagagcccaacattgaaacaatgtttaacgacgaaataaatctaacgtcgtatcaatttaatgtaaattttaattatgatcaatttccaaaagacttcatctactcatatttgttagagtattcaggttccccgctgattcaagtctcagtgatcaggccagacggagttaaactggaattggtttcaacgtcactgccgcattcagatttaaaaacaattcatagcgacagaatgttttcaactgacgccatggttaagaaggagttggttctgcaagaagaaaaatttgaattcgaaataaacgaattgtctgtagaagacattgttttttcaaaaacagaatcaaacaaaccactaaaaggaaactatgtttttttagttgatttttatgaaataaacgaagaaagcaaaattattgattcaaaattaatcataggcggtaaggcttttggcataatgggaacagatgaattgagaagggatttggcaataggactattgtggggaacgccactagcgttgttcataggtcttgcagtgtcaattggctcggtagtgatgggattggtgtatggaatctatgcagggttcaaagggaaaaaaacagatgaaaccatgatgagatttaacgatgttctttatgcgttgccggcgttgccttt

SEQ ID NO: 1102 - DNA, 4000 bp, Escherichia coli
  misc_feature (78)..(78): n is a, c, g, or t
  misc_feature (197)..(197): n is a, c, g, or t
  misc_feature (546)..(546): n is a, c, g, or t
  misc_feature (780)..(780): n is a, c, g, or t
  misc_feature (1984)..(1984): n is a, c, g, or t
aaatatgttaaaatatacatatagctaaattttagaaatgaggtaactatgaaaagaatattttctgccggcagaggnctggcttttatagtttttatgacggtttttttgtttactggctgtgggcagagtgctgaacctaaatcggaagtaaaaaatccgacattgcatgatgcggctgtaaaaatggttgccgntatgagtttagaagaaaaaatcggacaaatgctgctgatcggtattgatggtacggaaatagacgagggtgcgttgagcatgctgcgagattatcatgttggcggcgtgattttatttgaccgcaatatgaataataaatatcaggttacaggactgaatgctaacctgcagcgactgaataaagaatataataaattaccgctttatttatgtgttgaccaggaaggcgggatggttgccagaatgaagcaggggttgaccgttgctcctgcagcagccagaatagctgaacagggcactcctgaagatgcacgtcgctgggcttaccagacagctatggaattgganacgattggtttcaatgtaaattttgctcctgttttagatattggtattccttatggaagatcttatgggcacgatgctgcgtccgtgagcaagtttaccgaagcggcctgccgtggttatgatcaggcaggaattatttacagcttgaaacatttccccggtatgggaaaaagtgaggtcgatccgcatacagaacaatatcggattacagcttctaaagagattttattgcangaagacacaataccatttaaaaatattatccaaaattttgacaaccaggattttatggttatggtagggcatttgatttatacaggactggatacattgccggccagtgtttcacctcaggtaatcaataattttctgcgtaatgagcttggttttcagggtatcgtcattacagatgatatggaaatgggagctttaacaagtatgtatggttttcgtgaaatgggggttgcagcagttcaggccggagttgatgttttgctggtttgtcataattatgaacatcagcagcaggtttatcagggtgtactggaagctgtaaaaacaaataaattgacaacagccgctattgatgcagcagctgtaagaatagtggaaaataaaatgattaagttattagatgcaggcaaacaacaggaattgttgaaggacttgcagaaagaggcgcagtaaaaggagtcggaagtgggaaaaaacttaggaaaaattatatttttaaatgctgtaggtttaacaatattttttagctggtatttacctgctgaacatggtttttggtttacattggataaaagcattttctattactttaatgaacagcttcaacctgaaagctcttttacttattttgtcggtctgactaatgtacgtcatttcgatataatttctttaatggctatgttggcattatatggttattattattctaaacaggatcatttaggtaaacgaaaaatgtggtttatcggtgtcacgatgctgttttttgcggtaatattaaatcagctggggcatttgattcctgtacagcgatgcagtccgacaggattttttgaaaatattcatcgtgtcagtaaaatgctggtttttaaaactaaggattattctggcgacagttttccaggcgatcatggtctgatgctgatgatttatgccggtttcatgctgagatattttggcaaaaaagcttttgccgtcagctgcattattttaataatttttatgctgccgcgtattatggccggagcgcactggtttacagatattgttgtaggttctttaagtatttctttggttggtttgagttgggttttactgacgccggtgagtgataaatgtatagattttttaaataaaatttttccggataaagctgtaaaataatttttaaaatatcctgtcaaatttgacaggatattttttnaagcaatagggactttaaaagtcccgtgggtgacaaaaaatgaaatttttcttgtaaaaactataaagtaagttctttttttgtaaagaatgtgataaaattactaagtataacttagaatttttgtttaggatgtgaaatgatggaatttttcaaaacagcggatgtcgttgttatcggcggcggtattgttggtactgcaattctgcgtgagttgtcgaagtatgatttaaaatgcgtgcttgttgaaaaagaaccggaccttgctgcaggtactacgaaagctaacagtgctattttacatgctggttttgacgcgccgacaggcagtttaaaagcagttactaatgtacgcggcaataaattatatcatgagctgcaaaaagaattaggtctggatattgaatggacaggttctcttgttgctgctaccagtgaagaagaaatgcagactttacaggaattattggaacgcggtcagaaaaacggcgttgaaggcctgcgtattttaaatagagaagaagttttagccaaagaaaaaaatctgacaacagttgttggcgctttatgggcgccgtcggcaggcgtttgctggccttttgccatggctgtggcttttgcgcaatgtgcagtgcagaatggcgctgaagtagttacggactgccgtgtaactggatttattaaggaagctggcagaattacggctgtagaaacttcaaaaggtttgatcaaggctgcttgtgtcataaatgccggtggtgtttatgcagatggtatcgctcgtttggctggcgatgaaagcttcactattcatccgcgccgcggcgaatatattctttttgataaaactgctgcagccagtttggttaaaggcgttgttttcccaacacctaataaaaagtctaaaggtatactgatctgtacgactacgcatggcaatacatttatcggtcctaatgcacaggatatggagaataaggaagatactgccgttactctgacagggatggacgaaattatgaattctgccagaaaactgattccaaatttgccgatgggtgcttcgattactgaatttgcagggctgcgtgcagtttccggcagcggagattttgtcatcggcgcttcacctgtagcaggtttgtttaatgctgcagggatgcaatcgcctggactgacagctgctccggcagtagccgaaatgattgttgaagctgtgttggcatattgtccggccgctgtaaaagctgattttaaagctgctttaccgcaaaatcctctttttcatagattgtcacatgaggagcaggcaaagcttattgaaaaaaatagattgtatggccgtgttatctgtcgttgtgaaacggtcacggaagcggagattatcgctgctatcaaagcgccctgcggagctaaaacagttgacggtgttaaacgccgtacgcgtgccggtatgggacgctgtcagggcggtttctgcggtccgcgcgttacccagatcctggcacgggaactgggtatacccgtaccggaagttttgaaagaacgtgctgattctcatttgttttatgaaaaaaactctgcagatgagggggaagcataaaaatgaaaaatttatatgacgtaattattgtcggcggtggtccggctggactttctgctgcttatagcgcttggcagaatggtgctgaaagtattttggttattgagcgtgaccgggaattaggcggcattctgcagcagtgcattcataatggttttggcttgcatcattttaaagaagagctgactggacccggatatgcttatcgttgcattgaaatgatcaaagataaaccggaaatagaaaccttggttgatacgatggttttggaagttttgcaggacaaaacggtaattgcagtcagccctgaacatggactgctgaaaattgcaggcagaaccgttattctgactatgggctgccgcgaacgtacacgcggtgcgatcagaattccgggtgaacggccggccggt

SEQ ID NO: 1103 - DNA, 4000 bp, Escherichia coli
  misc_feature (295)..(295): n is a, c, g, or t
  misc_feature (1106)..(1106): n is a, c, g, or t
  misc_feature (1265)..(1265): n is a, c, g, or t
  misc_feature (1313)..(1313): n is a, c, g, or t
  misc_feature (1950)..(1950): n is a, c, g, or t
  misc_feature (1988)..(1988): n is a, c, g, or t
  misc_feature (2029)..(2029): n is a, c, g, or t
  misc_feature (3639)..(3639): n is a, c, g, or t
  misc_feature (3815)..(3817): n is a, c, g, or t
  misc_feature (3819)..(3819): n is a, c, g, or t
  misc_feature (3821)..(3829): n is a, c, g, or t
  misc_feature (3832)..(3832): n is a, c, g, or t
  misc_feature (3834)..(3835): n is a, c, g, or t
  misc_feature (3841)..(3842): n is a, c, g, or t
  misc_feature (3845)..(3859): n is a, c, g, or t
  misc_feature (3862)..(3862): n is a, c, g, or t
  misc_feature (3866)..(3866): n is a, c, g, or t
  misc_feature (3868)..(3868): n is a, c, g, or t
  misc_feature (3872)..(3875): n is a, c, g, or t
  misc_feature (3878)..(3882): n is a, c, g, or t
  misc_feature (3884)..(3884): n is a, c, g, or t
  misc_feature (3886)..(3887): n is a, c, g, or t
  misc_feature (3892)..(3894): n is a, c, g, or t
  misc_feature (3898)..(3898): n is a, c, g, or t
  misc_feature (3903)..(3911): n is a, c, g, or t
  misc_feature (3914)..(3915): n is a, c, g, or t
  misc_feature (3917)..(3917): n is a, c, g, or t
  misc_feature (3919)..(3919): n is a, c, g, or t
  misc_feature (3921)..(3924): n is a, c, g, or t
  misc_feature (3927)..(3927): n is a, c, g, or t
  misc_feature (3930)..(3931): n is a, c, g, or t
  misc_feature (3933)..(3936): n is a, c, g, or t
  misc_feature (3939)..(3942): n is a, c, g, or t
  misc_feature (3946)..(3948): n is a, c, g, or t
  misc_feature (3950)..(3953): n is a, c, g, or t
  misc_feature (3957)..(3958): n is a, c, g, or t
  misc_feature (3962)..(3963): n is a, c, g, or t
  misc_feature (3965)..(3965): n is a, c, g, or t
  misc_feature (3967)..(3967): n is a, c, g, or t
  misc_feature (3970)..(3972): n is a, c, g, or t
  misc_feature (3975)..(3977): n is a, c, g, or t
  misc_feature (3979)..(3979): n is a, c, g, or t
  misc_feature (3981)..(3986): n is a, c, g, or t
  misc_feature (3988)..(3998): n is a, c, g, or t
  misc_feature (4000)..(4000): n is a, c, g, or t
catcaatattgggttgaggccattcgcaaaagctttgctggtcacaaagcgggtttgtggcatgggtccatcaacggcatcaacaatcagtaaaacagagtcgaccatagagagtatccgctctacctcaccgccaaagtcagcgtgcccgggcgtatccacgatattaatgcggtggtcatgccattcaagcgcagtattcttggcgagaatagtgattcctcgctctttttcgatatcgtttgagtccatcaaacgttcgccgtcttcctcgccacgctggagcgcaccggcntgcacaagcaacttatcaataagtgtggtcttgccatggtcaacatgggcaataatcgcgatgtttctaatgttttgaatcatggtcactccagacgaagacgcggcattatacaggttgacacggatgattaaagtccggacaccgaacagtaaaacccgtttttatgggttataattaatcgttgccagtaatcggcccgatgatatggctatttgtcactttgacaaacgatactggtgcacccattaattcaggccaagcgcactggatcagtgcttttgttctataaatgagcaaataagttagtcaaagcaaatcaacaaaaagatcaccattaaacaccatgagcaaacagcgcaaagcggtctccctcatctcaggcgggctcgactcaatgttggcaacccgcgccattcaagatcagggaattcatgtcgagggcattaacttctacactgggttttgtgtcgagggtcacacccatgccatacgacgtaaggataccgataaagagaagcggaacaacgcactctgggtggcagagcagctaggtatcaagctgcatatcatcgatgtcattgaggaatataaggaagtactcatcaatccgaagcatggctacggtcagcacctcaacccttgccttgattgcaaaattttcatggtcaacaaggcgcaagcctgggcatggatggaagaaaaccagtttgattttatcatcactggcgaagtcatcggacagagacccaaatcccagaggaaagcgactatgcctatcatcgcccgggaatccggcgcagatgatcgnttactccgcccgctctgcgcaaaaaacctgccgcctacgctacccgagcgcgaaggttgggtagatcgagaaaaactttttaaatttggtggtcgcagccgaaaaccgcagatggaactggccgccaaattcggattcaccgaatattcccaaccagcnggcggttgttgcttcctgactgatcagagctattcagacaaactgggngacctctggcgcacgaggggcagcaagaattacgatctcgacgacatcatgctgctaaaagtcggtcgacatttacgacctaaaccacatttcaaaatcattgtcagtcgagaagagggagagaataactacctctcgggatacaagaacgaatacacaaccgtcagcattctgtcgcacaaggggccgattgcattactcgatggcgacttcagtcgagaatcctctgaggaggatatgaatcttgcagccagcatcgttgctcgattcagccaggggcgtgatgaaaaagaagtgaaggtgctgatcaggcaaaaagacggtgttgaaagagaattgatggtgacaccgctaccacaatcatccgtcgatcccgattggtatgtttgaatagacacttacttaacactttttcaccccatgacagagcaaaagccaacagtccatgaattaaatgcccgcaggatgttatgtcccttgccggtcattcgcacacaagacaaaattaaaacactctctagcggcgaaattctgagagtgatttgcacagacccgggtgtcaaagcggatatacccacctggtgcagaatcaatggccatctggtgctgaaaattgaagaaaagcatcaggagattnatgtaacgatagaagttggcaaccaataaacgcaccgncatggtgcgccttcacaaggctgcaccgttttggcgcgttnaggaaacatcgaaatcctctctagcccttttaaagtgcggattttaaatcagtttattaataggcaatcatggcatattctttgctcccataaattcacgaaagtttttgcgtagaacttgcagtaaatattcaagtaaccccaaccggagaacatgacgctatgtcacaaaagacactcaacctaataaaagaaagcgatgcgaaatgggtagacctacgtttcactgaccctcgaggtaaagaacaacacgtcaccaatcataaagactctgtcgatgaagacttttttgaaattggcgcaatgttcgatggttcatctatcgccggttggaaatcaatcaatgaatcagacatgattctgatgccagatgactcgagcgcagtcattgaccctttcacagaagaaacaacggttaatctgcgatgtaacatcgtggagcctgccacacttcagggttacgaacgcgatccacgttcgcttgcgcaacgtgcagaggcctacctcaaatctaccggcattggcgataccgcttactttggacccgagccagagttttttgtttttgacgaggtcaaattcaaaaataacatgagcggcgccatgtatgaaattggttccgaagaagctgcatggatgagcggcagcgacatagagggcggcaacatgggtcacagacctggtgttaagggcggctacttccctgttcctcccgtcgattcgctctacgatatccggaattcaatgtgctcagccatggaagcgatgggactcaagatcgatttgcaccatcacgaagtaggcaccgctggccagtgtgagattggcgtgccgttcaatacactgacccaaaaagcagacgaagtgcagatctacaagtactgcgtcctgaacgttgcacacgcctatggcaagacagcgacgtttatgccaaaaccactggttggcgacaacggcaatggcatgcatttgcaccagtcaatctggaaagacggcaccaaccttttcgcaggggacggctacggcaacttgtctcaaaccgcactgcattacattggcggcatcatcaagcacgcgagagcaataaacgcgttttcaaatgccagcaccaattcctacaagcgtctcgtgccaggtttcgaagcacctcttatgcttgtttattcagcaagaaatcgttctgcttcgattcggattccttacgtgcaaggcggcagccctaagggtgttagagtagaggttcgatttggcgatccaactgcgaacccttacctcatgttctctgccatgatgatggccggacttgacggcatcaagaacaaaatcgaacctgtcggcccgctcgacaaagacctttatgatctgcctgccgaagagctatctggcctgccaacggtatgtagctcacttgatcaggcacttgattgcctcgatgctgatcgtggattcctcaccgaaggtgacgtatttaccgattctgtcattgatggctacatcgatctgaaacgagaagagaccgagcgccttaattcatcaactcaccctgttgaatttgagatgtactacagcgtttaaacgctggcgatttatcgccactgtttttggactanaagaccccggatcaaaacgacccggggttttttttgtcttaaatccccataaaatgacatttgcaccataatggtgcaaaatgatttttaaggttttgccggatatccctatttcaagggcctgacgctgatatcgcaaggtggtacaaaacttgcgatagctatttattgtagcnnntnannnnnnnnnttnanngcagcnnttnnnnnnnnnnnnnnncgncagntnttgnnnncannnnnangnnacagnnntggnacgcnnnnnnnnnatnncnanannnnacnaanntnnnncannnnaagnnntnnnnaaannaaanncnangannngcnnntnannnnnnannnnnnnnnnngn

SEQ ID NO: 1104 - DNA, 4000 bp, Escherichia coli
  misc_feature (3683)..(3683): n is a, c, g, or t
  misc_feature (3693)..(3694): n is a, c, g, or t
  misc_feature (3696)..(3697): n is a, c, g, or t
  misc_feature (3700)..(3701): n is a, c, g, or t
  misc_feature (3703)..(3703): n is a, c, g, or t
  misc_feature (3710)..(3710): n is a, c, g, or t
  misc_feature (3713)..(3714): n is a, c, g, or t
  misc_feature (3717)..(3718): n is a, c, g, or t
  misc_feature (3720)..(3720): n is a, c, g, or t
  misc_feature (3723)..(3723): n is a, c, g, or t
  misc_feature (3725)..(3725): n is a, c, g, or t
  misc_feature (3727)..(3727): n is a, c, g, or t
  misc_feature (3730)..(3730): n is a, c, g, or t
  misc_feature (3733)..(3734): n is a, c, g, or t
  misc_feature (3737)..(3737): n is a, c, g, or t
  misc_feature (3742)..(3742): n is a, c, g, or t
  misc_feature (3744)..(3745): n is a, c, g, or t
  misc_feature (3749)..(3749): n is a, c, g, or t
  misc_feature (3751)..(3751): n is a, c, g, or t
  misc_feature (3757)..(3759): n is a, c, g, or t
  misc_feature (3761)..(3762): n is a, c, g, or t
  misc_feature (3768)..(3769): n is a, c, g, or t
  misc_feature (3771)..(3772): n is a, c, g, or t
  misc_feature (3774)..(3775): n is a, c, g, or t
  misc_feature (3777)..(3778): n is a, c, g, or t
  misc_feature (3786)..(3786): n is a, c, g, or t
  misc_feature (3788)..(3790): n is a, c, g, or t
  misc_feature (3794)..(3796): n is a, c, g, or t
  misc_feature (3799)..(3799): n is a, c, g, or t
  misc_feature (3801)..(3803): n is a, c, g, or t
  misc_feature (3807)..(3807): n is a, c, g, or t
  misc_feature (3810)..(3810): n is a, c, g, or t
  misc_feature (3813)..(3813): n is a, c, g, or t
  misc_feature (3815)..(3816): n is a, c, g, or t
  misc_feature (3818)..(3818): n is a, c, g, or t
  misc_feature (3821)..(3823): n is a, c, g, or t
  misc_feature (3825)..(3826): n is a, c, g, or t
  misc_feature (3828)..(3828): n is a, c, g, or t
  misc_feature (3831)..(3833): n is a, c, g, or t
  misc_feature (3835)..(3836): n is a, c, g, or t
  misc_feature (3841)..(3842): n is a, c, g, or t
  misc_feature (3850)..(3850): n is a, c, g, or t
  misc_feature (3853)..(3853): n is a, c, g, or t
  misc_feature (3863)..(3863): n is a, c, g, or t
  misc_feature (3872)..(3872): n is a, c, g, or t
  misc_feature (3877)..(3877): n is a, c, g, or t
  misc_feature (3879)..(3880): n is a, c, g, or t
  misc_feature (3882)..(3882): n is a, c, g, or t
  misc_feature (3886)..(3886): n is a, c, g, or t
  misc_feature (3892)..(3892): n is a, c, g, or t
  misc_feature (3894)..(3895): n is a, c, g, or t
  misc_feature (3899)..(3899): n is a, c, g, or t
  misc_feature (3902)..(3905): n is a, c, g, or t
  misc_feature (3907)..(3907): n is a, c, g, or t
  misc_feature (3909)..(3909): n is a, c, g, or t
  misc_feature (3911)..(3911): n is a, c, g, or t
  misc_feature (3916)..(3917): n is a, c, g, or t
  misc_feature (3921)..(3922): n is a, c, g, or t
  misc_feature (3924)..(3926): n is a, c, g, or t
  misc_feature (3928)..(3931): n is a, c, g, or t
  misc_feature (3933)..(3934): n is a, c, g, or t
  misc_feature (3937)..(3942): n is a, c, g, or t
  misc_feature (3945)..(3952): n is a, c, g, or t
  misc_feature (3954)..(3954): n is a, c, g, or t
  misc_feature (3956)..(3957): n is a, c, g, or t
  misc_feature (3959)..(3962): n is a, c, g, or t
  misc_feature (3964)..(3968): n is a, c, g, or t
  misc_feature (3972)..(3973): n is a, c, g, or t
  misc_feature (3975)..(3975): n is a, c, g, or t
  misc_feature (3977)..(3977): n is a, c, g, or t
  misc_feature (3979)..(3980): n is a, c, g, or t
  misc_feature (3982)..(3989): n is a, c, g, or t
  misc_feature (3992)..(3994): n is a, c, g, or t
  misc_feature (3996)..(3997): n is a, c, g, or t
  misc_feature (3999)..(4000): n is a, c, g, or t
tgaaactatctaaaagcgaaatccctcaaatatatgtcaatctaattgaacaagctaaaagtttatgctgatgtatcaaaacgaaatagaaattataaaatctcggattgagaacaaacaccaaggggatgaaaaacaattagaaattattttttctcctaacaaacgattattagttgaagcacctgctggctatggtaaaacacatacaatggtaagccggatagcctatttaatatctatcggcaagctacctgttccaaaaaaacttttagcattaacttttagcgtaaatgctgcatataaaattaaaaaagatgtaagtaagaatattccagaactattgcaggatttaggcaagcaaattaatattaaagaaaaaatatatgtatctaattatcatggtttctgtcgaagcattttaaaaaaatacggtcatagactacatcctgcattgtcgaatttagatactctacaatccgttgatgatagtcgaagtgatagtataatgcgagtatttaataatatttcaatagatgaagcgaatgttttgtcagaattcaacgccggagttaaaaacataaaaggaaagtatttaaaagaaaatattgataaatataattctattgtcatctccaaactattaataaagaatgccattccatataatgcaattattactttaacaattaaattgtttaaagaacaaattggaatattagaattttaccgaaattattatacatcaattctcgtagatgaatttcaagataccaatctactaagttattggctattgaatttcttaattacagataaaacaaatatattgctattaggagattctttacagcgaatttatggatttataggagccgtacccaatttactttcacatgcacaaaatacattcaatttacaacttatttcattggagaagaattatcgttttgcatccaatgagaatatgcttcaattggataaaataatacggcaaaatgctattactccttttgataaccctaatagcttaaaatccaaggtggaatttaatatctatgataaccaagaagaagaagctttacaagttgtaattaagtcacaaaaaatattacaaaacgattcctttgctaaagttgccatacttgcaaagcaaagaggacctaatattgagcatattataaaaactttcaatcacaataagataccattcttttatggattatttacagatgaagactctgaatatataacattcaacagaaaatgtctgtatgaatttattgaattactaaaatcaaattcaaagattactaaaaagatagggaaaaaacatattgataaaatacgagaaatatatattaacaatgattccgtacttgttaaagctcttttagaattactcgaaattttttgggttcagctttttgtcgattattcgtttttatctaatgaagataaaattaatctgattaaagatacctttgaacataatggtataaaacaatatatggaattcttaaatacgtctataataatctctacggtacatgcagcaaaaggtttagaatgggattatgtaatacttcctgatatggaaaaagattcatttcctaactggtatggattatgcggtagatgtaaaaatggaaatgactgtaattttgtgatgactaaagatatagaaaaatcattctttgaggaattaagtgtattttatgtagcagttactcgggctaaaaagcaagttttttttacggcaagtcataaacaactcacaaataggggcatttttgaaaaaaattatagttgttttatgaaattgccaggtattgaatatatacaaacagtatagagagacagaaagtattattggctaaccaacagctagtcagaaggcattggttgctaataatttttggggaatataggcgggtttctttgctactttatttcccggcactcacgaaagaaagtagcggcggcaaacagccgccgttctctatcaactggttttaaggctccttatggacgtgtatttctctaaccacacctttacctgttccatgttgtattcgcccgtgataattgccgtatggtcgtttatggctacaaaccggacactctcgtggctgtttacccagccttgcagggaacagacgccccacgtgtccacatcttcaaaaacactgcggtctatccggctgattggctcgccgaaaactaccgtcattatctgaaagtccggcttatctgccagcagttgcaaatggtgcagcgtgccgaaatcgtcaattttgcgcccccacgcccacacatcattatacaaatcatcgccccattggtgcgggtggtcgaaacggacttttacctctatggtgtgttcgttttcttctgtgtcctcgataacgcccgttaccattaagcccgtaaaaatgcactcgcaacgcctgccgataagctccttgtttacttctgtcgttttcatgcccccaaaatttacttgtttattactccgttcttctttgctatccacccgtcacgcctgcggcggcactcgtccagcgttttggctaccgtgctgaaaagttcgccgtccgtgtggcggtagtcatattgaaaataaatctgtcccctgaaagcccctaaatggcatttcacgaacttttcttctcccggtgtctgggtgatgcttaccccgtttttgttaagtgactgcatgatgtcttatttttttatggttataaacttggttgtttttagcgggcagggctttgacaccccgcccggattggttgttatgccgcccggaacacaaagccgtcatcaaaccagtaatcgcacatgaacaggtcacgggcgaactgtttgtaatcgaaataggtctttgcgaactccggcaggtcgtaacattcttctataatttcataggcgaaatcttcttcatcgtcatattccccttgatattcatcccggaaatcccgtacaaggtcgtccgcatcttcctcgcccaaatcatggcttttatagttgcaccacacgaaaaaggcttcctgctcggtgtcgctcaaatcctccaccgcatcacgcagggcaaagaagttttcagaaatccagctttcgtcgattaagccctccggcacgttctcccagtcctgaaacatgtattccgcatcttcctcgtccttgtgaagttcccggcaggcttcataaaattcttccttgtccgaatagtccgaaaggtcgagccatgcgccggacaatgaaccgttgttgtacttgacataagtgcctacataaacttttgcttccgataatacctttgcttccatattgctgtaattttttaagtttttaattttatgcggatttgagaggtgagggagttgaagtttcactgaacttttttcctgtttcccgtaaatccgactttttttttatgcgtcttccggtcgggtcggtcgttttcgtttcacataggcgtaaaagggtagtgtttagagtttgcaaggttttgggcaaaaaatacctcgcaaggcagggaagattttttcgccaaaccggaacggctcgaccttgcaaaatcgtgaagaacacgtaactacctttgcctattgaaatgattaaaacgactgtcccggctgggggactgcgtaagaggaagatttacagatagggaaacnggggaaaagnncnngtnntntttcatnttnnagnnancantncntgnggnnggnaaagncnngggngntgtgannntnnttgcannanncnngnncgggtttncnnnggcnnnttncnnngaanacngtnanncntgnnncnnanggnnngnntttcnnggaatgtnccngttggaaaangatataaanaatgngnntngtcngtggantnnccgnaannnngnanantgtanntcanntnnntnnnntnngtnnnnnngannnnnnnnancnnannnntnnnnnattnntntntnncnnnnnnnntgnnnanntnn

SEQ ID NO: 1105 - DNA, 4000 bp, Escherichia coli
  misc_feature (342)..(342): n is a, c, g, or t
  misc_feature (809)..(809): n is a, c, g, or t
  misc_feature (868)..(868): n is a, c, g, or t
  misc_feature (2681)..(2681): n is a, c, g, or t
  misc_feature (2714)..(2714): n is a, c, g, or t
  misc_feature (2732)..(2732): n is a, c, g, or t
  misc_feature (2738)..(2738): n is a, c, g, or t
  misc_feature (2741)..(2741): n is a, c, g, or t
  misc_feature (2762)..(2762): n is a, c, g, or t
  misc_feature (2765)..(2765): n is a, c, g, or t
  misc_feature (2807)..(2807): n is a, c, g, or t
tagtaactgattatattggtagttgttttttgaagatagcaaatcacttatcttatagacctaactttatcaattatacatttagggacgatatggttagtgatggtatcgaaaactgtctacaatacctagataattttgatcctgctaaatcaagtaatcctttcgcttactttacacaaattatatattacgcatttataagaagaatacaaaaagaaaagaaacaaactactatcaaacataaactaattatggatagtaactatgatgattcggcactacaaccaggtgatgatgctgaatttaagaatcaatttagagactttttacaaaagaacntaaagatggaagatacccctatcaaaaaagttgaaaagaaagtcaaaaagaaaagagtaagaaaatctacatctaaattattcaactaaattatgaaaattgctttgttaaacgacacgcactttggtgcgaggaatgatagtccagcatttttggattattttatgcgattctataatgagatattttttccatatcttaaagagaataacataacaacacttgtacacttaggtgatgtagtagatagaagaaaatttatcaactttaaaacagcacacacatttagagaagactttatgcaccgattgtataaagagggtattgatactcatattatattaggtaaccacgatacttactacaagaatactaatgaagtaaatgctatcaaagaactatgtacaacctttgatggaataaaagaaccttggatatatgaaaaagcaactactgtaaattttggnggcaccgatatttgtttaataccttggatttgtgatgataactatgaccactcaataanagaaatagaaaatacaaacgctgaacttgcgttaggtcatttagagattaagggttttgaaatgaacgctggtcatatgaaccaacaaggtttagaaaaggctatgtttcatagatttgaaaaagttatctctggtcattttcataaaaaatctgatgatggtcaagtgtactatcttggctctcaatatgaaattacttggtcagactataagtgtccaaaagggtttcatatactagatacagaaacaagagaactaacaagagtacctaatccaattagaatacataagaagttagtttataatgataaagacgaagattatagtaagttagatttagaacattataaagactgcttcgtaaaagtttttgtaacaaataaaactaatgaagaaatgtttaataatctaattgatagattacacaatacagtagatacacacgaagttaatattatagaagatttaaatacagatataacagcatctgtcggtgatgatgtactacaacaaggcgaagatactctaacctttttaggtaactatgtagaaaaaacagatactgatttagataaaaataaattaaaagaaacattaaaagatttatatgtagaggccagtgaaagatgagtaaaataacaaatgtaaaatcaaattttatgaattggggtccttttgttatgaaaacaaagatacctgattatataattaagaagttaaaaaccgaaggtacaaaagcaaaaattagttataataaaagtttagctggtcatttagataatcaatatttgtatccatcaaaaatacaacaatggttttataatgaaatacaccctattatacaagcatatagaaatggtcattgtaagtatcacggtatagaagaattaaatgtagaattacaagcagatgatttatgggttaattatatgcaagctggtgactttaatcctgtacatacacacggtgctgattattcatttgtattatttttagatgtacctaaacaattaaaaaaagaacaagataaatttgaaggaacatcagcaaaaccaggttcgttaatgtttgaatacacacaacaagcaagacctcgttgggctactactggtaaagttgtaacgccagaaacaggtgatatgattatgtttcctgctctattacaacattgggtagtaccctttaaatctaaagtaactagaataagtgtgtccggcaatttaagaattttaaacaaagataaattaccaaatgattatttttaaaaagattagatggaaaaactttctatctacaggaaacaattttgttgagatagaactaaacaagtcacaaatgactttgatgattggtgctaatggctctggtaaatcaactatgctagacgcattatgttttgcgttatttaatagaccatttagattaattaaaaaagaacagatagtaaatacaataaacaatgctgatactttagttgagttagagtttcaagtaggtactaaagctttcaaagttataagaggtattaaaccaaatatatttgagatttattgtgatgatgttttacaaaaccaagatgcctctagtatagattatcaaaagatattagaagatcaaatattaagattaaattatagagcatttaaacagatagctgtattaggttcttcagcgtatcaaccatttatgcagatgagaccaagacatagacgagaggttgtagaagaaatattagacataagagtattaacacacatggatattcttactagaaatcaacaaacagaattaggtaaacaaataattgaagcnagacatcaatgtgatttaattgaatctaaacangaattacaaacaaaacantttaanganttaaagaatagaagtacaggnganattgatattaagaaacaaaaactacaagaaaacaaagacgcnactgaatcatatttaagaaagactgaacgattagaagatgaatataaacaattagaaactagcatatcagatagaccacaatatgaaacaaagttaaaacagttagagaaacttgaaacaaagatagaacaaaatttagaaacacataaaaagaatttagagttttttgaacaaaatgataactgtccaacttgtactcaaaagatagaagaaacatttagagaagaaaagatagtaaaagaaaagaccaaagtagttactttaaatcaaggtatgaaagatttagtagctgaactagctaaagttgaaggtaaaattacagagtttaatggtatatcagataaactatatgaaaacaaaatatcaatatctaaagtagaatcttctttaaaagaacttaaaagattttccgattcattacataatgagatattactattagaaggtaaagatgaagacgataaagatatagaaaaaagtttagtagaattacaagaacaattagaacaaacaaaaattgaattaaacagaattactgaagagaagaaatacctagatgttgctagagagatactgtctgatagaggggctaaagctaaaatcattaagaagtatctaccaattatgaatagtttaattaatcaacatttacaatctatggacttctttgtatcctttcatttagacgaagaatttaaagaagaagtaaaaagcagacatagagatacctttgactacaataactttagtgagggtgagaagatgagaatagatttagcattagtatttacatggcgtgctattgcgaagatgaagaacagtgctaacacaaacttaatggtacttgatgaaatatttgatagctcgttagatggacaaggtacagatgacttctttaagattgtaaataaaatgggcaaagagaatatctttattatatcacacaaaggagatatattatttgataaatttactaacataatcaagtttgaaaaagaacacaattttacgaggttaacaaatggctaaagaaataaaattaataccaccaacagacgtgagagtacaatcagcaattgcaccttttagtgatgatatgctaaaagaacatgacttcaaagatagaaaagagttaagtgattctatgtttgatacaatgaaaaagtatggtggaataggattaacttgtaatc

SEQ ID NO: 1106 - DNA, 4000 bp, Escherichia coli
  misc_feature (95)..(95): n is a, c, g, or t
  misc_feature (239)..(239): n is a, c, g, or t
  misc_feature (320)..(320): n is a, c, g, or t
  misc_feature (323)..(323): n is a, c, g, or t
  misc_feature (383)..(383): n is a, c, g, or t
  misc_feature (856)..(856): n is a, c, g, or t
  misc_feature (1466)..(1466): n is a, c, g, or t
  misc_feature (1571)..(1571): n is a, c, g, or t
  misc_feature (1961)..(1961): n is a, c, g, or t
  misc_feature (2018)..(2018): n is a, c, g, or t
ggtgtcgcgtgcgcccttctagcgttcgtcgccaataccctgatccctcccgcaagtaacgaccaaatcttgtacgcattgcgtactgctctgtnctgagccggggtaccgtacccacgaggtcaaacgctgtcaattgcaggagcgtcacgtttgctgacccattagtacctccgtaggctaggcgcgtgcccgactacaacctctcctatgtctatgtgttcgcgttcttcgtagcnggagctctggtcgtcacggcgatgatgctgctcagccacctgctcgctccgtggaagcccacgcgcgaaaaactcaagacntangagtccggcgaggagcccgtggggcaggcctggggtcgttacccgacgcatttctacgtnttcgcgctcctcttcgtcgtgttcgacgtcgaggtgatcttcctgttcccgtgggcggtcctgttccgcgatctcggctggtacggcctggtcgagatgacgatcttcatcggcatcctggtcgtcggcctcgtctacgcctggaagaagaaagcgctcaattggtactgagcactccgcgcgcgaccatcgacctcgcatccgcgcgggaagcgctcgcgaaaagtcttggagagcgagcacgtgtgtcgaccctgcacgacatggtcgtcgtcgacgtcgatgccgcgcggctggtcgaggtggcaacggtggtgcgcgacgatccggccacgcgatgcgacctctattcggtgaacgcgggcgtcgacacggggaccgagcttcggagcgtcacgttcgtccgcggcatcgagacgcacgtcttcgtcatgctccgcacgccgtgcgactcaggcgagccgcacgtgccntcgctcacctcggtgtgggacggcgcgaactggtgcgagcgcgagacctacgacatgttcggcatcgtgttcgatggacacccggatctccgccgcatcttcctcgaggaatcgttcccgggacacccgatgcgaaagtcgttccttcctccacgcagcgacgcccgcgggggctgatgacgctgtgccggtaggtccgttcggcatcgatcctttcatctgggcgccgctgcgcttggtcatcgccgtgttgctcgtggtcggtctcgtcttcaacggcgcgctggcgcagatctatctcgagcggaagatccaggcggtcatccaggaccgcctcggcccactgcacaccgggccctggggcctgctccaaaccttcgccgacgcgatcaagctcctcggtaaggaagacatccgcgcgcggctgaccgacaaatggttcttcctcgccgcgccgtcgatcgtgttcagcccgatgctcgcgagctacgtcgtgatcccctttgcgcccggcatcgtcggcgccgacctgaacgtcggattgctctacatgaccacgcttggttcgatgaccgttcttgggatcgtcatcgccggctgggcttcgaanaacaagtactcgctcatgggcggccttcgctcggccggccagctcatctcgtacgaggtgccgcagatcctgtcgctcgtgaccgtcgtgctcgtcgtcgggacnctgtcgatggtcggcatcgccgagagtcagccgggctggcagctgaacgtcctcgtgctgccactcgcgttcgtcacctatttcatcgccggactggccgaaacgaaccgcgccccgttcgatctgccggaggccgaatccgagctcgtcgccgggttcctcaccgaatactcggggatgcgctgggccatcttcttcctcgccgaatacggtgagatcacggtcgtgtcgtcgatcgtgacgacgctctggttcggcgcgtggcacggcccgttcgtcgaggtcttcccgctgatcggcgttctctggttcacgctgaagacgtacttcttcgtgctcgtcttcatgtggatccgcgccacgcttccccgactgcggatcgaccagctnatgtccctctgctggaaggtgctgatcccgctgacgctcacgaacctcgtggtcacngcgaccctgctgctggtcttcccgagcaccctggtgcccgtggcgatcgcgaactggatcctcctcgccgccttcgtgctgctgctgccctacgtccagcgtcgtcggctcgtcgcgctccgcgagcggctgcggaccgcggcctgatggtcgacttcatcgaaccggcgctgttcgcgatcctgacgatcgccatcgtcgcggcgggtgcgggcgtggtcctcgccaaccggatcacgacctcggccctgctcatggccttcaccttcctgaacatcgccggcatgttcgtgctgctcggcgcggaaaccatcgcgatgttccaggtcctcatctacgtcggcgccatcaccgtcctgatcctgtacggcgtgatgttcacaccgcagtctccccgcgcttacggcctgttcttccagacccagaagtactgggccgcgctctttgtcgtgccgatcgcgatcttcgtcgcgctcgtggcgttctccttccgcgattcggcgacgctgggcgccaagggcggcgacctcctgccgctcgcgacgagcgtgttccgcgacttcgcgtttccgttcgaggtcgcgtcggtccttctcctcgcggccatggtcggcgcgatcgtgctagtgaagcgggacgaggactgaatggccgttccgctcggagcgttcatcgcggtctcggcggtgctgttcttcatcggcacagccggcgttctcgtccggcgcaacgcggtcgtgatcctcatgtccgtcgagctgatgctcaacgcgacgaacctcgctctggtcgcattctcacggcgctattcgtcgatcgacgagcgcgggagcgtgttcgtcgtcttcgtcttcgtcgtcgccgcggcggaggtcgcggtcggcctggccatcgtcctatcggcgtatcgcaacaggcccacggtcgacgtcgacgagatccggcagctcaagggttgatcgcgtgatccagaacgtctggctcatccccgcgttcccgctggcggcgttcctcatcgacggcctcttcggtcggcgatggctccataggtggaccggcatcatcgcgtcgtcggcggtcggactctcggcgatcgtcgcgatcggcgtgttcctcgaggtcctcggcggccagactcggacgaccgtcaacctctatgagtggatcggcgtcggggacttccactcgcgcgtcgccgcgctcgtcgatccgctgtcgtcggtcatgctgcttgtcgtcaccgtcgtgagcttcctcatcttcgtctactcgaacggatacatggagcacgatcacggcttccatcgtttcttcacctggctgtcgctgttcgtgttcgcgatgctcatcctggtcatggccgacaactacctcctcatgttcgtcgggtgggagggggtcggtctctgcagctatctcctgatcgggttctggttcgagcgtcccgagccgtatgtcgcggcgaagaaagcgttcgtgatgaaccggatcggcgactggggctacacgatcggcatgatcacgacgttcctcgtcttcggctcgatgcagttcaccgacgtgttcgagcacgttggcatcgcgacgcaggcgaacctcacgctcatctgcgtcgccttcttcttcggcgccaccggcaagtcggcgcagctgccgctgtactcgtggctgcccgacgcgatggagggcccgacgccggtgtcggccctgatccacgcggcgacgatggtcaccgccggcgtgtatctggtcgcgcgctcgatgccgctgttcgcggcggcgggtccctcgctcgcggtcgtcggcgtcgtcggcgctatcaccgcgatcttcgcggccacgatcgcgctcgtgcaattcgacatcaagcgcgtgatggcctattcgaccgtgagccagctcggctacatgttccttgcgctcggcgtcggggctccggtcgcggcgatcttccacctcgcgacgcacgcgttcttcaaggc

SEQ ID NO: 1107 - DNA, 4000 bp, Escherichia coli
  misc_feature (532)..(532): n is a, c, g, or t
  misc_feature (547)..(547): n is a, c, g, or t
  misc_feature (559)..(559): n is a, c, g, or t
  misc_feature (574)..(574): n is a, c, g, or t
  misc_feature (739)..(739): n is a, c, g, or t
  misc_feature (757)..(757): n is a, c, g, or t
  misc_feature (884)..(884): n is a, c, g, or t
  misc_feature (914)..(914): n is a, c, g, or t
  misc_feature (1297)..(1297): n is a, c, g, or t
  misc_feature (1595)..(1595): n is a, c, g, or t
  misc_feature (1667)..(1667): n is a, c, g, or t
  misc_feature (1768)..(1768): n is a, c, g, or t
  misc_feature (1785)..(1785): n is a, c, g, or t
  misc_feature (1808)..(1808): n is a, c, g, or t
  misc_feature (1812)..(1812): n is a, c, g, or t
  misc_feature (1948)..(1948): n is a, c, g, or t
  misc_feature (1965)..(1965): n is a, c, g, or t
  misc_feature (1985)..(1985): n is a, c, g, or t
  misc_feature (1992)..(1992): n is a, c, g, or t
  misc_feature (2490)..(2490): n is a, c, g, or t
  misc_feature (3502)..(3502): n is a, c, g, or t
aagatggggtagcctctttgactcactttatggaaccaatgtcatacctaataagggtagcatgagtacctcatttgcgcataatcttcaaagggttaatcgaacagcagaacttgcttgtgattttctcgatgaaattgcaccccttaagggcgcttcatatcgacaaattacaactcaagttaagtataagggaactttaatttttaatttgaatgacggtgaagtagcaaccttaataaaccctagtcaatatattgggcttactgaaaatggaaatatattattaaaaaacaataatcttcatattgagattgtatgtgaccaagaaaggagccttcataagagtgggatctttgatgtcatattggagtctgctgtgactacaatcgttgactttgaggattctgcatccactgtctcagacgaagaaaaaattcatgcatatcgaaactatcttggactcatgaagcgtgaattaagtgcctcttttgtaaagggtggcgaaactattacgagatcattgaataangataagacctatacngatactcatggngctatctgtaagctncctggaacaagtttaacgcttgttcgaaatgtaggcatccacatgacaactgaaatggtcacgaataatgatggatcaccaatcccagaaggcattttggacgcaatggttacttcactgattgcccttcatgatttaaaactcaaaatgaattccaaaaaaggnagcatctacattgtcaancccaagcttcatggccctgaagaagttaaattcactatggatttattttcagcagttgagaaagcactgtcaattaaggaaaacactcttaagattggggttatggatgaagaaagaagaacaactntaaacctaaaagcctgtatttacgaagctngaaatcgcatcatttttattaataccggatttcttgatagaacgggtgatgaaatacatacttctatgatggcgggagcgatgcgctgtaaaaacctcatcaaggaagaggcatggttttctgcctatgaagaaaataatgtcagttcaggccttgaatgtggtctttataaaagagcacaaattggaaaaggtatgtgggctcagcccgaccaaatgcgtcaaatgctagataacaaaatggtccatttagaggctggagcaagctgttcatgggttccttcaccaacagcagcaactttacatgctactcattatcatcgttttaatgtatttagacagcaacaagagctcttatctaagcaccaaaaaccaaaccaggangacctgtataaaattccatttttgaagttagctgatcaattatctgaagagaaaattattaaggaaatcaataacaatgcgcagagcatcttagggtatgtcgttaaatggattaaccaggggattggttgctcaaaagttcaagatatcaatcatattggtctaatggaagaccgagctacactaagaatttcttcacaacatatggcaaattggcttcatcataaaatatgtacaaaagatcaggtaaataaagcatttcaagatatggctgttattgttgatgatcaaaacaaanatgaccctaactatcttgcattggcaccaaactatgatagttttgcttacaaagcctcaatagcacttgcanttgaaggtgcagatcaggcaaatggatacacagaagatatattaataaggtttagacgtaaatttcttgaagctaagaaggcaaagtagatggattgtcantttttcttggaaacagntagctcttatcaccaatggaacnctancttaaagtaaatattaaaccgcaatagatgtgtcagttgatttgacctaaatcacctttgacaattactaaatctactctttgaaaatgtagctatattattacgaaagtgatcaatataaaggggtttttatgantcatattatctatgagnaagttaaacagaggttgcancgaaacnaattagctgctctgcgagttatattatgaaacaagtactaaaacttacgcttgaagatacaaagaaaatgatggatggtgccattaataaagcaattgaactaggtatagacatggatatcgctattgtggacgatggtggtcacctcatgttatttacaagaatggataatgcaaaaattacaagcattaatgtctctatcgataaggcatttactgctgcggcagctagaaaggcgaccttagattatggtaaatctgttattaatcatgggccagcatttggtattcaaacctcacatcaaggtcgtttttgtgtagttggtggtggcctacctctttttgttgatggtcagattgttggtgggattggttgcagttctggcagctctgaccaagatatagtggtttctcaagcagggattgacgcaatactttctgttaaataaataataagtcctaacccttaaatgcgttatcagaaagaagatagtcaagntcctccatggtactcatgcgccctaaaatttcatttctatgtgggaagcgaccaaattttttaacgagatctctgtgatgctttgaaaactcaaggttaaagttgtacttatcaaacaaataaacttgtaaattttgatgatcaatattttcactatgcatcaatggcataaacagaaataatagcttttcatcattgagctcctcatcaaacccattattaattgcatttaaagctacttcaactgccatactctctgtttgaaagccttttggatctgatctgaacatattaaggggtagctgatccaaaattactataagagcaacagagccatcagctgtttctctccactgactatattctccttccgctgctttttcccaaacgctttcaaaacgtactttaatttcgttgtctacttggggggttgaagcaaaccagaattgtttgcttttttctgaaaaccaataatctaaaacatcagatggtgttatcgaattttcattcattgtaaaaaaatttattccctcagagcgcaataatataccactctgagggattgatagttaagacttatcgatgaggagatttttcaccaaaatctttatacttgtcaaggaatctaactggcttgcttaatgcgtcttttctgaacggatctccaagctctcttgagcacataatttcaatgattgttgtctttctttcattcatttgcatatctatcgcttttttaagagctggacctacatcttcaagtttatcaactcgtattccttcagcacccattgattctgcaatattaacaaagtgctgatcagtaagctcagcagcaataaaacgtctgtcataaaaatctacttgatttttcttttcagcgccccaatgacgattatgaaaaacaactgcagtcactggaatatcatgacgcacacaagtcatagtttcaaccatgctcattgcccaagcaccatcacctgcgtaagaaacagcgggtctgtgttgagcngctgctttggctccaataattgttggaaaggcataaccacagtttccaaaactcatcgctgcaaaaaaactacgtggcttttcaaatctaagatagctattggctacagaattgatatttccaatatcagtagagaccatgacatcctcaggcatggctttttcaagttcgcgtaggacttgtcttgggtgaagccatccttcttctttgttagcaatcatatccatactataagagtcagtttcatgaatccactcatcaagctcgagctcccaagctgatttttcatcagcaattgttgttgctctttcagacttagttgaatcacagctcaacgtttctgattttagtttttgacatagaacttcagctacagcttttgcatcaccacagataccaacattgattggcttcaccaaacctaacattttgtgatcagcatcaatttgaataatttgagcatctttaggccaataatccatcccgtgctgaggtagc

SEQ ID NO: 1108 - DNA, 4000 bp, Escherichia coli
  misc_feature (676)..(676): n is a, c, g, or t
  misc_feature (1123)..(1124): n is a, c, g, or t
  misc_feature (1188)..(1188): n is a, c, g, or t
  misc_feature (1460)..(1460): n is a, c, g, or t
  misc_feature (1631)..(1631): n is a, c, g, or t
  misc_feature (1990)..(1991): n is a, c, g, or t
  misc_feature (2003)..(2003): n is a, c, g, or t
  misc_feature (2624)..(2624): n is a, c, g, or t
  misc_feature (2675)..(2675): n is a, c, g, or t
  misc_feature (2715)..(2716): n is a, c, g, or t
  misc_feature (2820)..(2827): n is a, c, g, or t
  misc_feature (2831)..(2834): n is a, c, g, or t
  misc_feature (2838)..(2843): n is a, c, g, or t
  misc_feature (2850)..(2851): n is a, c, g, or t
  misc_feature (2853)..(2853): n is a, c, g, or t
  misc_feature (2855)..(2855): n is a, c, g, or t
  misc_feature (2858)..(2859): n is a, c, g, or t
  misc_feature (2861)..(2861): n is a, c, g, or t
  misc_feature (2870)..(2870): n is a, c, g, or t
  misc_feature (2872)..(2872): n is a, c, g, or t
  misc_feature (2874)..(2876): n is a, c, g, or t
  misc_feature (2879)..(2880): n is a, c, g, or t
  misc_feature (2882)..(2882): n is a, c, g, or t
  misc_feature (2884)..(2887): n is a, c, g, or t
  misc_feature (2890)..(2890): n is a, c, g, or t
  misc_feature (2892)..(2892): n is a, c, g, or t
  misc_feature (2896)..(2896): n is a, c, g, or t
  misc_feature (2898)..(2898): n is a, c, g, or t
  misc_feature (2903)..(2907): n is a, c, g, or t
  misc_feature (2910)..(2911): n is a, c, g, or t
  misc_feature (2913)..(2916): n is a, c, g, or t
  misc_feature (2918)..(2919): n is a, c, g, or t
  misc_feature (2921)..(2922): n is a, c, g, or t
  misc_feature (2925)..(2926): n is a, c, g, or t
  misc_feature (2928)..(2928): n is a, c, g, or t
  misc_feature (2930)..(2932): n is a, c, g, or t
  misc_feature (2934)..(2935): n is a, c, g, or t
  misc_feature (2937)..(2940): n is a, c, g, or t
  misc_feature (2942)..(2942): n is a, c, g, or t
  misc_feature (2947)..(2951): n is a, c, g, or t
  misc_feature (2954)..(2957): n is a, c, g, or t
  misc_feature (2960)..(2961): n is a, c, g, or t
  misc_feature (2963)..(2965): n is a, c, g, or t
  misc_feature (2968)..(2969): n is a, c, g, or t
  misc_feature (2971)..(2971): n is a, c, g, or t
  misc_feature (2973)..(2973): n is a, c, g, or t
  misc_feature (2976)..(2976): n is a, c, g, or t
  misc_feature (2979)..(2984): n is a, c, g, or t
  misc_feature (2986)..(3004): n is a, c, g, or t
  misc_feature (3006)..(3008): n is a, c, g, or t
  misc_feature (3011)..(3012): n is a, c, g, or t
  misc_feature (3014)..(3015): n is a, c, g, or t
  misc_feature (3017)..(3017): n is a, c, g, or t
  misc_feature (3019)..(3021): n is a, c, g, or t
  misc_feature (3023)..(3033): n is a, c, g, or t
  misc_feature (3036)..(3036): n is a, c, g, or t
  misc_feature (3039)..(3039): n is a, c, g, or t
  misc_feature (3041)..(3043): n is a, c, g, or t
  misc_feature (3046)..(3053): n is a, c, g, or t
  misc_feature (3055)..(3059): n is a, c, g, or t
  misc_feature (3061)..(3063): n is a, c, g, or t
  misc_feature (3065)..(3068): n is a, c, g, or t
  misc_feature (3071)..(3071): n is a, c, g, or t
  misc_feature (3073)..(3074): n is a, c, g, or t
  misc_feature (3076)..(3081): n is a, c, g, or t
  misc_feature (3083)..(3083): n is a, c, g, or t
  misc_feature (3089)..(3089): n is a, c, g, or t
  misc_feature (3092)..(3097): n is a, c, g, or t
  misc_feature (3099)..(3100): n is a, c, g, or t
  misc_feature (3103)..(3103): n is a, c, g, or t
  misc_feature (3106)..(3107): n is a, c, g, or t
  misc_feature (3112)..(3113): n is a, c, g, or t
  misc_feature (3115)..(3121): n is a, c, g, or t
  misc_feature (3123)..(3127): n is a, c, g, or t
  misc_feature (3130)..(3130): n is a, c, g, or t
  misc_feature (3132)..(3132): n is a, c, g, or t
  misc_feature (3134)..(3135): n is a, c, g, or t
  misc_feature (3137)..(3139): n is a, c, g, or t
  misc_feature (3141)..(3143): n is a, c, g, or t
  misc_feature (3146)..(3151): n is a, c, g, or t
  misc_feature (3153)..(3154): n is a, c, g, or t
  misc_feature (3157)..(3157): n is a, c, g, or t
  misc_feature (3159)..(3167): n is a, c, g, or t
  misc_feature (3169)..(3175): n is a, c, g, or t
  misc_feature (3177)..(3177): n is a, c, g, or t
  misc_feature (3180)..(3181): n is a, c, g, or t
  misc_feature (3183)..(3187): n is a, c, g, or t
  misc_feature (3189)..(3191): n is a, c, g, or t
  misc_feature (3194)..(3196): n is a, c, g, or t
  misc_feature (3198)..(3198): n is a, c, g, or t
  misc_feature (3202)..(3202): n is a, c, g, or t
  misc_feature (3205)..(3205): n is a, c, g, or t
  misc_feature (3207)..(3207): n is a, c, g, or t
  misc_feature (3214)..(3216): n is a, c, g, or t
  misc_feature (3218)..(3218): n is a, c, g, or t
  misc_feature (3220)..(3220): n is a, c, g, or t
  misc_feature (3222)..(3222): n is a, c, g, or t
  misc_feature (3228)..(3228): n is a, c, g, or t
  misc_feature (3231)..(3237): n is a, c, g, or t
  misc_feature (3239)..(3239): n is a, c, g, or t
  misc_feature (3241)..(3241): n is a, c, g, or t
  misc_feature (3244)..(3246): n is a, c, g, or t
  misc_feature (3250)..(3253): n is a, c, g, or t
  misc_feature (3255)..(3256): n is a, c, g, or t
  misc_feature (3258)..(3260): n is a, c, g, or t
  misc_feature (3264)..(3267): n is a, c, g, or t
  misc_feature (3270)..(3272): n is a, c, g, or t
  misc_feature (3274)..(3274): n is a, c, g, or t
  misc_feature (3276)..(3276): n is a, c, g, or t
  misc_feature (3298)..(3300): n is a, c, g, or t
  misc_feature (3302)..(3302): n is a, c, g, or t
  misc_feature (3305)..(3308): n is a, c, g, or t
  misc_feature (3310)..(3310): n is a, c, g, or t
  misc_feature (3317)..(3317): n is a, c, g, or t
  misc_feature (3322)..(3324): n is a, c, g, or t
  misc_feature (3326)..(3326): n is a, c, g, or t
  misc_feature (3329)..(3330): n is a, c, g, or t
  misc_feature (3332)..(3332): n is a, c, g, or t
  misc_feature (3336)..(3337): n is a, c, g, or t
  misc_feature (3339)..(3339): n is a, c, g, or t
  misc_feature (3341)..(3341): n is a, c, g, or t
  misc_feature (3350)..(3351): n is a, c, g, or t
  misc_feature (3355)..(3355): n is a, c, g, or t
  misc_feature (3357)..(3357): n is a, c, g, or t
  misc_feature (3359)..(3360): n is a, c, g, or t
  misc_feature (3362)..(3363): n is a, c, g, or t
  misc_feature (3366)..(3368): n is a, c, g, or t
  misc_feature (3370)..(3370): n is a, c, g, or t
  misc_feature (3373)..(3374): n is a, c, g, or t
  misc_feature (3376)..(3385): n is a, c, g, or t
  misc_feature (3389)..(3389): n is a, c, g, or t
  misc_feature (3392)..(3394): n is a, c, g, or t
  misc_feature (3396)..(3397): n is a, c, g, or t
  misc_feature (3399)..(3400): n is a, c, g, or t
  misc_feature (3402)..(3406): n is a, c, g, or t
  misc_feature (3409)..(3410): n is a, c, g, or t
  misc_feature (3415)..(3415): n is a, c, g, or t
  misc_feature (3417)..(3422): n is a, c, g, or t
  misc_feature (3425)..(3426): n is a, c, g, or t
  misc_feature (3428)..(3428): n is a, c, g, or t
  misc_feature (3433)..(3433): n is a, c, g, or t
  misc_feature (3436)..(3436): n is a, c, g, or t
  misc_feature (3439)..(3441): n is a, c, g, or t
  misc_feature (3443)..(3443): n is a, c, g, or t
  misc_feature (3446)..(3448): n is a, c, g, or t
  misc_feature (3451)..(3451): n is a, c, g, or t
  misc_feature (3453)..(3457): n is a, c, g, or t
  misc_feature (3459)..(3459): n is a, c, g, or t
  misc_feature (3463)..(3464): n is a, c, g, or t
  misc_feature (3466)..(3468): n is a, c, g, or t
  misc_feature (3471)..(3480): n is a, c, g, or t
  misc_feature (3483)..(3484): n is a, c, g, or t
  misc_feature (3486)..(3486): n is a, c, g, or t
  misc_feature (3489)..(3491): n is a, c, g, or t
  misc_feature (3493)..(3493): n is a, c, g, or t
  misc_feature (3495)..(3497): n is a, c, g, or t
  misc_feature (3499)..(3500): n is a, c, g, or t
  misc_feature (3505)..(3506): n is a, c, g, or t
  misc_feature (3508)..(3511): n is a, c, g, or t
  misc_feature (3514)..(3514): n is a, c, g, or t
  misc_feature (3517)..(3519): n is a, c, g, or t
  misc_feature (3521)..(3522): n is a, c, g, or t
  misc_feature (3524)..(3526): n is a, c, g, or t
  misc_feature (3528)..(3528): n is a, c, g, or t
  misc_feature (3530)..(3530): n is a, c, g, or t
  misc_feature (3533)..(3536): n is a, c, g, or t
  misc_feature (3539)..(3540): n is a, c, g, or t
  misc_feature (3542)..(3546): n is a, c, g, or t
  misc_feature (3548)..(3549): n is a, c, g, or t
  misc_feature (3553)..(3553): n is a, c, g, or t
  misc_feature (3556)..(3556): n is a, c, g, or t
  misc_feature (3558)..(3560): n is a, c, g, or t
  misc_feature (3562)..(3570): n is a, c, g, or t
  misc_feature (3574)..(3574): n is a, c, g, or t
  misc_feature (3577)..(3577): n is a, c, g, or t
  misc_feature (3579)..(3579): n is a, c, g, or t
  misc_feature (3581)..(3581): n is a, c, g, or t
  misc_feature (3583)..(3600): n is a, c, g, or t
  misc_feature (3603)..(3603): n is a, c, g, or t
  misc_feature (3607)..(3617): n is a, c, g, or t
  misc_feature (3620)..(3622): n is a, c, g, or t
  misc_feature (3625)..(3625): n is a, c, g, or t
  misc_feature (3628)..(3630): n is a, c, g, or t
  misc_feature (3632)..(3634): n is a, c, g, or t
  misc_feature (3637)..(3642): n is a, c, g, or t
  misc_feature (3644)..(3644): n is a, c, g, or t
  misc_feature (3646)..(3651): n is a, c, g, or t
  misc_feature (3656)..(3657): n is a, c, g, or t
  misc_feature (3660)..(3660): n is a, c, g, or t
  misc_feature (3662)..(3663): n is a, c, g, or t
  misc_feature (3669)..(3669): n is a, c, g, or t
  misc_feature (3675)..(3675): n is a, c, g, or t
  misc_feature (3677)..(3677): n is a, c, g, or t
  misc_feature (3680)..(3688): n is a, c, g, or t
  misc_feature (3692)..(3693): n is a, c, g, or t
  misc_feature (3695)..(3695): n is a, c, g, or t
  misc_feature (3697)..(3699): n is a, c, g, or t
  misc_feature (3702)..(3702): n is a, c, g, or t
  misc_feature (3706)..(3707): n is a, c, g, or t
  misc_feature (3709)..(3711): n is a, c, g, or t
  misc_feature (3714)..(3721): n is a, c, g, or t
  misc_feature (3724)..(3725): n is a, c, g, or t
  misc_feature (3727)..(3727): n is a, c, g, or t
  misc_feature (3729)..(3729): n is a, c, g, or t
  misc_feature (3732)..(3737): n is a, c, g, or t
  misc_feature (3739)..(3741): n is a, c, g, or t
  misc_feature (3743)..(3744): n is a, c, g, or t
  misc_feature (3746)..(3748): n is a, c, g, or t
  misc_feature (3756)..(3757): n is a, c, g, or t
  misc_feature (3760)..(3763): n is a, c, g, or t
  misc_feature (3765)..(3766): n is a, c, g, or t
  misc_feature (3770)..(3771): n is a, c, g, or t
  misc_feature (3773)..(3773): n is a, c, g, or t
  misc_feature (3775)..(3779): n is a, c, g, or t
  misc_feature (3781)..(3783): n is a, c, g, or t
  misc_feature (3786)..(3786): n is a, c, g, or t
  misc_feature (3788)..(3790): n is a, c, g, or t
  misc_feature (3793)..(3796): n is a, c, g, or t
  misc_feature (3798)..(3798): n is a, c, g, or t
  misc_feature (3802)..(3802): n is a, c, g, or t
  misc_feature (3804)..(3804): n is a, c, g, or t
  misc_feature (3807)..(3807): n is a, c, g, or t
  misc_feature (3810)..(3810): n is a, c, g, or t
  misc_feature (3813)..(3813): n is a, c, g, or t
  misc_feature (3819)..(3821): n is a, c, g, or t
  misc_feature (3825)..(3827): n is a, c, g, or t
  misc_feature (3830)..(3830): n is a, c, g, or t
  misc_feature (3833)..(3835): n is a, c, g, or t
  misc_feature (3837)..(3837): n is a, c, g, or t
  misc_feature (3840)..(3840): n is a, c, g, or t
  misc_feature (3842)..(3843): n is a, c, g, or t
  misc_feature (3846)..(3847): n is a, c, g, or t
  misc_feature (3850)..(3853): n is a, c, g, or t
  misc_feature (3856)..(3858): n is a, c, g, or t
  misc_feature (3860)..(3861): n is a, c, g, or t
  misc_feature (3868)..(3869): n is a, c, g, or t
  misc_feature (3872)..(3873): n is a, c, g, or t
  misc_feature (3876)..(3876): n is a, c, g, or t
  misc_feature (3879)..(3880): n is a, c, g, or t
  misc_feature (3883)..(3884): n is a, c, g, or t
  misc_feature (3888)..(3889): n is a, c, g, or t
  misc_feature (3891)..(3891): n is a, c, g, or t
  misc_feature (3895)..(3896): n is a, c, g, or t
  misc_feature (3899)..(3899): n is a, c, g, or t
  misc_feature (3903)..(3905): n is a, c, g, or t
  misc_feature (3908)..(3909): n is a, c, g, or t
  misc_feature (3912)..(3917): n is a, c, g, or t
  misc_feature (3923)..(3924): n is a, c, g, or t
  misc_feature (3927)..(3927): n is a, c, g, or t
  misc_feature (3929)..(3930): n is a, c, g, or t
  misc_feature (3932)..(3932): n is a, c, g, or t
  misc_feature (3934)..(3934): n is a, c, g, or t
  misc_feature (3936)..(3936): n is a, c, g, or t
  misc_feature (3940)..(3940): n is a, c, g, or t
  misc_feature (3942)..(3942): n is a, c, g, or t
  misc_feature (3947)..(3947): n is a, c, g, or t
  misc_feature (3949)..(3949): n is a, c, g, or t
  misc_feature (3951)..(3951): n is a, c, g, or t
  misc_feature (3957)..(3957): n is a, c, g, or t
  misc_feature (3959)..(3960): n is a, c, g, or t
  misc_feature (3963)..(3965): n is a, c, g, or t
  misc_feature (3968)..(3968): n is a, c, g, or t
  misc_feature (3970)..(3970): n is a, c, g, or t
  misc_feature (3972)..(3972): n is a, c, g, or t
  misc_feature (3975)..(3977): n is a, c, g, or t
  misc_feature (3981)..(3981): n is a, c, g, or t
  misc_feature (3984)..(3984): n is a, c, g, or t
  misc_feature (3986)..(3986): n is a, c, g, or t
  misc_feature (3989)..(3989): n is a, c, g, or t
  misc_feature (3991)..(3995): n is a, c, g, or t
  misc_feature (3997)..(3998): n is a, c, g, or t
  misc_feature (4000)..(4000): n is a, c, g, or t
acgaagctccgcggagagcttttcgtccgaagatggcggaagatgatgtttctctcgttcgttgttgttcgttttcatcatcatcgcgtctctgtgttgattatgaagagtatacaaattcgtgcgaatattgccaacgcttcctccatttccgctcgcgggcgttcgttggtgttgaaaaatcggcgtcctaggtaacggtccttcccctctcgcaaagttcgcatcgtcttcgttaaacccgccttgaaacgatgcgatgccgttcaaaaacgcctccgtgttcatgccttcgttcgtgtgctcgtttggccacggcaccgccgtattcgccaacggcgtcggcggtatgcctaaaaccgcggagcgctgctgagcgtgcgagtgaaatccaggcgtgctcatcaacgtccccatcatctgcggctgttgctgcccaaactccacgacgccgccgtaaaacttcgcctgttccggctgtttatgccacgtcagatttctcgcattcactctcgccaaaatctcctccgtcgcgtccacgttctcgtgcgtttccttcggggtcccgtcctcgtcttcgaccacttcttcctcttcctcgccgttcaaaaccgcgtgatcatcatccaaaaaatccaacttgaacccacccgcatcttcacctgtgttactcatnccacgcgcaggagtctcgttttgatgtttaacgacaacactcggagacttattatcgtcgtccgtccatcgcttatgcgtcgacggcggcatgttaaattcttccttccttccttcccctttgacatcaaaatcatcattttccaatgtcatcagcggagaaaacggaggctctgtgaacactttctcttctcgtttctttgtctttttcttcgtcgatcgcgtttttggtgttttcattctcgtcttcttcgcgttgtctgtctctttgatgatattattcgtgttaaacgtcatcgtcacgtcctctaaatttcgcatcgaccggagcggcgaattgatgtcgtcttggtcttcttctatcgcctcgcgaacgagttggacgttggaaatttccgtgagatcgttcgattcttcctccttgacagatgcttcttctttagctttnngtcgactgctccgtcgagacgagtgtgctgctgtcgcgctcattattgtgtgattttgtatcgntttgcgctgaatttgtaacgtttggattttgaattttgagggattttacgacgtacaaaaaatgtggtgagcgctcttcttactttacttttgttatgcgtacattgtgattctaccattgatgctgctgattagattattattctttttaagtttcagcgtcggtttggggcgggccgacggctttccacatggccaaaccaccgcctcttcctcgagcggcgacgcacttttcatccgcgtagacgaatttgaagaacgggttcgcgccnggcttggatttatcgttggattttgtgattttgccttgaccttcggtggttttctcctcggtcgctttgaccgcgtcccatttgccgtcgtcgatgtcgaagcctttgacgaaagagaagacgcctacggagcacttcgtgaaggtgaactcgagcatttttaagttttgnctccaaatgaaagggccgtcgaaaaagaatttgattgggcctacgtacacgccgttgcgtatgcgttcgttttttatgtcgaacgattggacggctttgattgggaagtaagtcccgtcgccgtttcggttgacgttggctttgtttttgttcgtcccggtggtgtacacgagttcccattcgccgttgagcatgtcgccggtgacgttgaatttactcttttcgcacgccgcgatggcgtcgcagacgtcttcgacgtttacgtttttcgtttcgcacgcttcgtgcatcaccgagatggcgtcaaacggcgctttcgggtcgccctccagcaacgcgaattgcgtcaatcgtttcgnntcgcagtagccnaaaatccccggatccacgtggtcaaagacaatctctccttcttcgtccaagaccatcgacccgcctctttgcaccaagagctgatcgtcttcgcacactaaatcgtcccagttgtttaaaatttccgtcatgtttgccaatctcaaggtcgccatctcaaacggtctcaaatactcggcgcctaaagtcgcgtccatcaatttcctcacttccggtacgtccgcgttcgagccttccactaacacgggcggcttattcttcgatccaaaataccccgatatcaccgtcttcaaagtccccggagacccgataccggcgcacattaccaacaacttcaccatcccgggaagcttcaccggaagcgcgtcgccgaacccgggcgaatactccatcttccgatataacttagaacttgtcgtcacgattaacttctccttgggaaacttcgtccgttcgcaaaactgttccccggcttgaactgaacctaaaccaaacgcgatcacgtttacgttcgcggcttccaatcgcggtaaatcgtccaccataaatttcgcctgttcccacgagtcaaaatccgccagttgcgtcaggaataaaacaatcgttcttttcccactttcntgtttaccaccgaacacctggtcgcttccgccggaaagtacctctttcgtntccactttaatcaactcttgtttgcactcgtcgacgaaanngcgaaagtttttcgcggtgtcgcgaatctttcgcctgtttgcgaggatgacgacgtttggtgcgtccgtcgttctcccgacggatgacgacgacgaattcatcnnnnnnnncgcnnnncgannnnnncgacgannantnttnntngtcgtcgtngngnnnttnntngnnnnaananaagnancatcnnnnngannannnntnntnntgnncntnnncnncnnnncngcgannnnnacnnnnacnncnnngcnngngnttntgnnnnnnannnnnnnnnnnnnnnnnnnannnttnntnntntnnntnnnnnnnnnnngtncgngnnngtnnnnnnnntnnnnnannnannnntcntnntnnnnnntnctactnctnnnnnntnnttnttnntactnntnnnnnnnannnnnctncntnntnnnannntcnnnnnngnngangnnnnnnnnntnnnnnnngncgnngnnnnntnnngannngncgtngtngncgccgcnnntntngncggcgncgnnnnnnncnangannncttnnnncnncnnntctnnnnaannnangntgttgttgttgttgttgttgtnnncnccnnnngncgttgtngttgnnncngcnncnactnntntngtcgtcgtnntcgncncnncnncgnnntngtnntnnnnnnnnnngtcntcnnncnncnncnnnnnttnnttctncnnnnnnagnngnttttnttnttnnncntcnnnttntnnnnntntttnntnnncgnnnnnnnnnncgnngntcnnntncnnntnnttgtnntnnnncgnggnnnannannncnanaannnntcnncnnnnncnncggnggngnnngnnnnnnnnncgcngcngntncnnnnnnnnnnnnnnnnnnccnccgnnnnnnnnnnnttnnncancannntnnncgnnnnnnancnnnnnntggtnnttntnntcatcntctccncngtnnnnnnnnngccnncncnnncgncgtnntnnnttnnnnnnnncgnngngncgnnnnnncnnncnncnnncgccgccnncannnncnnctgnngngnnnnnannncgncnnntannnncncccncncgncgncgncgacgnnngcgnnngcngcnnngncgncnncgnncgnnnncgnnncnncgacgannatnntcngcnnatnnttcnncnccannacnattnnnttnntcnnnnnntcgtcnnaancnnancncnacgncngcacntncncctcgntnncgnnntcntncnccnnngcgncgncnacnannnnnannan

SEQ ID NO: 1109 - DNA, 4000 bp, Escherichia coli
  misc_feature (465)..(465): n is a, c, g, or t
  misc_feature (1991)..(1991): n is a, c, g, or t
  misc_feature (2508)..(2508): n is a, c, g, or t
  misc_feature (3553)..(3553): n is a, c, g, or t
tttgcgagctggtaaagataaacttatggggttctttgtcggcaaggttatgcaagccaccggcggtaaagctaacccgcaacaagtcaacgcgatgattaggcagaaactcagtccttaacggctctggataagtcgccacttttttaggagattcggccaacctaaacgcgtcaaatactgatctatgcggccctttgaaggattcattttggcccgccttcgagaccatcgcccgctcgcgattgagaaatctaggactagaagcagtccgccgcgcgcgcgactaacccctagccggcttggaactcgcccagaaaggtcagaatccttgcggcattgaccccaaggtccgactgcccaaccctcgagactgaacgaacgtcgagcaatgtttgccctccttcatctttgaccctgaccactacatcatctttaaatccaaaccagaacgttgttgcggtngcttcaacgatccctgctgcaccatcaacattaatgatctcaagccccatattgctgagcactatctcggctaactcaagactttcttggactgatttttctgttagcaaggtggtaacttctggataggcttcgtcctgcagcgccgccatttcttccactgatcgattttcgtctgcataaacaagatcatttgcggcatgcacccgacgctttttaatttcttgaaactcagggggatctattgggttggtggtaatgtcatgaatagcaggcacacgtcctgcctgttgcaattgagggacgacgaacgcgatagggattaacgctattaccgtggccgccaacaaagcgcctcgatcgacggtctgctttctaatgacaccagcgacccatagccccaggactgcaataatcgtaagcgccgcacccgcaaacgccatcgtaaagccacccaatgcagtcataacgtcaaagagtccagcccgatacccaagcgggctacccaacaagatcaataactgacaagccacaaatatgagaagaactttactacttgttttcatgtttcttacctttgttttagtgacaccactgtatcttacaatcgtaaggggacgctcatcgaagtgtcatctccgatccaacgaaccgtctctttgatttgctttcccggggaccggatcaaaccgccgaattatgtatcccagctttaggaacccactttaacatgccaaggttcaaagcggacgccaaaccgattacccgccggatatcgcaattctatgtaggcaaggccctgcattctgcgaaacacatcagaacgtgcaaacagatgtgtgaaattttcatcccctaagtgtctcgagcccacatcgaaatcacccgacccatgaaaggaataacccggcggcgcaagacttcttgacgccagcgagacatttccttgactgtccattaattttgccaaaaacaatccgcactgctttggcaacgcgcgagcacccgacgtcaagattagatctcgaccaatatccttgcgcattctctcccaaagcggcttggccttttcccgaaacaaaaattgaccgaactgccgctcataatgaacctgcccagaggtaaatccggctaagaaatccatagagacctttggccccttaaaaccaaaatttttcgcatcctcaaaaaatagccactgcagaagtcccaattcatcgatactaaagcgccctatttccgtcgttttacccgcggtttcaaacagctgtttaaagcccacaatattgaaaaaaccatgcccataatacccctgagcccgattcaatcgtgccaaggcactgggcaatgcttgcctaaactcagagggcaaaaagacatcaccttcggcataacgatcaggcgactgcatcttttttgaatctaatctaaccgcctctaggtcggcttcagtccagccaaattcatcaagaaactctaactggttaggtgcttcggataatatttgctcaggcgcgagctctganaggccgcctgcccccgagagacccggcgcagatgagatgtcagcacctgggcctagcagtcgataggcagtgatcccaagggccgaggtacccgaagcaccgatcagccacttcaagaatcgccgttttgaaagattcaaatcattacttcgttagtttcgccctgactagccgctaaagtcttttcaccaaacgaccctttgcaaatacgtagcccgggttttgcaatgccttaagatccgccaaaggtgattggtcaaaaacaatcaaatctgcagacaaccctgtttcaagtcgaccggtgatatggtcgatcgccaaagccttggcacaatcgctcgtggcgcttcgcaaagtttgcaccggcgtaaaatctgcaatctgttcaaaaacccgaagcgccttgggtaaatcctcatgatagacatgaggaatccccgcatctgtggacgcaatgaactgacagcccttttccttcattgcgccataacgcgcttgcactgcggttaggtaattnggattactcaggtgacgggcccagccagcattcaccgttggcgaaatccagatgcctttatccgcaatctccgctgctaaatcagggtcaaaatgcttaccccaaccgtttgggccaacccaagagcagtgctcaatcgtggtgacgccagctcttgcggcatgggcgatgccatcaaccccatgacaatgtgcggcaacacaatagccgctctctgtagccgctcgcacaatacccgtcatagtcccttgatcaaattgagcatcactgggcttacttccaggcgtaatattaccgcctgttgccatgactttaatcagatctacgccagcggcagcttgtcgctcaatgaccgacaacgcctcagctaaatccgatgcttcgcctccccaaaagtgacaatggcctccaggcgatgtaatgggctgacctgcacaaattaaccgaggaccgtcaatctcgccggccgcaatcgcatctctaactttcagctccaaccattgcccaccacctaagtcgcgagccgtcgtgatcccggcctggaccattttttttgccctaagccccatggcactgagctggtccttagccggcaccttgccgtgtgcaaaagggtcagactcatcagggtctaaacaaagatgaatatgcgcatcgatcaatcccggtaagacgaacgcaccggcaagatctaactcaggctctccactcgaccgatcatccgcggacgtcagcgctatggtgccagctgctgtaatacggatcgcatcgaactcagtaccgtagtcttccgaaaccccatcccaaaattttatatttctgagcaacatgttctaagccctaacgctagttatccccttgaataatagcagagtcagcaccatcggccgcgcagaaggtgccctatcgcgtcgctaaattagctcgctgaccgtagttgaccttagcaaccctgaaggaatcagcacgttgggcagacggcgtccgccccaaaataccctcttacagcgctggattcgttcgattaagtcttagtacctctagnagaccttccaagattaggtcacttacaacatgatcaaacacacgttctcgatcaaaaagatgtacaaagccgccggtaccaacaaccagcggggcctcatctggaaatgcttgctctgaaatacgtgcaaccaattctttgatcatgccgacattagaccaatacagcccagactgaatactctcgatggtcgtcgtccctatcgccgttttaaccggtttaatctcgaccgagggcagctgcgctgtgcgcatttcaagcgcctccatcgacaaacgtacgcccggcaagatattaccgcctaaaaaggttcgatccttcttcacggcacataccgttgtggctgtaccgaaatcagcaacgatcaagtgcctatcgggaaaaagctttaaggcacccactgcatcagcaatccgatcagcgcctacttctttcggatctctgtaa

SEQ ID NO: 1110 - DNA, 4000 bp, Escherichia coli
  misc_feature (288)..(288): n is a, c, g, or t
  misc_feature (293)..(293): n is a, c, g, or t
  misc_feature (295)..(297): n is a, c, g, or t
  misc_feature (299)..(300): n is a, c, g, or t
  misc_feature (302)..(302): n is a, c, g, or t
  misc_feature (304)..(304): n is a, c, g, or t
  misc_feature (306)..(306): n is a, c, g, or t
  misc_feature (309)..(310): n is a, c, g, or t
  misc_feature (312)..(312): n is a, c, g, or t
  misc_feature (314)..(314): n is a, c, g, or t
  misc_feature (317)..(318): n is a, c, g, or t
  misc_feature (321)..(321): n is a, c, g, or t
  misc_feature (323)..(324): n is a, c, g, or t
  misc_feature (326)..(329): n is a, c, g, or t
  misc_feature (332)..(332): n is a, c, g, or t
  misc_feature (334)..(336): n is a, c, g, or t
  misc_feature (341)..(344): n is a, c, g, or t
  misc_feature (349)..(350): n is a, c, g, or t
  misc_feature (352)..(352): n is a, c, g, or t
  misc_feature (354)..(356): n is a, c, g, or t
  misc_feature (359)..(359): n is a, c, g, or t
  misc_feature (363)..(364): n is a, c, g, or t
  misc_feature (366)..(368): n is a, c, g, or t
  misc_feature (370)..(370): n is a, c, g, or t
  misc_feature (373)..(374): n is a, c, g, or t
  misc_feature (378)..(380): n is a, c, g, or t
  misc_feature (383)..(385): n is a, c, g, or t
  misc_feature (389)..(392): n is a, c, g, or t
  misc_feature (395)..(398): n is a, c, g, or t
  misc_feature (401)..(402): n is a, c, g, or t
  misc_feature (406)..(407): n is a, c, g, or t
  misc_feature (414)..(414): n is a, c, g, or t
  misc_feature (416)..(419): n is a, c, g, or t
  misc_feature (421)..(423): n is a, c, g, or t
  misc_feature (427)..(427): n is a, c, g, or t
  misc_feature (429)..(429): n is a, c, g, or t
  misc_feature (432)..(432): n is a, c, g, or t
  misc_feature (435)..(438): n is a, c, g, or t
  misc_feature (440)..(440): n is a, c, g, or t
  misc_feature (442)..(443): n is a, c, g, or t
  misc_feature (446)..(449): n is a, c, g, or t
  misc_feature (452)..(454): n is a, c, g, or t
  misc_feature (456)..(458): n is a, c, g, or t
  misc_feature (460)..(460): n is a, c, g, or t
  misc_feature (462)..(464): n is a, c, g, or t
  misc_feature (466)..(466): n is a, c, g, or t
  misc_feature (468)..(480): n is a, c, g, or t
  misc_feature (486)..(492): n is a, c, g, or t
  misc_feature (494)..(497): n is a, c, g, or t
  misc_feature (499)..(500): n is a, c, g, or t
  misc_feature (502)..(502): n is a, c, g, or t
  misc_feature (504)..(504): n is a, c, g, or t
  misc_feature (507)..(512): n is a, c, g, or t
  misc_feature (514)..(516): n is a, c, g, or t
  misc_feature (518)..(518): n is a, c, g, or t
  misc_feature (520)..(520): n is a, c, g, or t
  misc_feature (522)..(522): n is a, c, g, or t
  misc_feature (526)..(528): n is a, c, g, or t
  misc_feature (532)..(532): n is a, c, g, or t
  misc_feature (534)..(536): n is a, c, g, or t
  misc_feature (538)..(543): n is a, c, g, or t
  misc_feature (545)..(549): n is a, c, g, or t
  misc_feature (551)..(551): n is a, c, g, or t
  misc_feature (553)..(554): n is a, c, g, or t
  misc_feature (557)..(562): n is a, c, g, or t
  misc_feature (564)..(567): n is a, c, g, or t
  misc_feature (569)..(571): n is a, c, g, or t
  misc_feature (573)..(574): n is a, c, g, or t
  misc_feature (576)..(577): n is a, c, g, or t
  misc_feature (579)..(597): n is a, c, g, or t
  misc_feature (599)..(601): n is a, c, g, or t
  misc_feature (603)..(606): n is a, c, g, or t
  misc_feature (608)..(608): n is a, c, g, or t
  misc_feature (610)..(613): n is a, c, g, or t
  misc_feature (615)..(615): n is a, c, g, or t
  misc_feature (618)..(618): n is a, c, g, or t
  misc_feature (621)..(625): n is a, c, g, or t
  misc_feature (628)..(630): n is a, c, g, or t
  misc_feature (632)..(637): n is a, c, g, or t
  misc_feature (641)..(642): n is a, c, g, or t
  misc_feature (644)..(644): n is a, c, g, or t
  misc_feature (647)..(647): n is a, c, g, or t
  misc_feature (649)..(649): n is a, c, g, or t
  misc_feature (651)..(652): n is a, c, g, or t
  misc_feature (656)..(658): n is a, c, g, or t
  misc_feature (663)..(670): n is a, c, g, or t
  misc_feature (673)..(675): n is a, c, g, or t
  misc_feature (678)..(679): n is a, c, g, or t
  misc_feature (681)..(685): n is a, c, g, or t
  misc_feature (687)..(687): n is a, c, g, or t
  misc_feature (690)..(690): n is a, c, g, or t
  misc_feature (693)..(695): n is a, c, g, or t
  misc_feature (699)..(704): n is a, c, g, or t
  misc_feature (706)..(708): n is a, c, g, or t
  misc_feature (710)..(715): n is a, c, g, or t
  misc_feature (717)..(717): n is a, c, g, or t
  misc_feature (719)..(721): n is a, c, g, or t
  misc_feature (723)..(723): n is a, c, g, or t
  misc_feature (725)..(726): n is a, c, g, or t
  misc_feature (728)..(729): n is a, c, g, or t
  misc_feature (731)..(731): n is a, c, g, or t
  misc_feature (733)..(739): n is a, c, g, or t
  misc_feature (741)..(768): n is a, c, g, or t
  misc_feature (770)..(773): n is a, c, g, or t
  misc_feature (776)..(779): n is a, c, g, or t
  misc_feature (781)..(783): n is a, c, g, or t
  misc_feature (785)..(792): n is a, c, g, or t
  misc_feature (794)..(798): n is a, c, g, or t
  misc_feature (800)..(821): n is a, c, g, or t
  misc_feature (824)..(833): n is a, c, g, or t
  misc_feature (835)..(842): n is a, c, g, or t
  misc_feature (844)..(845): n is a, c, g, or t
  misc_feature (848)..(853): n is a, c, g, or t
  misc_feature (855)..(855): n is a, c, g, or t
  misc_feature (857)..(864): n is a, c, g, or t
  misc_feature (866)..(866): n is a, c, g, or t
  misc_feature (868)..(868): n is a, c, g, or t
  misc_feature (872)..(872): n is a, c, g, or t
  misc_feature (874)..(874): n is a, c, g, or t
  misc_feature (876)..(876): n is a, c, g, or t
  misc_feature (878)..(880): n is a, c, g, or t
  misc_feature (883)..(889): n is a, c, g, or t
  misc_feature (891)..(891): n is a, c, g, or t
  misc_feature (894)..(894): n is a, c, g, or t
  misc_feature (896)..(896): n is a, c, g, or t
  misc_feature (898)..(898): n is a, c, g, or t
  misc_feature (901)..(904): n is a, c, g, or t
  misc_feature (906)..(910): n is a, c, g, or t
  misc_feature (913)..(913): n is a, c, g, or t
  misc_feature (915)..(915): n is a, c, g, or t
  misc_feature (918)..(918): n is a, c, g, or t
  misc_feature (920)..(923): n is a, c, g, or t
  misc_feature (925)..(926): n is a, c, g, or t
  misc_feature (929)..(929): n is a, c, g, or t
  misc_feature (932)..(932): n is a, c, g, or t
  misc_feature (936)..(936): n is a, c, g, or t
  misc_feature (938)..(938): n is a, c, g, or t
  misc_feature (942)..(943): n is a, c, g, or t
  misc_feature (948)..(949): n is a, c, g, or t
  misc_feature (954)..(957): n is a, c, g, or t
  misc_feature (961)..(961): n is a, c, g, or t
  misc_feature (963)..(963): n is a, c, g, or t
  misc_feature (965)..(966): n is a, c, g, or t
  misc_feature (968)..(968): n is a, c, g, or t
  misc_feature (970)..(970): n is a, c, g, or t
  misc_feature (973)..(974): n is a, c, g, or t
  misc_feature (977)..(980): n is a, c, g, or t
  misc_feature (983)..(989): n is a, c, g, or t
  misc_feature (992)..(992): n is a, c, g, or t
  misc_feature (995)..(995): n is a, c, g, or t
  misc_feature (997)..(997): n is a, c, g, or t
  misc_feature (999)..(1001): n is a, c, g, or t
  misc_feature (1004)..(1005): n is a, c, g, or t
  misc_feature (1007)..(1007): n is a, c, g, or t
  misc_feature (1010)..(1012): n is a, c, g, or t
  misc_feature (1016)..(1016): n is a, c, g, or t
  misc_feature (1018)..(1020): n is a, c, g, or t
  misc_feature (1023)..(1023): n is a, c, g, or t
  misc_feature (1026)..(1026): n is a, c, g, or t
  misc_feature (1030)..(1031): n is a, c, g, or t
  misc_feature (1034)..(1034): n is a, c, g, or t
  misc_feature (1036)..(1038): n is a, c, g, or t
  misc_feature (1040)..(1041): n is a, c, g, or t
  misc_feature (1044)..(1045): n is a, c, g, or t
  misc_feature (1047)..(1047): n is a, c, g, or t
  misc_feature (1051)..(1053): n is a, c, g, or t
  misc_feature (1055)..(1055): n is a, c, g, or t
  misc_feature (1064)..(1064): n is a, c, g, or t
  misc_feature (1066)..(1069): n is a, c, g, or t
  misc_feature (1071)..(1071): n is a, c, g, or t
  misc_feature (1077)..(1077): n is a, c, g, or t
  misc_feature (1081)..(1082): n is a, c, g, or t
  misc_feature (1084)..(1084): n is a, c, g, or t
  misc_feature (1090)..(1090): n is a, c, g, or t
  misc_feature (1092)..(1092): n is a, c, g, or t
  misc_feature (1098)..(1098): n is a, c, g, or t
  misc_feature (1101)..(1103): n is a, c, g, or t
  misc_feature (1105)..(1105): n is a, c, g, or t
  misc_feature (1108)..(1109): n is a, c, g, or t
  misc_feature (1112)..(1113): n is a, c, g, or t
  misc_feature (1121)..(1121): n is a, c, g, or t
  misc_feature (1123)..(1123): n is a, c, g, or t
  misc_feature (1228)..(1228): n is a, c, g, or t
  misc_feature (1243)..(1243): n is a, c, g, or t
  misc_feature (1250)..(1252): n is a, c, g, or t
  misc_feature (1256)..(1258): n is a, c, g, or t
  misc_feature (1260)..(1262): n is a, c, g, or t
  misc_feature (1265)..(1266): n is a, c, g, or t
  misc_feature (1273)..(1273): n is a, c, g, or t
  misc_feature (1282)..(1282): n is a, c, g, or t
  misc_feature (1288)..(1288): n is a, c, g, or t
  misc_feature (1298)..(1298): n is a, c, g, or t
  misc_feature (1300)..(1300): n is a, c, g, or t
  misc_feature (1303)..(1304): n is a, c, g, or t
  misc_feature (1306)..(1306): n is a, c, g, or t
  misc_feature (1315)..(1315): n is a, c, g, or t
  misc_feature (1318)..(1318): n is a, c, g, or t
  misc_feature (1321)..(1321): n is a, c, g, or t
  misc_feature (1324)..(1324): n is a, c, g, or t
  misc_feature (1326)..(1326): n is a, c, g, or t
  misc_feature (1330)..(1330): n is a, c, g, or t
  misc_feature (1333)..(1334): n is a, c, g, or t
  misc_feature (1336)..(1336): n is a, c, g, or t
  misc_feature (1339)..(1339): n is a, c, g, or t
  misc_feature (1342)..(1342): n is a, c, g, or t
  misc_feature (1357)..(1357): n is a, c, g, or t
  misc_feature (1360)..(1363): n is a, c, g, or t
  misc_feature (1366)..(1367): n is a, c, g, or t
  misc_feature (1370)..(1370): n is a, c, g, or t
  misc_feature (1372)..(1373): n is a, c, g, or t
  misc_feature (1375)..(1375): n is a, c, g, or t
  misc_feature (1377)..(1377): n is a, c, g, or t
  misc_feature (1384)..(1385): n is a, c, g, or t
  misc_feature (1389)..(1389): n is a, c, g, or t
  misc_feature (1391)..(1391): n is a, c, g, or t
  misc_feature (1393)..(1393): n is a, c, g, or t
  misc_feature (1396)..(1399): n is a, c, g, or t
  misc_feature (1403)..(1403): n is a, c, g, or t
  misc_feature (1435)..(1435): n is a, c, g, or t
  misc_feature (1528)..(1528): n is a, c, g, or t
  misc_feature (1585)..(1585): n is a, c, g, or t
  misc_feature (1600)..(1600): n is a, c, g, or t
  misc_feature (1624)..(1624): n is a, c, g, or t
  misc_feature (1627)..(1627): n is a, c, g, or t
  misc_feature (1630)..(1630): n is a, c, g, or t
  misc_feature (1786)..(1786): n is a, c, g, or t
  misc_feature (1990)..(1990): n is a, c, g, or t
  misc_feature (1992)..(1992): n is a, c, g, or t
  misc_feature (2014)..(2014): n is a, c, g, or t
  misc_feature (2740)..(2740): n is a, c, g, or t
  misc_feature (2970)..(2970): n is a, c, g, or t
  misc_feature (3031)..(3031): n is a, c, g, or t
  misc_feature (3187)..(3187): n is a, c, g, or t
  misc_feature (3289)..(3289): n is a, c, g, or t
  misc_feature (3334)..(3334): n is a, c, g, or t
  misc_feature (3337)..(3337): n is a, c, g, or t
  misc_feature (3647)..(3647): n is a, c, g, or t
  misc_feature (3651)..(3651): n is a, c, g, or t
  misc_feature (3731)..(3731): n is a, c, g, or t
  misc_feature (3776)..(3776): n is a, c, g, or t
  misc_feature (3861)..(3861): n is a, c, g, or t
taaaactgtctacccaaagcctccaaaagttttggattgcttcgctggtggcgggagtataccgttggaagcactgaggttgggttgtgaaacttacgctctggaatacaaccctgtcgctgtcctcatccttaaagccactttggagtatccgcaaaagtttgggaaaaggttgctggaagaagtgaggcgttggggagaatgggtgttaaatgaagcaaagaaggaactcgcaagtttctaccccaaagaccctgacggctcaatccctgttggctacatttgggngaggncnnngnntngncnagnncntnacnncgntnncnnnntancnnngatgnnnnaaacnngncnnncanacanngnnnanagnnaaannncannnaaannnntgnnnnacnngaannacaagcnannnnannnagtnancgnggnnnncnannaannnnacnnngnnncntnnnangnnnnnnnnnnnnncgctgnnnnnnntnnnncnntntncgnnnnnncnnntnangncgannnaacnannnannnnnncnnnnnangnnaannnnnncnnnnannnanngnngnnnnnnnnnnnnnnnnnnncnnntnnnncnannnntnccnatnnnnnaannnannnnnnttgnnanccnancnnaatnnnaaagnnnnnnnnaannnaanngnnnnncnaangcnnnaggnnnnnngnnngnnnnnngngnnngnanngnnancnnnnnnngnnnnnnnnnnnnnnnnnnnnnnnnnnnntnnnnttnnnnannntnnnnnnnncnnnnngnnnnnnnnnnnnnnnnnnnnnnagnnnnnnnnnntnnnnnnnntnnccnnnnnngncnnnnnnnncnangcananangnnnaannnnnnngncgncncngannnngnnnnngcngnagngnnnntnntgnctntggngntgannggganngatgnnnntacntncnncntntgnnttnnnnatnnnnnnnaanctngngnnntcnntnttnnnggtngnnntgnccnaccnntancnnngnnctnntntgannngnacgcaattncnnnngntggagntgcnngngggagntnggcacncgnnngnatnntgnnagtccttncncatcttacccaaatcccgtcagcagatgttccgcctaaggttcatcaaggttcagccactgaccttccttaccctgaccaattctttgatgccgtcatcactganccaccttattacganaatgtgnnntacnnngnnntgnncgacttnttttatgtntggctnagacgcaccntnggnnanctttacccnganttnttngnaacnccnntnacnccnaaggcagaagagttngtnnnngannctnanngncntggcggnnactngnangcnnnnaagnaatggtttgagcagaaactcactcaagccttncgtgagatttatcgtgtgcttaaggacgatgggattgccgtcattgtcttcgcccacacgagcgttgatgcatgggagagcatcattaacgcnttgcttgatgccgacctttacttaaccgcatcgctgcccatccacacggagatggangcgaggttgcgccancaaaattcagccgcattagcgtcntcngtntacatggtttgtcgcaagcgggttgaggagaaggtaggcgaatatcgttcggtcattcgtgagatggaagaggaaatcccgaaatcgttggagaagttctgggaggcagggattagcggacctgatttttggcaaagtgccatcggtcctgccgtngccatcttcgggcgatacaagaaagtcgtcaagcaggatgggacggaagtgagcgtcagggaactgctggaggaagcccgcagaatcaccgcccactatgcattgaagcgagttttggagaaagttggtggcgacgaacacactgttggagcacttgaccctgtgacccgattctaccttgtctggcgatggacttttgggggngngaaaattcaagtcccctttgangatgcgttgcgggtcgctcgctccgagggcgtagagttaagagactatgcgagagccgacagcataatccgcatttctggtggtaaggtgaaagttgtcggaccaaccgaacggaaagatgacaaacgcttccttgagaacttaaggttcaattccctcattgatgctatccacagggcagtgatagcgtggcaaagcggagatgatgtcacactgcaagcgatattgtcacagagaggcaacgaaaccttctggcaagtcgcccaagcaatcgctgaagttttgccagaaggcgacgaagaacgaaggttacttttcgggcttctccaaaggcgtggacgagttccccaaacagcacaggagcaaacacaacttgatttgtcttaggagtgaacacgacaatttgaacattgcaaaaacgccgttgcgatgcccaagggcgtggtgaagttatcatggagcaaacgattatgcaattgctggagtcaactgctgaaggagcaaagggagaagttgaaagggcgaaagagaaatggcggcaacagattcaggacttggttcgcaacttgacaggtttgagattaactcatatccactctccaaaggaaacagtcaaattgagcatccgtgttgatgctgggttgcctaaaaaggtggttgagaagatcaaatcggatgtagggcaaatggaactgatcagggaacttttgagtttccacaaagcgncgcttactgccctaagggataactgcaaggaattgttgacgaacagtctttttgacaagttgcgggatttaggttggagcaaagcagagagttaccgttcaacaattgaatcaacccttaaggtggctgaggaattactcagggaagccgagcaagcacaggttatccgcaaaattttggagatagatgaagatgtcttgggagaatacagcccagagggtttccactcnggcaagatcacactctactggatggtgattggtgcagtggcgaggtggttgggagttagcnttgagggactaacagtagttgtgctaactcacgaaatggttcacgcttacacccatttgggaacggacatagacggtttagggtgttgcgtatgttttttaaaggcaaaacatgaggttcatgagggtttggctcaatacttcactcacgaagtcntgaatgttttgagggtaagagggcatgaagagttttggagagcctatgagagactgttgaaacatcaaaaaggtccctacaaggagcacgagaattggttgnaaaacgaatacactccagaggttgtgcgggctgcctatttggcanttnggggagaagagggagaggtcacaattgaaaaatttcgcagtaaattgagtgaatgtgcccaacttcttgggcgtgatagcaagagagatcaaacaacgcagaggtaagcacaatctccgttatggcagtgaaaccgctgcaatgcttaaaggctttaaggaggtgctttgtgatggaaagattgccgtcatggatggaggtcgtaaatcctgacccgattgtgctttcagagaggttagatgaatcgctatttgcagccgacctttacagggttctaaaaggcgatgctccccgtgagtatcaagacccnaganggtttgccgagcaaacttatccgaccgaaggcatggttcaactccttagcgatgtagtgaggcgattgagtggcaaaggntcatccaacccagtcatccaaatccagacaccctttggaggcggnaaaactcacgctttgattgccctttaccacttggtgaagcaaggaagtgagatcaaaaattccctgttgggtgaaagagtgttanagaaggctggtgtcagcagtttcccgaaggcaaaagttgcggtcttcgtggggacggtagtaagccctaaagagtcacctacaccatggggtgaaattgcaaggcaacttggtcgctacgatttggttaagagagccga

SEQ ID NO: 1111 - DNA, 4000 bp, Escherichia coli
  misc_feature (718)..(718): n is a, c, g, or t
  misc_feature (1961)..(1961): n is a, c, g, or t
  misc_feature (1963)..(1963): n is a, c, g, or t
  misc_feature (1989)..(1989): n is a, c, g, or t
  misc_feature (1992)..(1992): n is a, c, g, or t
  misc_feature (2301)..(2301): n is a, c, g, or t
  misc_feature (2699)..(2699): n is a, c, g, or t
  misc_feature (3103)..(3103): n is a, c, g, or t
  misc_feature (3690)..(3690): n is a, c, g, or t
  misc_feature (3732)..(3732): n is a, c, g, or t
  misc_feature (3944)..(3944): n is a, c, g, or t
gcgtcacctctcacggggatagatcgaacagatctgagattttgacttcggatctgtcatgccaagcgcttttgtgtccctgattacgccccatttagcgtaatcggtctgtgtcggacgcgttctcataaacaagccacggttaatttggaagccgcacggaagggtgcgtctacacgcctcttcgacctgttcgattacgtcctcatcctcaagttcaagccaaatcctaccaacctgtaccccaagctccacatcctgttgccccacttgaatgtgtttgcgccctgcgtgcgcgttcggcgttcccttagctggccctgtcggcacagtggaagcgatccgaggtccgtgcaatatcaagcgcgttataccgttgatcttggctaattctgtaagcaacttctcaaccatgtctgggctaagaaatcgttcagtgaaaagctctatttgaacagggatgttcgtatcggggacattcgtatccattatgtatcgtaaacctccgcgcaatttacgtaattacattccctccgctgctttggcaacagcagtgattgggtctttgaattctggtatctcgccgtacactatgccgatgagctttgacgttgactcgacagagaacatctgtgtccccgcgtcaattgacacggctgctgcaacgcatggaatcgcaaagcccttggagtgtctcgtcacgatgtggttcccattnaacacaccaggtccgccgccgccgtagatcgagtggctgaagaacgagaacccgaccgctgtacccataaccttaccgaagtcacagccggggagtcccgtctcgtgctcgagcaggtcgtttgcgtacagcagcgttgacgaaaccgcttgcgcgcctcgagacgcaccacagtttacaatggtcgcggcgagtgtgcaagcagcgcaataggcgttccaggctgcgacgtcgccagtcttcatcgccttaaagccagaaggccaggttacatcttctttgatgacaccggctgcttttgccttttcaacggtcgacgcaactacagaaccgatagtgccgtcttgtccgttctctttaacgagcgagtaggtcacgttgttcgcgtttaacccctgcatcgcaagtccgcagagttgtaaacgctcgttccagccaatagcgtcacccatctcccagacacccgcctgttcgaatatcgatgacagcgcggccgcgttcatcgtccgcttgccagtggcagctgcaacgtggttaaccgctacatttcgcagtgagtaaccgtacccttcatctttctgtggggtttcaagcatggatttcaccataccgcccacggcgtcgagagtctgtgggtactctccccaaatggccgccttaaccatcggcgcttggaacatgtccaccttgaacatgtcgataatcgcctgagttagtgcgctgcttgttgcagtgattcctgagacataggtagctccagcctcgagacgtgctgtcggtatttggaccataagctgctttccgtcgccaaggggcttgacgaccgtgtcgtcgccttcacttaccattatgaggtccttgacctccttcgcaagagcgtcgacgttgcccaataggtccaggttcaactcgcgaccgagtatctgtctacccttgccgcccattttaccggtcatcaaagcgttttggataccaccaagattaacggccaccgttcttaaggtggtgttgataatcttcttgatagccgggttcaccatcgggctgagcgcctcgagtggtatgttggaaccaactttttgacctttgtcgttatgtaaatcgactttgtcttcaaattttggcattctatccctccacagggtcaactgccacacgatcaactctgtatgctgtaaaccatgactgaaaaatagctgaatacaactcgaccgtaaaacgataaaaagttgtatgttttacntngcatggagcgtaccctgggtttaccntcnaatccttttaatagtttattaagcttgtgctggaaaacagcggagcggtaaagaaatattttccgtggatatttttgtaaaaaaacccttctaaatttttatttaattttttatatataaacagttctatagagttatagatacgcaacggccgccaatcactcaaaagttttatatgtttccaatcttatctcgcctttgcatatgaaggtattaataagtcccaaagacgaatttgaggcaaaagcagcagttaatgggggcgcagatattatagacgttaaaaaccccgatgaaggatcactcggngctaactttccgtgggtaatacgacaggttcggaaccttgtaccttactccatagaggtgagcgcgacgatcggtgattttccgcatctccctggctccgcctcattagctgcactaggcgcagctgtgtctggggctaattacgtcaaagtaggactcaaagggtcaaaaacgcgagacgaggcgatttttttaatgcagcatgtaacgagagcggtgaaggaatacaacattaaagccaaagtcgttctcgcagggtacgcagactatcacagagcaaagactctcgatccctttctgctgcctgaagttgccggtagtgctggctgtgacgtcgtgatggtcgatacgttcattaaggacggaaaaaggctgtttgatttcatggacgaagcttnctgtaagcgttttatcgataaagggcacgaaaaagacttggaagttgcccttgcaggatccatcaaactgcaagatatccccatattaaaacgcacaggtgctgacatcattggaattagaggcgcagcttgttcacacggcgaccgtttagctggagcgatacaggccgaaaacgtcagggcgctaatggacctcgcaaaacaatcatgagtgtcttcggacaaacctaactgccacctgatgtcgcttagcaaactattacttttcacgctgccatgtttataatatgagtgtaaactacgcagctctgtcagacaagctcacgagtgttttaggtctaaaaggctcacccgtggcagtcaaacttattcgaacggaatcaagccttccaaaagggcttgtncatacaaacgaggttctgcgccattgcgaaatggttcagaaggcgcgacgcggttctaaattctacgcaacagtcgagcagcacgcgtgtaagggcggcgctggaatgctcggagtaatcgatataccagagaacatcaaatccggcgaattttactacaaactaggaagattctcttcagttgaacacgcggcagagaccatgcaaggtattccccacgtcgatttcaagacctatgcgaccgcttactcgccacttgccgagaccccttttgacccagacgtggtcgtacttgttgttagtccccatcaagcgatgatgatcgcgcaagctaacgtttacgaactacattcgaggaatattgctgatttctcaggaattcaatcgatatgtggagatgccgtcgctgcgccccttatgagggataccgtaaacttcacgctcggctgctcgggttctcgcaaatacgcaaaggtgagcgaagatgaacttatagttggcatccctatgaagatgctcccaaaattagctgatgctatccaaaaacttgcctaaccagcgtattcgagctcaatcgcgcgaagggngatgaactgtaccgttaaatttaaaaagaacaattcgtccangctatgtgcaaagttatggaccgaatagctcacagcaagcgagctccctaataaataccgtgttaaactctgctaaagtatgaggatcggtagcagtggttatattcccatctctctccacggatccccctgaatagttagcgcccgcctctagcaattctcgtccaacgctggggtgcgacgtcatcgtcttattcttgacgattccagcngatatcaacacctgtgggccgtgacaaaccgcgcctatctgtaatcctcgcttgta

SEQ ID NO: 1112 - DNA, 4000 bp, Escherichia coli
  misc_feature (2118)..(2118): n is a, c, g, or t
  misc_feature (2216)..(2216): n is a, c, g, or t
  misc_feature (2470)..(2470): n is a, c, g, or t
  misc_feature (2479)..(2479): n is a, c, g, or t
  misc_feature (2482)..(2485): n is a, c, g, or t
  misc_feature (2489)..(2491): n is a, c, g, or t
  misc_feature (2493)..(2493): n is a, c, g, or t
  misc_feature (2502)..(2503): n is a, c, g, or t
  misc_feature (2506)..(2508): n is a, c, g, or t
  misc_feature (2510)..(2511): n is a, c, g, or t
  misc_feature (2515)..(2516): n is a, c, g, or t
  misc_feature (2518)..(2518): n is a, c, g, or t
  misc_feature (2521)..(2521): n is a, c, g, or t
  misc_feature (2524)..(2524): n is a, c, g, or t
  misc_feature (2527)..(2527): n is a, c, g, or t
  misc_feature (2537)..(2540): n is a, c, g, or t
  misc_feature (2542)..(2542): n is a, c, g, or t
  misc_feature (2545)..(2545): n is a, c, g, or t
  misc_feature (2548)..(2548): n is a, c, g, or t
  misc_feature (2552)..(2554): n is a, c, g, or t
  misc_feature (2557)..(2557): n is a, c, g, or t
  misc_feature (2560)..(2560): n is a, c, g, or t
  misc_feature (2566)..(2567): n is a, c, g, or t
  misc_feature (2571)..(2572): n is a, c, g, or t
  misc_feature (2576)..(2576): n is a, c, g, or t
  misc_feature (2578)..(2578): n is a, c, g, or t
  misc_feature (2582)..(2582): n is a, c, g, or t
  misc_feature (2584)..(2584): n is a, c, g, or t
  misc_feature (2586)..(2586): n is a, c, g, or t
  misc_feature (2594)..(2594): n is a, c, g, or t
  misc_feature (2596)..(2596): n is a, c, g, or t
  misc_feature (2605)..(2605): n is a, c, g, or t
  misc_feature (2609)..(2609): n is a, c, g, or t
  misc_feature (2615)..(2616): n is a, c, g, or t
  misc_feature (2618)..(2618): n is a, c, g, or t
  misc_feature (2620)..(2620): n is a, c, g, or t
  misc_feature (2625)..(2625): n is a, c, g, or t
  misc_feature (2628)..(2628): n is a, c, g, or t
  misc_feature (2644)..(2644): n is a, c, g, or t
  misc_feature (2647)..(2647): n is a, c, g, or t
  misc_feature (2656)..(2656): n is a, c, g, or t
  misc_feature (2667)..(2667): n is a, c, g, or t
  misc_feature (2671)..(2671): n is a, c, g, or t
  misc_feature (2676)..(2678): n is a, c, g, or t
  misc_feature (2681)..(2681): n is a, c, g, or t
  misc_feature (2692)..(2692): n is a, c, g, or t
  misc_feature (2695)..(2695): n is a, c, g, or t
  misc_feature (2697)..(2697): n is a, c, g, or t
  misc_feature (2700)..(2700): n is a, c, g, or t
  misc_feature (2705)..(2706): n is a, c, g, or t
  misc_feature (2713)..(2713): n is a, c, g, or t
  misc_feature (2742)..(2742): n is a, c, g, or t
  misc_feature (2747)..(2747): n is a, c, g, or t
  misc_feature (2749)..(2749): n is a, c, g, or t
  misc_feature (2754)..(2754): n is a, c, g, or t
  misc_feature (2760)..(2761): n is a, c, g, or t
  misc_feature (2764)..(2764): n is a, c, g, or t
  misc_feature (2768)..(2769): n is a, c, g, or t
  misc_feature (2771)..(2772): n is a, c, g, or t
  misc_feature (2796)..(2796): n is a, c, g, or t
  misc_feature (2810)..(2810): n is a, c, g, or t
  misc_feature (2812)..(2813): n is a, c, g, or t
  misc_feature (2821)..(2821): n is a, c, g, or t
  misc_feature (2824)..(2824): n is a, c, g, or t
  misc_feature (2843)..(2845): n is a, c, g, or t
  misc_feature (2848)..(2848): n is a, c, g, or t
  misc_feature (2858)..(2860): n is a, c, g, or t
  misc_feature (2866)..(2866): n is a, c, g, or t
  misc_feature (2869)..(2869): n is a, c, g, or t
  misc_feature (2875)..(2875): n is a, c, g, or t
  misc_feature (2879)..(2879): n is a, c, g, or t
  misc_feature (2884)..(2884): n is a, c, g, or t
  misc_feature (2894)..(2894): n is a, c, g, or t
  misc_feature (2901)..(2901): n is a, c, g, or t
  misc_feature (2914)..(2914): n is a, c, g, or t
  misc_feature (2926)..(2926): n is a, c, g, or t
  misc_feature (2942)..(2942): n is a, c, g, or t
  misc_feature (2945)..(2945): n is a, c, g, or t
  misc_feature (2947)..(2948): n is a, c, g, or t
  misc_feature (2964)..(2964): n is a, c, g, or t
  misc_feature (2967)..(2967): n is a, c, g, or t
  misc_feature (2976)..(2976): n is a, c, g, or t
  misc_feature (2981)..(2982): n is a, c, g, or t
  misc_feature (2989)..(2989): n is a, c, g, or t
  misc_feature (3010)..(3010): n is a, c, g, or t
  misc_feature (3014)..(3014): n is a, c, g, or t
  misc_feature (3018)..(3018): n is a, c, g, or t
  misc_feature (3028)..(3028): n is a, c, g, or t
  misc_feature (3032)..(3032): n is a, c, g, or t
  misc_feature (3038)..(3040): n is a, c, g, or t
  misc_feature (3044)..(3044): n is a, c, g, or t
  misc_feature (3046)..(3046): n is a, c, g, or t
  misc_feature (3070)..(3070): n is a, c, g, or t
  misc_feature (3074)..(3074): n is a, c, g, or t
  misc_feature (3076)..(3076): n is a, c, g, or t
  misc_feature (3079)..(3079): n is a, c, g, or t
  misc_feature (3082)..(3082): n is a, c, g, or t
  misc_feature (3086)..(3086): n is a, c, g, or t
  misc_feature (3089)..(3089): n is a, c, g, or t
  misc_feature (3098)..(3098): n is a, c, g, or t
  misc_feature (3102)..(3102): n is a, c, g, or t
  misc_feature (3109)..(3110): n is a, c, g, or t
  misc_feature (3113)..(3113): n is a, c, g, or t
  misc_feature (3120)..(3122): n is a, c, g, or t
  misc_feature (3126)..(3126): n is a, c, g, or t
  misc_feature (3129)..(3129): n is a, c, g, or t
  misc_feature (3131)..(3131): n is a, c, g, or t
  misc_feature (3140)..(3141): n is a, c, g, or t
  misc_feature (3144)..(3144): n is a, c, g, or t
  misc_feature (3152)..(3152): n is a, c, g, or t
  misc_feature (3155)..(3155): n is a, c, g, or t
  misc_feature (3160)..(3160): n is a, c, g, or t
  misc_feature (3162)..(3163): n is a, c, g, or t
  misc_feature (3165)..(3165): n is a, c, g, or t
  misc_feature (3169)..(3169): n is a, c, g, or t
  misc_feature (3172)..(3172): n is a, c, g, or t
  misc_feature (3175)..(3177): n is a, c, g, or t
  misc_feature (3181)..(3181): n is a, c, g, or t
  misc_feature (3183)..(3183): n is a, c, g, or t
  misc_feature (3187)..(3188): n is a, c, g, or t
  misc_feature (3192)..(3192): n is a, c, g, or t
  misc_feature (3194)..(3194): n is a, c, g, or t
  misc_feature (3197)..(3197): n is a, c, g, or t
  misc_feature (3200)..(3200): n is a, c, g, or t
  misc_feature (3202)..(3202): n is a, c, g, or t
  misc_feature (3206)..(3206): n is a, c, g, or t
  misc_feature (3211)..(3213): n is a, c, g, or t
  misc_feature (3217)..(3218): n is a, c, g, or t
  misc_feature (3220)..(3220): n is a, c, g, or t
  misc_feature (3226)..(3227): n is a, c, g, or t
  misc_feature (3229)..(3229): n is a, c, g, or t
  misc_feature (3232)..(3232): n is a, c, g, or t
  misc_feature (3237)..(3239): n is a, c, g, or t
  misc_feature (3244)..(3248): n is a, c, g, or t
  misc_feature (3264)..(3266): n is a, c, g, or t
  misc_feature (3274)..(3275): n is a, c, g, or t
  misc_feature (3279)..(3279): n is a, c, g, or t
  misc_feature (3281)..(3281): n is a, c, g, or t
  misc_feature (3283)..(3283): n is a, c, g, or t
  misc_feature (3286)..(3288): n is a, c, g, or t
  misc_feature (3290)..(3290): n is a, c, g, or t
  misc_feature (3298)..(3301): n is a, c, g, or t
  misc_feature (3304)..(3305): n is a, c, g, or t
  misc_feature (3308)..(3309): n is a, c, g, or t
  misc_feature (3313)..(3313): n is a, c, g, or t
  misc_feature (3317)..(3317): n is a, c, g, or t
  misc_feature (3321)..(3321): n is a, c, g, or t
  misc_feature (3331)..(3333): n is a, c, g, or t
  misc_feature (3336)..(3337): n is a, c, g, or t
  misc_feature (3340)..(3341): n is a, c, g, or t
  misc_feature (3344)..(3344): n is a, c, g, or t
  misc_feature (3349)..(3349): n is a, c, g, or t
  misc_feature (3351)..(3351): n is a, c, g, or t
  misc_feature (3353)..(3354): n is a, c, g, or t
  misc_feature (3356)..(3359): n is a, c, g, or t
  misc_feature (3362)..(3363): n is a, c, g, or t
  misc_feature (3367)..(3367): n is a, c, g, or t
  misc_feature (3375)..(3375): n is a, c, g, or t
  misc_feature (3379)..(3379): n is a, c, g, or t
  misc_feature (3400)..(3400): n is a, c, g, or t
  misc_feature (3418)..(3419): n is a, c, g, or t
  misc_feature (3429)..(3430): n is a, c, g, or t
  misc_feature (3433)..(3433): n is a, c, g, or t
  misc_feature (3440)..(3440): n is a, c, g, or t
  misc_feature (3444)..(3444): n is a, c, g, or t
  misc_feature (3449)..(3450): n is a, c, g, or t
  misc_feature (3458)..(3458): n is a, c, g, or t
  misc_feature (3467)..(3467): n is a, c, g, or t
  misc_feature (3483)..(3483): n is a, c, g, or t
  misc_feature (3505)..(3507): n is a, c, g, or t
  misc_feature (3516)..(3516): n is a, c, g, or t
  misc_feature (3527)..(3527): n is a, c, g, or t
  misc_feature (3529)..(3529): n is a, c, g, or t
  misc_feature (3531)..(3531): n is a, c, g, or t
  misc_feature (3534)..(3534): n is a, c, g, or t
  misc_feature (3548)..(3552): n is a, c, g, or t
  misc_feature (3560)..(3561): n is a, c, g, or t
  misc_feature (3565)..(3565): n is a, c, g, or t
  misc_feature (3567)..(3567): n is a, c, g, or t
  misc_feature (3582)..(3582): n is a, c, g, or t
  misc_feature (3586)..(3586): n is a, c, g, or t
  misc_feature (3596)..(3597): n is a, c, g, or t
  misc_feature (3605)..(3605): n is a, c, g, or t
  misc_feature (3612)..(3612): n is a, c, g, or t
  misc_feature (3619)..(3619): n is a, c, g, or t
  misc_feature (3630)..(3631): n is a, c, g, or t
  misc_feature (3637)..(3637): n is a, c, g, or t
  misc_feature (3643)..(3643): n is a, c, g, or t
  misc_feature (3646)..(3646): n is a, c, g, or t
  misc_feature (3648)..(3648): n is a, c, g, or t
  misc_feature (3650)..(3650): n is a, c, g, or t
  misc_feature (3654)..(3654): n is a, c, g, or t
  misc_feature (3660)..(3660): n is a, c, g, or t
  misc_feature (3680)..(3681): n is a, c, g, or t
  misc_feature (3691)..(3692): n is a, c, g, or t
  misc_feature (3697)..(3697): n is a, c, g, or t
  misc_feature (3724)..(3724): n is a, c, g, or t
  misc_feature (3735)..(3735): n is a, c, g, or t
  misc_feature (3742)..(3742): n is a, c, g, or t
  misc_feature (3745)..(3745): n is a, c, g, or t
  misc_feature (3753)..(3753): n is a, c, g, or t
  misc_feature (3756)..(3757): n is a, c, g, or t
  misc_feature (3769)..(3769): n is a, c, g, or t
  misc_feature (3781)..(3781): n is a, c, g, or t
  misc_feature (3783)..(3783): n is a, c, g, or t
  misc_feature (3791)..(3791): n is a, c, g, or t
  misc_feature (3793)..(3793): n is a, c, g, or t
  misc_feature (3801)..(3801): n is a, c, g, or t
  misc_feature (3812)..(3812): n is a, c, g, or t
  misc_feature (3843)..(3843): n is a, c, g, or t
  misc_feature (3852)..(3852): n is a, c, g, or t
  misc_feature (3855)..(3855): n is a, c, g, or t
  misc_feature (3861)..(3861): n is a, c, g, or t
  misc_feature (3865)..(3865): n is a, c, g, or t
  misc_feature (3871)..(3872): n is a, c, g, or t
  misc_feature (3874)..(3875): n is a, c, g, or t
  misc_feature (3882)..(3883): n is a, c, g, or t
  misc_feature (3885)..(3886): n is a, c, g, or t
  misc_feature (3891)..(3891): n is a, c, g, or t
  misc_feature (3898)..(3898): n is a, c, g, or t
  misc_feature (3901)..(3901): n is a, c, g, or t
  misc_feature (3903)..(3903): n is a, c, g, or t
  misc_feature (3907)..(3907): n is a, c, g, or t
  misc_feature (3911)..(3911): n is a, c, g, or t
  misc_feature (3918)..(3918): n is a, c, g, or t
  misc_feature (3921)..(3921): n is a, c, g, or t
  misc_feature (3924)..(3924): n is a, c, g, or t
  misc_feature (3926)..(3927): n is a, c, g, or t
  misc_feature (3930)..(3931): n is a, c, g, or t
  misc_feature (3936)..(3936): n is a, c, g, or t
  misc_feature (3939)..(3939): n is a, c, g, or t
  misc_feature (3941)..(3943): n is a, c, g, or t
  misc_feature (3945)..(3946): n is a, c, g, or t
  misc_feature (3948)..(3948): n is a, c, g, or t
  misc_feature (3953)..(3953): n is a, c, g, or t
  misc_feature (3961)..(3961): n is a, c, g, or t
  misc_feature (3963)..(3963): n is a, c, g, or t
  misc_feature (3966)..(3967): n is a, c, g, or t
  misc_feature (3971)..(3973): n is a, c, g, or t
  misc_feature (3977)..(3977): n is a, c, g, or t
  misc_feature (3980)..(3980): n is a, c, g, or t
  misc_feature (3982)..(3982): n is a, c, g, or t
  misc_feature (3988)..(3990): n is a, c, g, or t
  misc_feature (3995)..(3998): n is a, c, g, or t
  misc_feature (4000)..(4000): n is a, c, g, or t
caccgctgcatcgacgagcttgccgggaactgattggcatgtccatcccgcgcggcgtgtcgcgtttgcctggcagagataggtcggggcaatgcgaccgtgctcctggctgtagcgcacactcatgcgttcgccacatagaccgcacaggacgcgaccttggagtaacgcggggccctcgcgggccggccccgacagccgctcgccagcgaaggcgcgggcgttatccgcgagccgacgctgattggtctcgaagcagtcccagtcgatgtagccctgatgcatgccaggcatcacgaactgccagtccgccctggcaaccttgacgacactggtgccaccatcgggccggtggcgtgtgcgcgtgcggccatacgcgaatgcgccggcgtagcgtggattgtgcagaacctgcaggatgcgcgaatgctgcggtggcgcccacaagagttcgcccttgtttgacccggtaagcagtcgacgcgggaacatgaggccctgctcccggaagaagcggactgtctggacagcacttccggtccgatcgaatgtctcgaagaccaagcgtagggcgcgctgcacctgcatgtcgggatcaaggccgagtgttccctcggccatgtaaaccaagccgaccggcggccgcatctcgagctcgccgcgcttggccttgttgagttgaccaccacgcatgcgcgccttgaggatgtgcagttcggcctcgctcattgtgcctttgaggccgagcagcaggcgatcgttgaaggcggctggatcgtagattccatcttcgtcaacaataagcgtcgccgtcaatgcgcacaactcgatgaggcgatgccagtccgccgagttgcgagcaagacgcgagacttcgagacccatgacaaccccagccttaccgagcgccacctcgctcacgagttgctggaagccatcgcgtgctgctgcattcgatccggatttaccaagatcgcgatcgatgacatggatgcgatcgatcggccagcccgccgccaccgcccgatcacgcaacgcgtattggcgcttcgtactctcgccgtgctcggcaacctggcgaagcgtcgattggcgaacataaagataggcgtcacgcttgagatggtcggcggtgaccttgagttcaggcatggacgggctccattgcgatggcgacgaggatgctggcgacaagacgagtgatgtcgcttgttgccggtgctgggtcgtgcggggttgagggcgtgagccgatcatcggagcaggccacctcgacagggggctcctgcccgagtgctcgaatccattccgccacacctcggcggtggagaatgccgagaccgggacaagccgcgcccccgccgcgcaataccgcggcgcgcaacgtctcgtagcgctccgtggtgtccgacggcgcgacgatcaggttggattgattcgtttttttttgcgcgccagcgcccgttccaggctgcgccggtgcaccttgattccgaaccgcgtttcgatcgcaccgacacattgcgaagtcgtcagagcggggcttgcggttttgagatcggcaacgaaggcaaccacctcggtggagatcttgtggccgctcctgggaccgcgtctgctcggcagcagaccagcaagaccagtcgtctgcagcgcgttctgggccttgtagaaggtcggccgggtgacgccgaacgtcgcggcggcatcgctgattgcagtgccgtcgacctggtggcgccgcaccatctcgtagcgcacctggaccaggtctttggcatcgaagaatggattgccggtgaacaagtcgtcgcgcacggcttcgggattgggattgagcacgccgtcctgcgacagcgcttcgctcttcgggtctggcttttttgcctttgccatgggcggccctgctaaaacgtaaatataaatatgcctcaatatattgcgtgtcaatcgcgaatttgacgcaacataaaggattcattgcaaataagacccgataagttgctctgctatggcagcgtataggcgtcatttcgtttacatatgtggcgtaattacctttacgcatcgccggtctctatgctctcggcgagccggctcaacacatcgcacaacgcnaacagatcaaccgtgcggaaggccgctctctccgcagcaactaaccggaagtcatccataggatcgacatcggtgaatgcgctggtgatcgtgcacantcgaccgcttgggccctcatagaccacacgatcttcgccccaatgacggcgtcggcagatcaagtcgaatgaaagaccatgccgcggatggaacgggtgcgtgatgcgtaccttgcgggagatcgtacccacacagcgtgcagtcgacgactttcgataaggccaaggtcgaggtcgccgtgcaggtcgcgacgcgctggattatcgccaagctgcgcaacacccggttcttctcgctcgtcgagttgaacgtngcgatcggngannnngtcnnngngctcaacgnncgnnngnngcgnnanctnggngcnagccgccgcnnnntnttngangcgnnngancgnccggcnntgannccgntnccgncngngccctatnantacgccgantggnggcggnncngngtggnccncgattaccatgtcgangtngaggagcantactactcggngccnccccnnntgntccgccaggcngtngnggngcggnncaccgcngccaccatcgaggtgttccatcgcggcanccgcntngccgnccacgnncgntcgnngnngaaccgccaccacaccaccatgcncgagcacatgccgncnncccatcgncgntacgccgcctggacgccgnnncgnctcctgggcnnngctgangangtcggnccgncgacnaccgcgctgntcgaggngatcatgcgcganaagccgcatccngagcagggcttccgcnccncnntcggcatcctcaggcnggncaacagctncgggnngcaacgnctggaagccgcctgcggccgngggntcancatcggcgcngcgngctacnnntcgntngcctcgatcctcaagaccaacctngatnancgncancctnccnccaccaccnccgnggccgannccntgcaccnnnacancancngccgccgcnnctnctactacnganaaganannangtgntgntcnnnccancnaccnnccancngcncgncncgcngctcnnnggcnngncggcanngnccntcgcnnngatgnnnnncgatgccgacccggcnnncccgcgtnncgcntngnggnnngngctgctcnnnngannganngcgnagcnacgnagcgagagannnaanngcnngcngcgcnantnnannnngcnncgcnaccaggcntcgntcgaggacatcgactatcgcnccgcgcgccgcctcgacnnggccctgctnncgntgctggncgcnggccnntggattgncgagcatgncaatctgctgatctcnggaccctgcggcgtcggcaagnnntggctcggntcggcgctggncnanaangcctgccgtgacgnnnnnaccgtgcnntatnancgcgtgccgcgcctnttcngcgatctcgnnttggcgcncggcganggccgcnacgctcgtctnntccgtncgctcngcnangncganctgctnatcctcgacgactggggtcnngacccgctcnncgccnccgcgcgccgcgacctcatggagatcntggaggaccgntacggcnccngctcgacnctnntcaccagccagntcccggtcgatncntggcacgngntgatcggngatccgacctncgccgacgccatcctcgaccgcctcgtccanaacgccaancgnatcgcnctcnacgggnngnngatgcgnngnnccagnacgcccngcngngagnccancgcgacnggnccnannganncgganccnannncnnangccgncaagcacncngcnnccgnnnccanagnancagcannncgccnnnngn

SEQ ID NO: 1113 - DNA, 4000 bp, Escherichia coli
  misc_feature (409)..(409): n is a, c, g, or t
  misc_feature (1469)..(1469): n is a, c, g, or t
  misc_feature (1475)..(1475): n is a, c, g, or t
  misc_feature (1984)..(1984): n is a, c, g, or t
  misc_feature (1990)..(1991): n is a, c, g, or t
  misc_feature (1994)..(1994): n is a, c, g, or t
  misc_feature (1999)..(2000): n is a, c, g, or t
  misc_feature (2011)..(2011): n is a, c, g, or t
  misc_feature (2014)..(2015): n is a, c, g, or t
  misc_feature (2023)..(2023): n is a, c, g, or t
  misc_feature (2041)..(2041): n is a, c, g, or t
  misc_feature (2047)..(2047): n is a, c, g, or t
  misc_feature (2056)..(2057): n is a, c, g, or t
  misc_feature (2066)..(2066): n is a, c, g, or t
  misc_feature (2213)..(2213): n is a, c, g, or t
  misc_feature (2259)..(2259): n is a, c, g, or t
  misc_feature (2607)..(4000): n is a, c, g, or t
gatgccctgcctcgtgcgagattaaaccggcgcaatactcaaaaccctttgtctcgatatcgctagggtcgacttcgatcgtattcactggcttgaaaacatagcgccagccgggtttgtctccgattttcaccgctactcccgcgtcttcgccaatagtgttggctagcgcctttaatctctctaatcgcgcttttttctctggcgcgctaatttctggctgaaatgcacctaaactattttctgtttcgttcataatatttgcgctaaaaattgattgattgtgcttaaatttttacctctaactaaaatccctcgatacgattgccacgatgcatttagtttgctagcgctgatactgtcttttttatactcaaccacccgttgagcaaatttgcttttcatctgnctgacgctttctgcttttatcttagaataattattcacaaatttccagcccaaaattttcaccccactatttagattgcaaatactataatgatctggcggaattgacagctttaaattaattttcaaaaaatcaccaatttgcactagccacttttggcactcttttctatcgcgagagaaaataaaagagtcgtccgcgtatcttagataatgtttaatttttaacttctctttaacaaatctgtctagtgggtccaaatagatgttgataaatagctgactggtcaagctccctagcggtatccccttgctttccgcagtgtggtagccataaattattttttctaatatctgaatcgttttttgacaatgtattctttggcgtaaaaattgctttaaaattaaatgatcaatcgaatcaaagcattttttaatatcaaaatgtaaaacccatattttgcaatgataattttggctaacgcttttaaggtaggactgcgtcaaccccaacgctttactcagccctttaccttcccgacaggaaaaagaacaagccataaacaaacgatcataaaaaggataaagggcgttatacagcgctcggtggacaatatgatctgccatacccggcgctgaaataactctttttttcggatcgaaaacaataaatttcctatatggcgatgactcgtgtgtatatttttcaaccggcggtaaagctcggttaggttttcctccaagcgatattcgtattcggctaccgactgacggtttcgcttgcctttgcggtaatcaacccaagctttccataaatttgcttggctaaaaatattttcaaaattttcaataaattttttcattatgaataccatactttttcaaaaaacttatctgctatataacgagttatctactattgtgccaaagtttcctaaaatttcccggtatagtttaggcattaaaatagaatcctcttgcctagctctaatagagcaaattattcgcgcagaactatcggagccagtatttaaagaaaaagccctttttgaagccggagngcagtntagcctgctgaaaatgctgatacggatttgtgtggagaaaaaatcgatcaaagaaaacaagtattttacttggtcaaaccagctcattgaaatcgtaaaaatgatcagtgggtggagaaaaacactacgacgataaaaagtagcatgaccgcgaggcggaaaaccctatcattccaatgattctcgcgatgatcattgtcgacatacccagcaccaccattgtcagaatccccgatattcaagcaattcccgcctcaagtaaatggtaatttgttcgtacacgcgcctgtgccctagtggcgccaagctgacaaaaagctatattaccaacgtcatgcaatcaataatgaaaagcgcttttcattacatgggcgaatctcactttggatgacaaagcagacttcattagcccaatttctacccaaatttttcagggtttaggttttagctatagggtttagagcttagtggttaggatttttcatgcatgaccgcgaggcggaaaaccntaccannccnagganncccgcgatgancanngtcgacanacccagcaccaccacggncagaanccccgatanncaagcaatncccgctgtctgatccgtcagctttaagcagggtgtcttctgcccattcaaaattggaacgggtagagttttcgggatgattgagggtggtttgaaggttgaaagctaggactgggcagagagtgacacgaaacttgctagcttctgnctccgaaatgccagaggagacaagagattgacggagtttagcttcngctagcgggatgagctgggtagtgatgtcatcccaagatagattggcgcgattttctctatcgactccaaatacttctttgatcaaggggagcatggggtcagagacggaatcagaagtgtttcttgattcaacccaaagaggtttaccttgatgtttttgggtagtggcaatcattgctctttggtaagcttcaaaccatgtttcgtctgcgcctgtcgtgtccttggctgattgctcaaaccaatctgactgaaaaagagttaatcctttggcagtatcctctggtctttgagctttgggataaagggtgccaaatgttgttggggttaggtcgtctggggaaggnnnnnnnnnnnnnnnnnnnnnnnnnnnnnnnnnnnnnnnnnnnnnnnnnnnnnnnnnnnnnnnnnnnnnnnnnnnnnnnnnnnnnnnnnnnnnnnnnnnnnnnnnnnnnnnnnnnnnnnnnnnnnnnnnnnnnnnnnnnnnnnnnnnnnnnnnnnnnnnnnnnnnnnnnnnnnnnnnnnnnnnnnnnnnnnnnnnnnnnnnnnnnnnnnnnnnnnnnnnnnnnnnnnnnnnnnnnnnnnnnnnnnnnnnnnnnnnnnnnnnnnnnnnnnnnnnnnnnnnnnnnnnnnnnnnnnnnnnnnnnnnnnnnnnnnnnnnnnnnnnnnnnnnnnnnnnnnnnnnnnnnnnnnnnnnnnnnnnnnnnnnnnnnnnnnnnnnnnnnnnnnnnnnnnnnnnnnnnnnnnnnnnnnnnnnnnnnnnnnnnnnnnnnnnnnnnnnnnnnnnnnnnnnnnnnnnnnnnnnnnnnnnnnnnnnnnnnnnnnnnnnnnnnnnnnnnnnnnnnnnnnnnnnnnnnnnnnnnnnnnnnnnnnnnnnnnnnnnnnnnnnnnnnnnnnnnnnnnnnnnnnnnnnnnnnnnnnnnnnnnnnnnnnnnnnnnnnnnnnnnnnnnnnnnnnnnnnnnnnnnnnnnnnnnnnnnnnnnnnnnnnnnnnnnnnnnnnnnnnnnnnnnnnnnnnnnnnnnnnnnnnnnnnnnnnnnnnnnnnnnnnnnnnnnnnnnnnnnnnnnnnnnnnnnnnnnnnnnnnnnnnnnnnnnnnnnnnnnnnnnnnnnnnnnnnnnnnnnnnnnnnnnnnnnnnnnnnnnnnnnnnnnnnnnnnnnnnnnnnnnnnnnnnnnnnnnnnnnnnnnnnnnnnnnnnnnnnnnnnnnnnnnnnnnnnnnnnnnnnnnnnnnnnnnnnnnnnnnnnnnnnnnnnnnnnnnnnnnnnnnnnnnnnnnnnnnnnnnnnnnnnnnnnnnnnnnnnnnnnnnnnnnnnnnnnnnnnnnnnnnnnnnnnnnnnnnnnnnnnnnnnnnnnnnnnnnnnnnnnnnnnnnnnnnnnnnnnnnnnnnnnnnnnnnnnnnnnnnnnnnnnnnnnnnnnnnnnnnnnnnnnnnnnnnnnnnnnnnnnnnnnnnnnnnnnnnnnnnnnnnnnnnnnnnnnnnnnnnnnnnnnnnnnnnnnnnnnnnnnnnnnnnnnnnnnnnnnnnnnnnnnnnnnnnnnnnnnnnnnnnnnnnnnnnnnnnnnnnnnnnnnnnnnnnnnnnnnnnnnnnnnnnnnnnnnnnnnnnnnnnnnnnnnnnnnnnnnnnnnnnnnnnnnnnnnnnnnnnnnnnnnnnnnnnnnnnnnnnnnnnnnnnnnnnnnnnnnnnnnnnnnnnnnnnnnnnnnnnnnnnnnnnnnnnnnnnnnnnnnnnnnnnnnnnnnnnn

SEQ ID NO: 1114 - DNA, 4000 bp, Escherichia coli
  misc_feature (1)..(1): n is a, c, g, or t
  misc_feature (4)..(4): n is a, c, g, or t
  misc_feature (10)..(10): n is a, c, g, or t
  misc_feature (13)..(13): n is a, c, g, or t
  misc_feature (15)..(15): n is a, c, g, or t
  misc_feature (18)..(31): n is a, c, g, or t
  misc_feature (34)..(34): n is a, c, g, or t
  misc_feature (36)..(48): n is a, c, g, or t
  misc_feature (50)..(51): n is a, c, g, or t
  misc_feature (53)..(58): n is a, c, g, or t
  misc_feature (60)..(60): n is a, c, g, or t
  misc_feature (64)..(67): n is a, c, g, or t
  misc_feature (72)..(72): n is a, c, g, or t
  misc_feature (74)..(81): n is a, c, g, or t
  misc_feature (83)..(88): n is a, c, g, or t
  misc_feature (90)..(91): n is a, c, g, or t
  misc_feature (93)..(93): n is a, c, g, or t
  misc_feature (97)..(103): n is a, c, g, or t
  misc_feature (105)..(106): n is a, c, g, or t
  misc_feature (108)..(111): n is a, c, g, or t
  misc_feature (114)..(116): n is a, c, g, or t
  misc_feature (118)..(120): n is a, c, g, or t
  misc_feature (123)..(124): n is a, c, g, or t
  misc_feature (126)..(129): n is a, c, g, or t
  misc_feature (132)..(133): n is a, c, g, or t
  misc_feature (136)..(136): n is a, c, g, or t
  misc_feature (140)..(143): n is a, c, g, or t
  misc_feature (145)..(147): n is a, c, g, or t
  misc_feature (149)..(149): n is a, c, g, or t
  misc_feature (152)..(152): n is a, c, g, or t
  misc_feature (154)..(158): n is a, c, g, or t
  misc_feature (161)..(164): n is a, c, g, or t
  misc_feature (167)..(169): n is a, c, g, or t
  misc_feature (171)..(178): n is a, c, g, or t
  misc_feature (183)..(183): n is a, c, g, or t
  misc_feature (185)..(186): n is a, c, g, or t
  misc_feature (188)..(197): n is a, c, g, or t
  misc_feature (200)..(200): n is a, c, g, or t
  misc_feature (203)..(206): n is a, c, g, or t
  misc_feature (208)..(213): n is a, c, g, or t
  misc_feature (215)..(215): n is a, c, g, or t
  misc_feature (218)..(218): n is a, c, g, or t
  misc_feature (220)..(220): n is a, c, g, or t
  misc_feature (224)..(227): n is a, c, g, or t
  misc_feature (230)..(233): n is a, c, g, or t
  misc_feature (237)..(237): n is a, c, g, or t
  misc_feature (243)..(243): n is a, c, g, or t
  misc_feature (251)..(251): n is a, c, g, or t
  misc_feature (270)..(270): n is a, c, g, or t
  misc_feature (278)..(279): n is a, c, g, or t
  misc_feature (291)..(291): n is a, c, g, or t
  misc_feature (294)..(294): n is a, c, g, or t
  misc_feature (303)..(303): n is a, c, g, or t
  misc_feature (312)..(313): n is a, c, g, or t
  misc_feature (315)..(315): n is a, c, g, or t
  misc_feature (321)..(321): n is a, c, g, or t
  misc_feature (336)..(336): n is a, c, g, or t
  misc_feature (338)..(339): n is a, c, g, or t
  misc_feature (341)..(343): n is a, c, g, or t
  misc_feature (345)..(345): n is a, c, g, or t
  misc_feature (348)..(348): n is a, c, g, or t
  misc_feature (351)..(351): n is a, c, g, or t
  misc_feature (353)..(353): n is a, c, g, or t
  misc_feature (356)..(356): n is a, c, g, or t
  misc_feature (361)..(362): n is a, c, g, or t
  misc_feature (366)..(368): n is a, c, g, or t
  misc_feature (370)..(371): n is a, c, g, or t
  misc_feature (374)..(375): n is a, c, g, or t
  misc_feature (377)..(377): n is a, c, g, or t
  misc_feature (379)..(380): n is a, c, g, or t
  misc_feature (383)..(383): n is a, c, g, or t
  misc_feature (385)..(385): n is a, c, g, or t
  misc_feature (389)..(389): n is a, c, g, or t
  misc_feature (391)..(392): n is a, c, g, or t
  misc_feature (396)..(396): n is a, c, g, or t
  misc_feature (399)..(399): n is a, c, g, or t
  misc_feature (402)..(402): n is a, c, g, or t
  misc_feature (417)..(417): n is a, c, g, or t
  misc_feature (431)..(432): n is a, c, g, or t
  misc_feature (438)..(438): n is a, c, g, or t
  misc_feature (442)..(442): n is a, c, g, or t
  misc_feature (447)..(450): n is a, c, g, or t
  misc_feature (452)..(453): n is a, c, g, or t
  misc_feature (465)..(466): n is a, c, g, or t
  misc_feature (471)..(471): n is a, c, g, or t
  misc_feature (473)..(474): n is a, c, g, or t
  misc_feature (481)..(482): n is a, c, g, or t
  misc_feature (484)..(486): n is a, c, g, or t
  misc_feature (489)..(492): n is a, c, g, or t
  misc_feature (495)..(495): n is a, c, g, or t
  misc_feature (497)..(497): n is a, c, g, or t
  misc_feature (501)..(501): n is a, c, g, or t
  misc_feature (504)..(504): n is a, c, g, or t
  misc_feature (507)..(507): n is a, c, g, or t
  misc_feature (511)..(511): n is a, c, g, or t
  misc_feature (513)..(513): n is a, c, g, or t
  misc_feature (525)..(525): n is a, c, g, or t
  misc_feature (528)..(528): n is a, c, g, or t
  misc_feature (534)..(534): n is a, c, g, or t
  misc_feature (540)..(540): n is a, c, g, or t
  misc_feature (542)..(542): n is a, c, g, or t
  misc_feature (549)..(549): n is a, c, g, or t
  misc_feature (552)..(553): n is a, c, g, or t
  misc_feature (559)..(561): n is a, c, g, or t
  misc_feature (563)..(563): n is a, c, g, or t
  misc_feature (582)..(582): n is a, c, g, or t
  misc_feature (584)..(585): n is a, c, g, or t
  misc_feature (596)..(597): n is a, c, g, or t
  misc_feature (600)..(600): n is a, c, g, or t
  misc_feature (603)..(603): n is a, c, g, or t
  misc_feature (606)..(606): n is a, c, g, or t
  misc_feature (612)..(612): n is a, c, g, or t
  misc_feature (623)..(623): n is a, c, g, or t
  misc_feature (639)..(639): n is a, c, g, or t
  misc_feature (642)..(643): n is a, c, g, or t
  misc_feature (645)..(645): n is a, c, g, or t
  misc_feature (648)..(648): n is a, c, g, or t
  misc_feature (651)..(651): n is a, c, g, or t
  misc_feature (660)..(660): n is a, c, g, or t
  misc_feature (663)..(664): n is a, c, g, or t
  misc_feature (670)..(670): n is a, c, g, or t
  misc_feature (672)..(672): n is a, c, g, or t
  misc_feature (675)..(675): n is a, c, g, or t
  misc_feature (687)..(687): n is a, c, g, or t
  misc_feature (693)..(693): n is a, c, g, or t
  misc_feature (695)..(695): n is a, c, g, or t
  misc_feature (706)..(708): n is a, c, g, or t
  misc_feature (714)..(714): n is a, c, g, or t
  misc_feature (717)..(717): n is a, c, g, or t
  misc_feature (738)..(738): n is a, c, g, or t
  misc_feature (747)..(747): n is a, c, g, or t
  misc_feature (768)..(768): n is a, c, g, or t
  misc_feature (791)..(791): n is a, c, g, or t
  misc_feature (798)..(798): n is a, c, g, or t
  misc_feature (801)..(801): n is a, c, g, or t
  misc_feature (897)..(897): n is a, c, g, or t
  misc_feature (921)..(921): n is a, c, g, or t
  misc_feature (981)..(981): n is a, c, g, or t
  misc_feature (984)..(984): n is a, c, g, or t
  misc_feature (1116)..(1116): n is a, c, g, or t
  misc_feature (1122)..(1122): n is a, c, g, or t
  misc_feature (1143)..(1143): n is a, c, g, or t
  misc_feature (1155)..(1155): n is a, c, g, or t
  misc_feature (1182)..(1182): n is a, c, g, or t
  misc_feature (1185)..(1185): n is a, c, g, or t
  misc_feature (1224)..(1224): n is a, c, g, or t
  misc_feature (1248)..(1248): n is a, c, g, or t
  misc_feature (1263)..(1263): n is a, c, g, or t
  misc_feature (1299)..(1299): n is a, c, g, or t
  misc_feature (1344)..(1344): n is a, c, g, or t
  misc_feature (1425)..(1425): n is a, c, g, or t
  misc_feature (1515)..(1515): n is a, c, g, or t
  misc_feature (1518)..(1518): n is a, c, g, or t
  misc_feature (1668)..(1668): n is a, c, g, or t
  misc_feature (1722)..(1722): n is a, c, g, or t
  misc_feature (1728)..(1728): n is a, c, g, or t
  misc_feature (1764)..(1764): n is a, c, g, or t
  misc_feature (1769)..(1769): n is a, c, g, or t
  misc_feature (1777)..(1777): n is a, c, g, or t
  misc_feature (1788)..(1788): n is a, c, g, or t
  misc_feature (1794)..(1794): n is a, c, g, or t
  misc_feature (1846)..(1847): n is a, c, g, or t
  misc_feature (1989)..(1989): n is a, c, g, or t
  misc_feature (1992)..(1992): n is a, c, g, or t
nccncccagnaanancannnnnnnnnnnnnnccntnnnnnnnnnnnnnannannnnnnanaatnnnnttttntnnnnnnnntnnnnnnannantttnnnnnnntnntnnnnttnnntnnntanncnnnnaannttnttgnnnntnnntnttnannnnnaannnnttnnntnnnnnnnnaaaananngnnnnnnnnnnctntannnnannnnnntnttntnaaannnnatnnnnttcntttttnctttttgngacaaagatagcagatagngctagtcnnacacttgccaanaanatagctgtntctgactgnntntcaccngtttctggcaatctntnntnnncnttngcnanttnaactnntgcnnntnnagnntnannttntnctancnnactnagnttnaactctggtttctcnactgtcggtgctgnntggtcncctnctgtnnnnannggacctgtgtannctggnanntcatgtnncnnngcnnnnacngngttnacnccncctntnaactctggtttntcnactgtnggtgcngnttggtcnccnnctgttnnnantgggcctgtgtactctggnanntcatgtaccanngcntcnacngcattnacaccaccttngaactcaggtttctcnacnntnggngcngcttggtcnccnnctgttncnagngggcctgtgtantctggnanttcatgcactnnngcctcnacngcattgacaccacctgtgaantcaggaacntcaagcacgggtgctggttcntcacccttgcttgattgaacagnttcttcngtnaattcttgatagaagctcgccaattcataaaactcagccttgccaccttcccagactaatttgacgtctagaagagagccaccatttcggatagcnaaggtttggagactagatgtaatngcaccgaggtctgtccaactgtcttgaccatccttgagtgttctagcaagaacacgtgcnttngctccttcaggaagactggaaacgagacgaaggtggttggcattggttggctcagataagtgatacaccaattcgcccttgtctttttcagacttgtagctggtcaagactttgccgtctacaagattattntaaagnttgccttggctttctccaccntttccttctacngttggatcattgattggtttgacaaantcnccatcgttgatgaccaattctgtaaagcctacaaaacgngcatcatagtctgcagtatagagnacacggagatagttngctttgactggtgtcgtcaattcaccttcgatgtancgatttcctggcatcttagaatcatgtgtccaaccatctgtcagngaatcatcgtgttggctattggccacaccatctcctactgtcacaacatctgtccaagttttaccgtcttggctgacttgnatcttaccatcacgaaggtagttttgagttccgtcttggatgtaggctctaatcttcttgatagtgcgttcgctaccaagtttcaaggtnacntgaccatctttatgggcatagtctgaaaactcaacgaagttgttgtaaacaccgtcaaatagttgatctaggttgttcagtttacgaacatcattgcttccgtatgttggatgaatgcccatagttgtagattctagtttggttggttgnacttctttggttgtcacaaggagagaagtggctgtcacagcttgttcctgatcngttttnttgaccagacgaacataacgtaccaagtgggttgcnacagntctgtctntcaactggctngctggngtccattcttgcgcatttgcagaatactctaggctaagagcagggttggctnngccttggagctggatgctcttgatctgatggatacggtcaagcttcatacctagatagctatgagcagggagtttggttccagctggaatttgaagctcgtaactgcccaagctatccactactggcgtttccttcaaggcntcnacgttggtgtctgttaagtcaagatttggactatcgacatctactgtaaattccgcaattctccaccacttatttaaggtttgtgtattgcgaatgcgaacaaaacgagttgtaaattcttgcacaatatcagaagttcgttgccctgataaattttgaagcgttgtccaatttgtaccatctgcagaatattcgatgacaccagatgctagtttgtctcgttccccttgcatcagatgaactcgttttactttgtgcagtccacctaagtccatttgtacccaggcttgcgctggtgtgacattggtctgatcaacatgtgccatcatggattctgtgttttctcgaccatcttgcatctgaacaacacttgttccatatttgtaaacaaggtttggacttaaactaatagtgcccctaaccttcttactacccaattctaggggtctgttaacagcaatttcacgcatggcaagccaagcattatccttcttagctgttgctatcatacgaacagcttgagctgtgatatcgaggtcattaaattccagaatacgttctctaccagtataagcggggctcgttatggctacccattctccatgttcattttgatattcaacaagagcattactaaaggtataattatcggccgtattagtacccgtagcgaaacctaatttgtgtattttaattgccttattaaagcgcaagcctacataatcgcctctctcaatcacaatggttgttttggcaatcacatgtgtatcaaagtcaccatctgtgacttctttcaatccgccttctattccagcacgattcgtaataaatgttgtcacaaatttatctggattcaacattgcttggatatgtaaggctaagtattctttgagattattgataaatggtcgaatatgttggacaccaaattctgcgtattcataatggtcaacgtaaaagaaggcatacttaactgactggtcataatgtttgactccggcctgataatactcccacaccttggcatcattcttttcagtaagaccttctgtagctgttaggaaagcttcaagcgcgttcatttgatctactgtattctctaaccaatagtgaatttgttcgattaatttctgatcacctttttctttaagtaatagagcattggctttcaaaccagcaaaaatttccctcaactcttttctttcagtatccagattttgaccagatttgagtttgttatagaattctgtcaattttggagccaattctacagactcttctaatttagtgacatggggaggtctattttgattgcgcatgtgttttccgagttctcgaaaagccttcgaaacactgctttcttcaaaatgatcattaactacatagttaaaggccatatcgttgatttgttctgcttcttctacacttctccattgtttccatccatactgagccatatcaaaaagtgccactttagatgcttcagattgttgcattggatttagcataattccttgtgcaagtgataaatcaacatttggatgtaagaatttttcaccacctccaagaattaggtggggttttgtattatcattacatggccagttaatccagaactgaattggacggtaagtcttaccaccttctgttaaatttttctttaagttcgttaagaatgtttggtcaacagccccccagacctttccaccagtaagagttaaatggacattttcaggaagatgttcattcaaggttcgaagttcagcttcagttccttgccccatgtaccaggcaggaacaaaaatcatatctttacggagaccactgtatgttgtttgtttttcagtcaaccaatttgtgatatccttcatcaagcgaacataactatggtaaccaccaactgggcttggtgcatcatctgcaagcacaccaaattcacgcactcccacgtccaacaactgagtaaacttagcctttatggttgcaagatcagcctggtaatgcgctt

SEQ ID NO: 1115 - DNA, 4000 bp, Escherichia coli
  misc_feature (1)..(12): n is a, c, g, or t
  misc_feature (14)..(21): n is a, c, g, or t
  misc_feature (23)..(24): n is a, c, g, or t
  misc_feature (26)..(31): n is a, c, g, or t
  misc_feature (34)..(35): n is a, c, g, or t
  misc_feature (37)..(41): n is a, c, g, or t
  misc_feature (43)..(44): n is a, c, g, or t
  misc_feature (46)..(46): n is a, c, g, or t
  misc_feature (48)..(49): n is a, c, g, or t
  misc_feature (52)..(53): n is a, c, g, or t
  misc_feature (55)..(62): n is a, c, g, or t
  misc_feature (64)..(64): n is a, c, g, or t
  misc_feature (66)..(76): n is a, c, g, or t
  misc_feature (80)..(91): n is a, c, g, or t
  misc_feature (93)..(101): n is a, c, g, or t
  misc_feature (103)..(108): n is a, c, g, or t
  misc_feature (110)..(111): n is a, c, g, or t
  misc_feature (113)..(120): n is a, c, g, or t
  misc_feature (122)..(124): n is a, c, g, or t
  misc_feature (126)..(133): n is a, c, g, or t
  misc_feature (136)..(136): n is a, c, g, or t
  misc_feature (138)..(139): n is a, c, g, or t
  misc_feature (141)..(159): n is a, c, g, or t
  misc_feature (161)..(165): n is a, c, g, or t
  misc_feature (167)..(168): n is a, c, g, or t
  misc_feature (170)..(172): n is a, c, g, or t
  misc_feature (174)..(175): n is a, c, g, or t
  misc_feature (177)..(177): n is a, c, g, or t
  misc_feature (179)..(180): n is a, c, g, or t
  misc_feature (182)..(195): n is a, c, g, or t
  misc_feature (197)..(209): n is a, c, g, or t
  misc_feature (211)..(215): n is a, c, g, or t
  misc_feature (217)..(226): n is a, c, g, or t
  misc_feature (228)..(228): n is a, c, g, or t
  misc_feature (230)..(230): n is a, c, g, or t
  misc_feature (233)..(234): n is a, c, g, or t
  misc_feature (236)..(239): n is a, c, g, or t
  misc_feature (241)..(248): n is a, c, g, or t
  misc_feature (250)..(250): n is a, c, g, or t
  misc_feature (252)..(258): n is a, c, g, or t
  misc_feature (260)..(265): n is a, c, g, or t
  misc_feature (267)..(273): n is a, c, g, or t
  misc_feature (275)..(279): n is a, c, g, or t
  misc_feature (283)..(286): n is a, c, g, or t
  misc_feature (288)..(324): n is a, c, g, or t
  misc_feature (327)..(334): n is a, c, g, or t
  misc_feature (336)..(339): n is a, c, g, or t
  misc_feature (341)..(348): n is a, c, g, or t
  misc_feature (350)..(362): n is a, c, g, or t
  misc_feature (364)..(367): n is a, c, g, or t
  misc_feature (369)..(374): n is a, c, g, or t
  misc_feature (376)..(387): n is a, c, g, or t
  misc_feature (390)..(398): n is a, c, g, or t
  misc_feature (401)..(409): n is a, c, g, or t
  misc_feature (411)..(411): n is a, c, g, or t
  misc_feature (413)..(414): n is a, c, g, or t
  misc_feature (416)..(416): n is a, c, g, or t
  misc_feature (418)..(418): n is a, c, g, or t
  misc_feature (420)..(423): n is a, c, g, or t
  misc_feature (425)..(425): n is a, c, g, or t
  misc_feature (427)..(429): n is a, c, g, or t
  misc_feature (431)..(435): n is a, c, g, or t
  misc_feature (438)..(454): n is a, c, g, or t
  misc_feature (457)..(458): n is a, c, g, or t
  misc_feature (460)..(464): n is a, c, g, or t
  misc_feature (468)..(469): n is a, c, g, or t
  misc_feature (471)..(472): n is a, c, g, or t
  misc_feature (474)..(475): n is a, c, g, or t
  misc_feature (477)..(484): n is a, c, g, or t
  misc_feature (487)..(491): n is a, c, g, or t
  misc_feature (493)..(494): n is a, c, g, or t
  misc_feature (500)..(500): n is a, c, g, or t
  misc_feature (502)..(503): n is a, c, g, or t
  misc_feature (505)..(515): n is a, c, g, or t
  misc_feature (517)..(518): n is a, c, g, or t
  misc_feature (520)..(520): n is a, c, g, or t
  misc_feature (522)..(522): n is a, c, g, or t
  misc_feature (524)..(524): n is a, c, g, or t
  misc_feature (526)..(527): n is a, c, g, or t
  misc_feature (529)..(532): n is a, c, g, or t
  misc_feature (534)..(534): n is a, c, g, or t
  misc_feature (538)..(540): n is a, c, g, or t
  misc_feature (543)..(547): n is a, c, g, or t
  misc_feature (550)..(550): n is a, c, g, or t
  misc_feature (552)..(552): n is a, c, g, or t
  misc_feature (557)..(563): n is a, c, g, or t
  misc_feature (565)..(569): n is a, c, g, or t
  misc_feature (571)..(576): n is a, c, g, or t
  misc_feature (578)..(581): n is a, c, g, or t
  misc_feature (583)..(592): n is a, c, g, or t
  misc_feature (594)..(601): n is a, c, g, or t
  misc_feature (603)..(603): n is a, c, g, or t
  misc_feature (605)..(611): n is a, c, g, or t
  misc_feature (613)..(619): n is a, c, g, or t
  misc_feature (621)..(622): n is a, c, g, or t
  misc_feature (624)..(627): n is a, c, g, or t
  misc_feature (629)..(631): n is a, c, g, or t
  misc_feature (633)..(640): n is a, c, g, or t
  misc_feature (642)..(650): n is a, c, g, or t
  misc_feature (652)..(677): n is a, c, g, or t
  misc_feature (680)..(685): n is a, c, g, or t
  misc_feature (687)..(692): n is a, c, g, or t
  misc_feature (694)..(697): n is a, c, g, or t
  misc_feature (700)..(701): n is a, c, g, or t
  misc_feature (703)..(704): n is a, c, g, or t
  misc_feature (706)..(707): n is a, c, g, or t
  misc_feature (709)..(712): n is a, c, g, or t
  misc_feature (714)..(720): n is a, c, g, or t
  misc_feature (722)..(736): n is a, c, g, or t
  misc_feature (739)..(745): n is a, c, g, or t
  misc_feature (747)..(756): n is a, c, g, or t
  misc_feature (758)..(759): n is a, c, g, or t
  misc_feature (761)..(763): n is a, c, g, or t
  misc_feature (765)..(768): n is a, c, g, or t
  misc_feature (770)..(781): n is a, c, g, or t
  misc_feature (783)..(788): n is a, c, g, or t
  misc_feature (791)..(800): n is a, c, g, or t
  misc_feature (802)..(802): n is a, c, g, or t
  misc_feature (804)..(814): n is a, c, g, or t
  misc_feature (816)..(839): n is a, c, g, or t
  misc_feature (842)..(842): n is a, c, g, or t
  misc_feature (844)..(848): n is a, c, g, or t
  misc_feature (850)..(851): n is a, c, g, or t
  misc_feature (853)..(866): n is a, c, g, or t
  misc_feature (868)..(868): n is a, c, g, or t
  misc_feature (870)..(874): n is a, c, g, or t
  misc_feature (876)..(888): n is a, c, g, or t
  misc_feature (890)..(891): n is a, c, g, or t
  misc_feature (893)..(893): n is a, c, g, or t
  misc_feature (895)..(896): n is a, c, g, or t
  misc_feature (898)..(900): n is a, c, g, or t
  misc_feature (902)..(905): n is a, c, g, or t
  misc_feature (907)..(907): n is a, c, g, or t
  misc_feature (909)..(911): n is a, c, g, or t
  misc_feature (913)..(913): n is a, c, g, or t
  misc_feature (915)..(923): n is a, c, g, or t
  misc_feature (925)..(931): n is a, c, g, or t
  misc_feature (933)..(935): n is a, c, g, or t
  misc_feature (938)..(941): n is a, c, g, or t
  misc_feature (943)..(943): n is a, c, g, or t
  misc_feature (945)..(948): n is a, c, g, or t
  misc_feature (950)..(961): n is a, c, g, or t
  misc_feature (964)..(965): n is a, c, g, or t
  misc_feature (967)..(980): n is a, c, g, or t
  misc_feature (982)..(989): n is a, c, g, or t
  misc_feature (991)..(1005): n is a, c, g, or t
  misc_feature (1007)..(1008): n is a, c, g, or t
  misc_feature (1010)..(1013): n is a, c, g, or t
  misc_feature (1015)..(1017): n is a, c, g, or t
  misc_feature (1019)..(1032): n is a, c, g, or t
  misc_feature (1034)..(1036): n is a, c, g, or t
  misc_feature (1038)..(1044): n is a, c, g, or t
  misc_feature (1046)..(1046): n is a, c, g, or t
  misc_feature (1048)..(1049): n is a, c, g, or t
  misc_feature (1051)..(1053): n is a, c, g, or t
  misc_feature (1055)..(1056): n is a, c, g, or t
  misc_feature (1058)..(1059): n is a, c, g, or t
  misc_feature (1062)..(1062): n is a, c, g, or t
  misc_feature (1066)..(1067): n is a, c, g, or t
  misc_feature (1069)..(1070): n is a, c, g, or t
  misc_feature (1073)..(1077): n is a, c, g, or t
  misc_feature (1079)..(1084): n is a, c, g, or t
  misc_feature (1086)..(1089): n is a, c, g, or t
  misc_feature (1091)..(1092): n is a, c, g, or t
  misc_feature (1095)..(1095): n is a, c, g, or t
  misc_feature (1101)..(1102): n is a, c, g, or t
  misc_feature (1104)..(1105): n is a, c, g, or t
  misc_feature (1107)..(1107): n is a, c, g, or t
  misc_feature (1110)..(1110): n is a, c, g, or t
  misc_feature (1112)..(1120): n is a, c, g, or t
  misc_feature (1122)..(1122): n is a, c, g, or t
  misc_feature (1125)..(1127): n is a, c, g, or t
  misc_feature (1131)..(1131): n is a, c, g, or t
  misc_feature (1134)..(1139): n is a, c, g, or t
  misc_feature (1142)..(1144): n is a, c, g, or t
  misc_feature (1146)..(1152): n is a, c, g, or t
  misc_feature (1154)..(1155): n is a, c, g, or t
  misc_feature (1157)..(1173): n is a, c, g, or t
  misc_feature (1176)..(1185): n is a, c, g, or t
  misc_feature (1188)..(1191): n is a, c, g, or t
  misc_feature (1193)..(1194): n is a, c, g, or t
  misc_feature (1196)..(1207): n is a, c, g, or t
  misc_feature (1209)..(1210): n is a, c, g, or t
  misc_feature (1212)..(1223): n is a, c, g, or t
  misc_feature (1225)..(1228): n is a, c, g, or t
  misc_feature (1230)..(1233): n is a, c, g, or t
  misc_feature (1235)..(1235): n is a, c, g, or t
  misc_feature (1237)..(1238): n is a, c, g, or t
  misc_feature (1240)..(1242): n is a, c, g, or t
  misc_feature (1245)..(1246): n is a, c, g, or t
  misc_feature (1249)..(1258): n is a, c, g, or t
  misc_feature (1260)..(1261): n is a, c, g, or t
  misc_feature (1264)..(1266): n is a, c, g, or t
  misc_feature (1269)..(1270): n is a, c, g, or t
  misc_feature (1272)..(1274): n is a, c, g, or t
  misc_feature (1277)..(1278): n is a, c, g, or t
  misc_feature (1281)..(1281): n is a, c, g, or t
  misc_feature (1283)..(1285): n is a, c, g, or t
  misc_feature (1287)..(1287): n is a, c, g, or t
  misc_feature (1290)..(1290): n is a, c, g, or t
  misc_feature (1292)..(1293): n is a, c, g, or t
  misc_feature (1295)..(1295): n is a, c, g, or t
  misc_feature (1297)..(1297): n is a, c, g, or t
  misc_feature (1396)..(1396): n is a, c, g, or t
  misc_feature (1406)..(1406): n is a, c, g, or t
  misc_feature (2003)..(2003): n is a, c, g, or t
  misc_feature (2060)..(2060): n is a, c, g, or t
  misc_feature (2064)..(2064): n is a, c, g, or t
  misc_feature (2340)..(2345): n is a, c, g, or t
  misc_feature (2347)..(2347): n is a, c, g, or t
  misc_feature (2349)..(2349): n is a, c, g, or t
  misc_feature (2351)..(2354): n is a, c, g, or t
  misc_feature (2356)..(2358): n is a, c, g, or t
  misc_feature (2360)..(2361): n is a, c, g, or t
  misc_feature (2366)..(2371): n is a, c, g, or t
  misc_feature (2374)..(2374): n is a, c, g, or t
  misc_feature (2376)..(2379): n is a, c, g, or t
  misc_feature (2381)..(2381): n is a, c, g, or t
  misc_feature (2383)..(2386): n is a, c, g, or t
  misc_feature (2388)..(2389): n is a, c, g, or t
  misc_feature (2391)..(2392): n is a, c, g, or t
  misc_feature (2394)..(2394): n is a, c, g, or t
  misc_feature (2396)..(2396): n is a, c, g, or t
  misc_feature (2398)..(2399): n is a, c, g, or t
  misc_feature (2402)..(2402): n is a, c, g, or t
  misc_feature (2404)..(2405): n is a, c, g, or t
  misc_feature (2407)..(2412): n is a, c, g, or t
  misc_feature (2414)..(2414): n is a, c, g, or t
  misc_feature (2416)..(2419): n is a, c, g, or t
  misc_feature (2421)..(2429): n is a, c, g, or t
  misc_feature (2431)..(2431): n is a, c, g, or t
  misc_feature (2436)..(2444): n is a, c, g, or t
  misc_feature (2446)..(2456): n is a, c, g, or t
  misc_feature (2458)..(2459): n is a, c, g, or t
  misc_feature (2461)..(2464): n is a, c, g, or t
  misc_feature (2466)..(2468): n is a, c, g, or t
  misc_feature (2470)..(2479): n is a, c, g, or t
  misc_feature (2481)..(2487): n is a, c, g, or t
  misc_feature (2490)..(2491): n is a, c, g, or t
  misc_feature (2493)..(2499): n is a, c, g, or t
  misc_feature (2501)..(2517): n is a, c, g, or t
  misc_feature (2519)..(2523): n is a, c, g, or t
  misc_feature (2525)..(2529): n is a, c, g, or t
  misc_feature (2532)..(2534): n is a, c, g, or t
  misc_feature (2537)..(2539): n is a, c, g, or t
  misc_feature (2541)..(2541): n is a, c, g, or t
  misc_feature (2543)..(2549): n is a, c, g, or t
  misc_feature (2551)..(2554): n is a, c, g, or t
  misc_feature (2557)..(2557): n is a, c, g, or t
  misc_feature (2559)..(2564): n is a, c, g, or t
  misc_feature (2566)..(2566): n is a, c, g, or t
  misc_feature (2568)..(2568): n is a, c, g, or t
  misc_feature (2570)..(2571): n is a, c, g, or t
  misc_feature (2573)..(2573): n is a, c, g, or t
  misc_feature (2576)..(2576): n is a, c, g, or t
  misc_feature (2578)..(2579): n is a, c, g, or t
  misc_feature (2581)..(2581): n is a, c, g, or t
  misc_feature (2583)..(2585): n is a, c, g, or t
  misc_feature (2587)..(2588): n is a, c, g, or t
  misc_feature (2590)..(2595): n is a, c, g, or t
  misc_feature (2599)..(2623): n is a, c, g, or t
  misc_feature (2625)..(2627): n is a, c, g, or t
  misc_feature (2629)..(2630): n is a, c, g, or t
  misc_feature (2632)..(2632): n is a, c, g, or t
  misc_feature (2634)..(2636): n is a, c, g, or t
  misc_feature (2639)..(2640): n is a, c, g, or t
  misc_feature (2642)..(2643): n is a, c, g, or t
  misc_feature (2645)..(2645): n is a, c, g, or t
  misc_feature (2647)..(2647): n is a, c, g, or t
  misc_feature (2649)..(2650): n is a, c, g, or t
  misc_feature (2652)..(2655): n is a, c, g, or t
  misc_feature (2658)..(2663): n is a, c, g, or t
  misc_feature (2665)..(2665): n is a, c, g, or t
  misc_feature (2667)..(2667): n is a, c, g, or t
  misc_feature (2670)..(2672): n is a, c, g, or t
  misc_feature (2674)..(2674): n is a, c, g, or t
  misc_feature (2677)..(2678): n is a, c, g, or t
  misc_feature (2680)..(2683): n is a, c, g, or t
  misc_feature (2685)..(2690): n is a, c, g, or t
  misc_feature (2692)..(2693): n is a, c, g, or t
  misc_feature (2695)..(2696): n is a, c, g, or t
  misc_feature (2698)..(2700): n is a, c, g, or t
  misc_feature (2702)..(2702): n is a, c, g, or t
  misc_feature (2704)..(2706): n is a, c, g, or t
  misc_feature (2708)..(2708): n is a, c, g, or t
  misc_feature (2710)..(2711): n is a, c, g, or t
  misc_feature (2714)..(2719): n is a, c, g, or t
  misc_feature (2722)..(2725): n is a, c, g, or t
  misc_feature (2728)..(2729): n is a, c, g, or t
  misc_feature (2732)..(2740): n is a, c, g, or t
  misc_feature (2742)..(2743): n is a, c, g, or t
  misc_feature (2745)..(2747): n is a, c, g, or t
  misc_feature (2749)..(2751): n is a, c, g, or t
  misc_feature (2755)..(2757): n is a, c, g, or t
  misc_feature (2759)..(2759): n is a, c, g, or t
  misc_feature (2762)..(2763): n is a, c, g, or t
  misc_feature (2765)..(2772): n is a, c, g, or t
  misc_feature (2774)..(2780): n is a, c, g, or t
  misc_feature (2782)..(2782): n is a, c, g, or t
  misc_feature (2784)..(2786): n is a, c, g, or t
  misc_feature (2789)..(2790): n is a, c, g, or t
  misc_feature (2792)..(2792): n is a, c, g, or t
  misc_feature (2795)..(2795): n is a, c, g, or t
  misc_feature (2798)..(2798): n is a, c, g, or t
  misc_feature (2800)..(2800): n is a, c, g, or t
  misc_feature (2802)..(2803): n is a, c, g, or t
  misc_feature (2806)..(2807): n is a, c, g, or t
  misc_feature (2809)..(2816): n is a, c, g, or t
  misc_feature (2818)..(2820): n is a, c, g, or t
  misc_feature (2822)..(2823): n is a, c, g, or t
  misc_feature (2826)..(2826): n is a, c, g, or t
  misc_feature (2829)..(2835): n is a, c, g, or t
  misc_feature (2838)..(2839): n is a, c, g, or t
  misc_feature (2841)..(2841): n is a, c, g, or t
  misc_feature (2843)..(2849): n is a, c, g, or t
  misc_feature (2851)..(2857): n is a, c, g, or t
  misc_feature (2860)..(2860): n is a, c, g, or t
  misc_feature (2862)..(2868): n is a, c, g, or t
  misc_feature (2870)..(2871): n is a, c, g, or t
  misc_feature (2875)..(2880): n is a, c, g, or t
  misc_feature (2882)..(2888): n is a, c, g, or t
  misc_feature (2890)..(2892): n is a, c, g, or t
  misc_feature (2895)..(2898): n is a, c, g, or t
  misc_feature (2900)..(2901): n is a, c, g, or t
  misc_feature (2903)..(2905): n is a, c, g, or t
  misc_feature (2907)..(2914): n is a, c, g, or t
  misc_feature (2916)..(2916): n is a, c, g, or t
  misc_feature (2918)..(2920): n is a, c, g, or t
  misc_feature (2922)..(2922): n is a, c, g, or t
  misc_feature (2924)..(2926): n is a, c, g, or t
  misc_feature (2929)..(2932): n is a, c, g, or t
  misc_feature (2934)..(2934): n is a, c, g, or t
  misc_feature (2936)..(2937): n is a, c, g, or t
  misc_feature (2939)..(2942): n is a, c, g, or t
  misc_feature (2944)..(2944): n is a, c, g, or t
  misc_feature (2946)..(2946): n is a, c, g, or t
  misc_feature (2948)..(2948): n is a, c, g, or t
  misc_feature (2950)..(2950): n is a, c, g, or t
  misc_feature (2952)..(2952): n is a, c, g, or t
  misc_feature (2954)..(2956): n is a, c, g, or t
  misc_feature (2958)..(2961): n is a, c, g, or t
  misc_feature (2964)..(2965): n is a, c, g, or t
  misc_feature (2967)..(2967): n is a, c, g, or t
  misc_feature (2969)..(2970): n is a, c, g, or t
  misc_feature (2974)..(2975): n is a, c, g, or t
  misc_feature (2977)..(2978): n is a, c, g, or t
  misc_feature (2980)..(2981): n is a, c, g, or t
  misc_feature (2987)..(2988): n is a, c, g, or t
  misc_feature (2990)..(2992): n is a, c, g, or t
  misc_feature (2994)..(3006): n is a, c, g, or t
  misc_feature (3009)..(3009): n is a, c, g, or t
  misc_feature (3013)..(3017): n is a, c, g, or t
  misc_feature (3019)..(3022): n is a, c, g, or t
  misc_feature (3026)..(3027): n is a, c, g, or t
  misc_feature (3032)..(3034): n is a, c, g, or t
  misc_feature (3036)..(3037): n is a, c, g, or t
  misc_feature (3039)..(3041): n is a, c, g, or t
  misc_feature (3043)..(3043): n is a, c, g, or t
  misc_feature (3045)..(3046): n is a, c, g, or t
  misc_feature (3048)..(3048): n is a, c, g, or t
  misc_feature (3051)..(3051): n is a, c, g, or t
  misc_feature (3053)..(3055): n is a, c, g, or t
  misc_feature (3057)..(3074): n is a, c, g, or t
  misc_feature (3076)..(3078): n is a, c, g, or t
  misc_feature (3080)..(3095): n is a, c, g, or t
  misc_feature (3097)..(3101): n is a, c, g, or t
  misc_feature (3103)..(3108): n is a, c, g, or t
  misc_feature (3110)..(3116): n is a, c, g, or t
  misc_feature (3118)..(3120): n is a, c, g, or t
  misc_feature (3123)..(3126): n is a, c, g, or t
  misc_feature (3128)..(3128): n is a, c, g, or t
  misc_feature (3130)..(3132): n is a, c, g, or t
  misc_feature (3134)..(3140): n is a, c, g, or t
  misc_feature (3142)..(3143): n is a, c, g, or t
  misc_feature (3147)..(3153): n is a, c, g, or t
  misc_feature (3155)..(3155): n is a, c, g, or t
  misc_feature (3157)..(3162): n is a, c, g, or t
  misc_feature (3164)..(3165): n is a, c, g, or t
  misc_feature (3167)..(3168): n is a, c, g, or t
  misc_feature (3170)..(3171): n is a, c, g, or t
  misc_feature (3174)..(3174): n is a, c, g, or t
  misc_feature (3178)..(3178): n is a, c, g, or t
  misc_feature (3180)..(3181): n is a, c, g, or t
  misc_feature (3184)..(3192): n is a, c, g, or t
  misc_feature (3194)..(3194): n is a, c, g, or t
  misc_feature (3197)..(3197): n is a, c, g, or t
  misc_feature (3203)..(3203): n is a, c, g, or t
  misc_feature (3207)..(3207): n is a, c, g, or t
  misc_feature (3210)..(3212): n is a, c, g, or t
  misc_feature (3214)..(3215): n is a, c, g, or t
  misc_feature (3218)..(3218): n is a, c, g, or t
  misc_feature (3221)..(3223): n is a, c, g, or t
  misc_feature (3225)..(3226): n is a, c, g, or t
  misc_feature (3231)..(3231): n is a, c, g, or t
  misc_feature (3233)..(3233): n is a, c, g, or t
  misc_feature (3235)..(3235): n is a, c, g, or t
  misc_feature (3237)..(3238): n is a, c, g, or t
  misc_feature (3240)..(3242): n is a, c, g, or t
  misc_feature (3248)..(3249): n is a, c, g, or t
  misc_feature (3251)..(3251): n is a, c, g, or t
  misc_feature (3254)..(3259): n is a, c, g, or t
  misc_feature (3261)..(3263): n is a, c, g, or t
  misc_feature (3266)..(3267): n is a, c, g, or t
  misc_feature (3269)..(3271): n is a, c, g, or t
  misc_feature (3273)..(3275): n is a, c, g, or t
  misc_feature (3277)..(3277): n is a, c, g, or t
  misc_feature (3279)..(3279): n is a, c, g, or t
  misc_feature (3281)..(3282): n is a, c, g, or t
  misc_feature (3284)..(3285): n is a, c, g, or t
  misc_feature (3287)..(3289): n is a, c, g, or t
  misc_feature (3292)..(3292): n is a, c, g, or t
  misc_feature (3296)..(3298): n is a, c, g, or t
  misc_feature (3302)..(3303): n is a, c, g, or t
  misc_feature (3305)..(3307): n is a, c, g, or t
  misc_feature (3309)..(3310): n is a, c, g, or t
  misc_feature (3312)..(3313): n is a, c, g, or t
  misc_feature (3318)..(3318): n is a, c, g, or t
  misc_feature (3320)..(3323): n is a, c, g, or t
  misc_feature (3326)..(3329): n is a, c, g, or t
  misc_feature (3336)..(3338): n is a, c, g, or t
  misc_feature (3340)..(3345): n is a, c, g, or t
  misc_feature (3350)..(3351): n is a, c, g, or t
  misc_feature (3354)..(3355): n is a, c, g, or t
  misc_feature (3357)..(3360): n is a, c, g, or t
  misc_feature (3364)..(3368): n is a, c, g, or t
  misc_feature (3371)..(3373): n is a, c, g, or t
  misc_feature (3375)..(3379): n is a, c, g, or t
  misc_feature (3381)..(3383): n is a, c, g, or t
  misc_feature (3387)..(3392): n is a, c, g, or t
  misc_feature (3394)..(3400): n is a, c, g, or t
  misc_feature (3405)..(3405): n is a, c, g, or t
  misc_feature (3407)..(3408): n is a, c, g, or t
  misc_feature (3411)..(3411): n is a, c, g, or t
  misc_feature (3413)..(3413): n is a, c, g, or t
  misc_feature (3415)..(3416): n is a, c, g, or t
  misc_feature (3418)..(3418): n is a, c, g, or t
  misc_feature (3420)..(3420): n is a, c, g, or t
  misc_feature (3424)..(3424): n is a, c, g, or t
  misc_feature (3426)..(3427): n is a, c, g, or t
  misc_feature (3431)..(3434): n is a, c, g, or t
  misc_feature (3438)..(3448): n is a, c, g, or t
  misc_feature (3451)..(3451): n is a, c, g, or t
  misc_feature (3454)..(3456): n is a, c, g, or t
  misc_feature (3458)..(3458): n is a, c, g, or t
  misc_feature (3462)..(3463): n is a, c, g, or t
  misc_feature (3465)..(3467): n is a, c, g, or t
  misc_feature (3469)..(3470): n is a, c, g, or t
  misc_feature (3472)..(3473): n is a, c, g, or t
  misc_feature (3478)..(3482): n is a, c, g, or t
  misc_feature (3486)..(3488): n is a, c, g, or t
  misc_feature (3490)..(3490): n is a, c, g, or t
  misc_feature (3492)..(3492): n is a, c, g, or t
  misc_feature (3494)..(3494): n is a, c, g, or t
  misc_feature (3498)..(3499): n is a, c, g, or t
  misc_feature (3501)..(3503): n is a, c, g, or t
  misc_feature (3505)..(3508): n is a, c, g, or t
  misc_feature (3510)..(3517): n is a, c, g, or t
  misc_feature (3520)..(3521): n is a, c, g, or t
  misc_feature (3524)..(3525): n is a, c, g, or t
  misc_feature (3528)..(3528): n is a, c, g, or t
  misc_feature (3531)..(3531): n is a, c, g, or t
  misc_feature (3533)..(3534): n is a, c, g, or t
  misc_feature (3536)..(3536): n is a, c, g, or t
  misc_feature (3538)..(3538): n is a, c, g, or t
  misc_feature (3542)..(3543): n is a, c, g, or t
  misc_feature (3545)..(3548): n is a, c, g, or t
  misc_feature (3550)..(3551): n is a, c, g, or t
  misc_feature (3554)..(3554): n is a, c, g, or t
  misc_feature (3558)..(3559): n is a, c, g, or t
  misc_feature (3566)..(3566): n is a, c, g, or t
  misc_feature (3579)..(3580): n is a, c, g, or t
  misc_feature (3582)..(3588): n is a, c, g, or t
  misc_feature (3590)..(3590): n is a, c, g, or t
  misc_feature (3595)..(3595): n is a, c, g, or t
  misc_feature (3597)..(3601): n is a, c, g, or t
  misc_feature (3603)..(3603): n is a, c, g, or t
  misc_feature (3606)..(3606): n is a, c, g, or t
  misc_feature (3609)..(3609): n is a, c, g, or t
  misc_feature (3611)..(3614): n is a, c, g, or t
  misc_feature (3616)..(3617): n is a, c, g, or t
  misc_feature (3620)..(3620): n is a, c, g, or t
  misc_feature (3622)..(3624): n is a, c, g, or t
  misc_feature (3626)..(3628): n is a, c, g, or t
  misc_feature (3631)..(3631): n is a, c, g, or t
  misc_feature (3633)..(3634): n is a, c, g, or t
  misc_feature (3636)..(3636): n is a, c, g, or t
  misc_feature (3638)..(3641): n is a, c, g, or t
  misc_feature (3643)..(3643): n is a, c, g, or t
  misc_feature (3646)..(3646): n is a, c, g, or t
  misc_feature (3650)..(3650): n is a, c, g, or t
  misc_feature (3654)..(3654): n is a, c, g, or t
  misc_feature (3656)..(3658): n is a, c, g, or t
  misc_feature (3661)..(3661): n is a, c, g, or t
  misc_feature (3664)..(3665): n is a, c, g, or t
  misc_feature (3667)..(3667): n is a, c, g, or t
  misc_feature (3669)..(3672): n is a, c, g, or t
  misc_feature (3674)..(3675): n is a, c, g, or t
  misc_feature (3678)..(3679): n is a, c, g, or t
  misc_feature (3682)..(3685): n is a, c, g, or t
  misc_feature (3689)..(3689): n is a, c, g, or t
  misc_feature (3694)..(3694): n is a, c, g, or t
  misc_feature (3696)..(3696): n is a, c, g, or t
  misc_feature (3698)..(3698): n is a, c, g, or t
  misc_feature (3700)..(3700): n is a, c, g, or t
  misc_feature (3702)..(3703): n is a, c, g, or t
  misc_feature (3706)..(3706): n is a, c, g, or t
  misc_feature (3709)..(3709): n is a, c, g, or t
  misc_feature (3711)..(3711): n is a, c, g, or t
  misc_feature (3714)..(3714): n is a, c, g, or t
  misc_feature (3717)..(3723): n is a, c, g, or t
  misc_feature (3726)..(3728): n is a, c, g, or t
  misc_feature (3732)..(3734): n is a, c, g, or t
  misc_feature (3737)..(3737): n is a, c, g, or t
  misc_feature (3742)..(3743): n is a, c, g, or t
  misc_feature (3745)..(3746): n is a, c, g, or t
  misc_feature (3750)..(3751): n is a, c, g, or t
  misc_feature (3754)..(3754): n is a, c, g, or t
  misc_feature (3757)..(3757): n is a, c, g, or t
  misc_feature (3759)..(3759): n is a, c, g, or t
  misc_feature (3762)..(3763): n is a, c, g, or t
  misc_feature (3765)..(3766): n is a, c, g, or t
  misc_feature (3768)..(3770): n is a, c, g, or t
  misc_feature (3772)..(3772): n is a, c, g, or t
  misc_feature (3774)..(3775): n is a, c, g, or t
  misc_feature (3777)..(3783): n is a, c, g, or t
  misc_feature (3788)..(3790): n is a, c, g, or t
  misc_feature (3792)..(3792): n is a, c, g, or t
  misc_feature (3795)..(3797): n is a, c, g, or t
  misc_feature (3799)..(3799): n is a, c, g, or t
  misc_feature (3801)..(3801): n is a, c, g, or t
  misc_feature (3803)..(3806): n is a, c, g, or t
  misc_feature (3808)..(3814): n is a, c, g, or t
  misc_feature (3818)..(3819): n is a, c, g, or t
  misc_feature (3822)..(3822): n is a, c, g, or t
  misc_feature (3824)..(3824): n is a, c, g, or t
  misc_feature (3828)..(3831): n is a, c, g, or t
  misc_feature (3833)..(3835): n is a, c, g, or t
  misc_feature (3838)..(3841): n is a, c, g, or t
  misc_feature (3844)..(3847): n is a, c, g, or t
  misc_feature (3849)..(3849): n is a, c, g, or t
  misc_feature (3851)..(3851): n is a, c, g, or t
  misc_feature (3853)..(3854): n is a, c, g, or t
  misc_feature (3857)..(3859): n is a, c, g, or t
  misc_feature (3861)..(3861): n is a, c, g, or t
  misc_feature (3864)..(3865): n is a, c, g, or t
  misc_feature (3867)..(3868): n is a, c, g, or t
  misc_feature (3870)..(3870): n is a, c, g, or t
  misc_feature (3873)..(3874): n is a, c, g, or t
  misc_feature (3877)..(3877): n is a, c, g, or t
  misc_feature (3879)..(3880): n is a, c, g, or t
  misc_feature (3883)..(3884): n is a, c, g, or t
  misc_feature (3887)..(3891): n is a, c, g, or t
  misc_feature (3894)..(3897): n is a, c, g, or t
  misc_feature (3900)..(3901): n is a, c, g, or t
  misc_feature (3903)..(3903): n is a, c, g, or t
  misc_feature (3905)..(3905): n is a, c, g, or t
  misc_feature (3907)..(3907): n is a, c, g, or t
  misc_feature (3909)..(3911): n is a, c, g, or t
  misc_feature (3914)..(3914): n is a, c, g, or t
  misc_feature (3916)..(3916): n is a, c, g, or t
  misc_feature (3918)..(3919): n is a, c, g, or t
  misc_feature (3921)..(3922): n is a, c, g, or t
  misc_feature (3926)..(3926): n is a, c, g, or t
  misc_feature (3935)..(3935): n is a, c, g, or t
  misc_feature (3943)..(3943): n is a, c, g, or t
  misc_feature (3946)..(3947): n is a, c, g, or t
  misc_feature (3949)..(3949): n is a, c, g, or t
  misc_feature (3953)..(3953): n is a, c, g, or t
  misc_feature (3955)..(3955): n is a, c, g, or t
  misc_feature (3957)..(3957): n is a, c, g, or t
  misc_feature (3962)..(3964): n is a, c, g, or t
  misc_feature (3966)..(3966): n is a, c, g, or t
  misc_feature (3968)..(3968): n is a, c, g, or t
  misc_feature (3970)..(3970): n is a, c, g, or t
  misc_feature (3975)..(3975): n is a, c, g, or t
  misc_feature (3981)..(3981): n is a, c, g, or t
  misc_feature (3983)..(3983): n is a, c, g, or t
  misc_feature (3985)..(3986): n is a, c, g, or t
  misc_feature (3994)..(3995): n is a, c, g, or t
  misc_feature (3997)..(3998): n is a, c, g, or t
nnnnnnnnnnnncnnnnnnnncnncnnnnnngcnntnnnnncnntngnnttnntnnnnnnnntnannnnnnnnnnncttnnnnnnnnnnnntnnnnnnnnngnnnnnnanncnnnnnnnngnnnannnnnnnnttncnntnnnnnnnnnnnnnnnnnnncnnnnngnnannntnnancnncnnnnnnnnnnnnnnannnnnnnnnnnnncnnnnncnnnnnnnnnnanancanngnnnnannnnnnnncntnnnnnnnannnnnntnnnnnnngnnnnnaaannnntnnnnnnnnnnnnnnnnnnnnnnnnnnnnnnnnnnnnnatnnnnnnnntnnnncnnnnnnnnannnnnnnnnnnnngnnnnannnnnncnnnnnnnnnnnnatnnnnnnnnncgnnnnnnnnnantnncnangnnnnantnnntnnnnngtnnnnnnnnnnnnnnnnntcnncnnnnnggcnnanncnnannnnnnnntcnnnnncnntcaaancnntnnnnnnnnnnncnncntntncnnannnntncatnnngcnnnnnttntntatannnnnnntnnnnnannnnnnannnntnnnnnnnnnntnnnnnnnntncnnnnnnntnnnnnnntnnannnngnnngnnnnnnnnannnnnnnnncnnnnnnnnnnnnnnnnnnnnnnnnnnttnnnnnnannnnnncnnnnaanntnntnntnnnnannnnnnntnnnnnnnnnnnnnnnacnnnnnnntnnnnnnnnnnannannnannnncnnnnnnnnnnnnannnnnntannnnnnnnnngnannnnnnnnnnnannnnnnnnnnnnnnnnnnnnnnnntcncnnnnntnnannnnnnnnnnnnnnanannnnnannnnnnnnnnnnncnntntnntnnngnnnnanannntngnnnnnnnnncnnnnnnnannntannnntnannnngnnnnnnnnnnnnatnngnnnnnnnnnnnnnntnnnnnnnnannnnnnnnnnnnnnntnngnnnnannngnnnnnnnnnnnnnnannngnnnnnnnananngnnnannannaanaaannannaannnnncnnnnnngnnnngnnggntttttnntnnanaanannnnnnnnncnacnnnctcnccnnnnnnaannnannnnnnncnncnnnnnnnnnnnnnnnnnctnnnnnnnnnnggnnnngnngnnnnnnnnnnnnannannnnnnnnnnnnannnncnnnnanannannnacnntannnnnnnnnntnnttnnnaanntnnnaannttncnnncnttngnnangnagagactcaacactaataaaaaatggttaagtcgatcggcttattagtactactcggctaaacacattactgtgcgtacacctgtagcctatcaaccangtcatcttcntggagcctgatggggaaatctcatcttgaggcgagtttcgcacttagatgctttcagcgcttacctcaaccaaacgtagctacccagctatgccactggcgtgacaactggtgcactagaggtttgttcgtcccggtcctctcgtactaaggacaagccctctcaaatttcctgcgctcgcatcggatagggaccgaactgtctcacgacgttctgaacccagctcacgtaccactttaaccggcgaacagccggacccttgggaccttctccagccccaggatgtgatgagccgacatcgaggtgccaaaccccctcgtcgatatgaactctcggaggggatcagcctgttatccctagcgtaccttttatcctatgagcgatggcccttccatgcgggaccaccggatcactatgaccaactttcgttcctgttcgacctgtcagtctcacagtcaagctcacttataccattatgctctacgttccattaccgacggaactgagtgaacctttgtaagcctccgttactttttaggaggcgaccgccccagtcaaactacccgcctgacattgtccttagacaggatcaactgnccgaagttaggactcaaacacaaccagggtggtatttcacattgcgactccacggangctnacgcccccgcttcaaagtctcccacctattctacacaaatcatgctcaagcccaatgccaggttatagtaaaggtgcatagggtctttccgtccagatgcgagtagccggcatcttcaccggcactacaatttcgccgagcgcgcagccgagacagtagtcaaatcgttacaccattcgtgcaggtcggaacttacccgacaaggaatttcgctaccttaggaccgttatagttacggccgccgtttactggggcttcggttcaaagcttcgcctnnnnnntnanannnncnnntnnccttnnnnnnccngnnnngngnnnntnncnntncntnnacntnnannnnnntngnnnngnnnnnnnnntntgttnnnnnnnnncnnnnnnnnnnncnntnnnncnnngnnnnnnnnnncnnnnnnnccnnannnnnnngnnnnnnnnnnnnnnnnncnnnnncnnnnnctnnntcnnncncnnnnnnntnnnnatncnnnnnncntntnncngtntnngntnnngnnannnnnngttnnnnnnnnnnnnnnnnnnnnnnnnncnnnannangnnnagnnanngntntnncnnnnacnnnnnncntnttnnngnttnnannnngnnnnnntnngnntnnncntnnncntnngcnnnnnnacnnnnacnnccnnnnnnnnncnntnnntnnncttnnncntcnncnnnnnnnnannnnnnntnannntcnngnacnggnanannaanntnnnnnnnntnnncnncgnctnnnnnnntcnncntnnnnnnngnnnnnnnctnannnnnnnannattnnnnnngnnnnnnnannnttnnnntnncnnngnnnnnnnntntnnntntnnntannnntncnnannnntncntntncntnnncnnnngcnncngnnaccnntnncnntcaccnncnnngnnnnnnnnnnnnnccnctannnnnannnntaannctaannntnngnnncngnntnagncnnngnnnnnnnnnnnnnnnnnncnnntnnnnnnnnnnnnnnnncnnnnncnnnnnntnnnnnnngnnnctnnnncnannncnnnnnnntnnctgnnnnnnnanannnnnnanntnnanntancctngnnttnnnnnnnnnanctntagctntggnttnnntnnctntcnnncnnggacntnancnntnnngccctnncnccnnnnnntnnnatnncnnnannngnantnnanntnnnttnggtnnngttnngnnngnncnngcccnannnntannnntacctcnnncnnnnnnaaccnnaanncnnnncctnnnnncannncnnnnngnnngagnnnnnncnnnnnnngattngnnttncncnncnancctnanntcannnnaacnnnnnnnnnnncanacnnntncggnncnnnanntnnttttnnnnntacnnnancntnatcnngnnnannnnannnnnnnncgnntcnncgncangnnantnttcnntnnnntnnaantcgnnttcgctncggctccggctcnnannnnnnnanccttncnnnnnancantancnnnnannctnannntnnnaangnnangnnnncncanccancccnannnctngtnngntnnnncnnttnngtnnnngtanggttncngntncnnttncantnccntcnnnnnnntannnttcnnnttnccctnncnntacnngtncantntcnntnncnnnanannannnnnnnttacnnnanggnnntngntnnnncnnnnnnnaccnnacntncccnnnncnnntcnnnntcnnnntntncnnttnnngnttnngnntncgnnacngnnacnntcnnnnnttnnnnttnncngntnannntgntntnncnntctntcacgttanggagtccnacnncnccgncncngccgnnncngnanccggnttgggntngnnccttttcnntnncc

SEQ ID NO: 1116 - DNA, 4000 bp, Escherichia coli
  misc_feature (416)..(416): n is a, c, g, or t
  misc_feature (539)..(539): n is a, c, g, or t
  misc_feature (975)..(975): n is a, c, g, or t
  misc_feature (1160)..(1160): n is a, c, g, or t
  misc_feature (1164)..(1164): n is a, c, g, or t
  misc_feature (1344)..(1344): n is a, c, g, or t
  misc_feature (1389)..(1389): n is a, c, g, or t
  misc_feature (1413)..(1413): n is a, c, g, or t
  misc_feature (1446)..(1446): n is a, c, g, or t
  misc_feature (1452)..(1452): n is a, c, g, or t
  misc_feature (1624)..(1624): n is a, c, g, or t
  misc_feature (1686)..(1686): n is a, c, g, or t
  misc_feature (1818)..(1818): n is a, c, g, or t
  misc_feature (1825)..(1825): n is a, c, g, or t
  misc_feature (1923)..(1923): n is a, c, g, or t
  misc_feature (1965)..(1965): n is a, c, g, or t
  misc_feature (1980)..(1980): n is a, c, g, or t
  misc_feature (1992)..(1992): n is a, c, g, or t
  misc_feature (2037)..(2037): n is a, c, g, or t
  misc_feature (2118)..(2118): n is a, c, g, or t
  misc_feature (2148)..(2148): n is a, c, g, or t
  misc_feature (2172)..(2172): n is a, c, g, or t
  misc_feature (2217)..(2217): n is a, c, g, or t
  misc_feature (2337)..(2337): n is a, c, g, or t
  misc_feature (2684)..(2684): n is a, c, g, or t
  misc_feature (2717)..(2717): n is a, c, g, or t
  misc_feature (2720)..(2720): n is a, c, g, or t
  misc_feature (2768)..(2768): n is a, c, g, or t
  misc_feature (2849)..(2849): n is a, c, g, or t
  misc_feature (2852)..(2852): n is a, c, g, or t
  misc_feature (2886)..(2886): n is a, c, g, or t
  misc_feature (2972)..(2972): n is a, c, g, or t
  misc_feature (3146)..(3146): n is a, c, g, or t
  misc_feature (3299)..(3299): n is a, c, g, or t
  misc_feature (3398)..(3398): n is a, c, g, or t
  misc_feature (3437)..(3437): n is a, c, g, or t
  misc_feature (3464)..(3464): n is a, c, g, or t
  misc_feature (3654)..(3654): n is a, c, g, or t
  misc_feature (3662)..(3662): n is a, c, g, or t
  misc_feature (3707)..(3707): n is a, c, g, or t
  misc_feature (3719)..(3719): n is a, c, g, or t
  misc_feature (3884)..(3884): n is a, c, g, or t
  misc_feature (3911)..(3911): n is a, c, g, or t
gaagatcactgttgtctactattttcataacagactccattgataattcttcatgcttagaactgaatttctctaaaataggatcatcaggagatatttcacgactaaatgttgtatcaacgtcgtaatatgcttctgtgataactttatcggtagtctgatttgcactaatgaagtattctatattaagacgaatcgcatctataactgtaatttctttagattcatcattatctttatatgttagtttagaaagagctaacttttctaaatcttcatcagttttacattcttgtaatgtaaacgtaggcataagttcacgtatccattctacgtcacctctagaactaaccccaaatggagatatcattaatatactacgattagttatcacgattggtatataacaatgcganggttcaaaggtttcaaatagaaataacggaattattatgttattagctggttctacgaataagaatctcttacacatagctccaggactacatatttctataagttttttaagcttagcattnataagaactagctctttattaaccgaactaaagtctaaatttactaatcctatagaaatatcttcagacccattatcagtactagcggtataagaacgtttattaactataaaagatttaactatactagtcgctcttctagctgctatatactcaggtaaattatacataaaattccctcctttcttataagataattaacagtccggttgtttttacccgaaaaacaaggcggtgttaaacaatatatattaaaatgtaaacctaaaggagggttatgatgtttataactaattatgctaaaaagtatgaagaatgtaataactatggctattataaagatttctttaatgaaaactatgaagcggctgaagttattagaaaatgtgaagctatggccagagaaaaatatggtaagtttaaaagtatcatatanaataagaacaaatatgaaataatggaagatcttaaagaagctggattattacaatgtttaagtccagacgtaattgaagaaattaaaaagtatacagaacttcctaatgactgtgctcatgctttcaataacattggattatcatataatttatctgctagtgcaaaatttataccagaagaatncttnaatatttatggacttcttaaaattaaagaaagaagtaaaactgatttatttgccgatagtcatttctttattctaaatggagataatggaaagggactgtttgctcatattgatatcagcagacttattggtattggtgtagatattagaaagtctgacatatatagaagatatatgggntattctacaaatacagactcagatacttctacaaaatatagtagngactttggactaggtatgtatgangattcttatccagttgcatggtttaatacaganttagantataatgcactattactaagaataattacacataaaatgatacatggtgatagagaaatatttgcagaagctatagtaaatgctatattagataagtttataagattacaattaactttatatacttatgtagtatacatatatggtaatagagatatcgtatctaataacntagaaacatttgttaaacttgcattcttatttaaacttgtatataatagtgtaaatggaatngatacagatgatataggtgatagtattaaaaagcttatgagagactttagttattgtgttcaaaatagaggagcatttgatagtgttataatgactgcagacttatggagaaatagattaattaaaggatancaagacntaccaagctttagtgatgatgctataaatgaagttcttgaaatgtatcaaaagaaaagacatgctgttataactataaataaaatgaatagacctgtntatgctaataagattataacaggaattaaattagtttcattngaaagtcttcaagangatatattatcngaatataatttaaagaaatcttataatgcatttaaaaatgcaccngctagatatgctacaattggtatggaatctgttagtgataaatcagaattcatggttactagaagtaaattactagctaanttaaaacctaaagatagagaaacttatatngatcttgaaaatgatcttatgaanataaagtctgatgcaatgaattgtaagacaactgatggaatgaangttcttatgaataaaataaatactcttggtagtataatatctgtagaaatggatactaaagatgaatttctaagagaagctttaggacttttagatgcacaacgtataatactagcaganatgatggctagtcgtagtgtaataaaagaaaattctggaatattatatggtatggtaaagctataaaataacagcgggggcgaaagctcccgtttatgtacggaggtattatggttagttacgaagaaattatgcataataaacatgagaaatttgataacttccttaaggatcttggtatagaaaaagatgtattggtaaactttgttgatagtacatatgatcaatttatacgtaacactagagaagaaatagccaagtatagaaatgaaggtatagaaccacctgaaaatttggtaatagataataatatatcatttcaggaatataatgagaataagcaaaangtattggaagctataagtaattttattgaagcnganaatgagaatgaaggtaaagaagatgactttagatttccatattgtganatatttaatggtaacttccctaaacttgataaaactaaattatcagaccaggctaaagttgcacttaaagtagatggtctnccngattttgcttatgatatttattataatgccgaanataaaaaagctattcctatatattatgattatagtacagtcaatcatcaatgggttgaatttagttttatgttagagaagatgggngatttcttaggtattaatataaaccataaagctcctcttataactcttaatagaatgttacttggtatagatatagataatcctgtcattagtagtgaaattcagatagcagctgctattgaatgtgaacagaatcctatttatatggttagagaagctggtcgtataatggangaagctacaggagaaagaataccatatgaaatgactattgcaacatggacgttcttatggttatatgctcaaagatttaatatctatcgggaacagtcaagacaaacaggtaaaacattcgaccttactaaagtattaggaatggactggggngctggtcttcgtaatgctaagatgttagtagtacactttaaccaagatgaagctggtaagaacagacggggaatgatagatgctgctaatatgctaccnagatttcttaaatttcatacaataaagacaaaaaaagtnaaaggtaagcaaatgctagtagaagangaagatttttctccttctcttaaagctagagaagtaaagaatgaagaaagaaataacttcttaaagatattcgcagtaggtacaagtgaaactcaagcagaaagaaccgggcggggagactcacctagatttgtatacgtagacgaaattaactttatacgtcatacaactgcaatgcttggaggtatantatttgcncatggtactgctagactacttgctatacgtagtaatcaaagacanggtatatacttnacatctacaccaggtaaacttaatactacaagtggaagacttatgtatgaacttgtatttaaggaaatggctcaatttgatatagagttctttggatatacatatgaagaactatgtaaagtaatgaataatagtaagaaacatttctggactatgagttatgantactttgaacttggatttaatgaagcntggcttgaaaaatctattaatgaaagtaatgatagagaagtatttatgacagatatgttgaatcgttggcttgaagttgatagtgaaag

SEQ ID NO: 1117 - DNA, 4000 bp, Escherichia coli
  misc_feature (19)..(19): n is a, c, g, or t
  misc_feature (1378)..(1378): n is a, c, g, or t
  misc_feature (1631)..(1631): n is a, c, g, or t
  misc_feature (1925)..(1925): n is a, c, g, or t
  misc_feature (1942)..(1942): n is a, c, g, or t
  misc_feature (1985)..(1985): n is a, c, g, or t
  misc_feature (1991)..(1991): n is a, c, g, or t
  misc_feature (1997)..(1997): n is a, c, g, or t
  misc_feature (2351)..(2351): n is a, c, g, or t
  misc_feature (2672)..(2672): n is a, c, g, or t
  misc_feature (2804)..(2804): n is a, c, g, or t
  misc_feature (2834)..(2834): n is a, c, g, or t
  misc_feature (3091)..(3091): n is a, c, g, or t
  misc_feature (3553)..(3553): n is a, c, g, or t
  misc_feature (3585)..(3585): n is a, c, g, or t
  misc_feature (3637)..(3637): n is a, c, g, or t
  misc_feature (3779)..(3779): n is a, c, g, or t
cacacccgaggggcatgtngtcatacaggccaaacacgacaggcagcgatctatatgtttaaccgtcttttcatccggcgtccgctgattttccagcatatccttaataagataaattcggccgcgtgggctgtccaactcatcacccagcacttgataagtgggacaagtcgccgtgcaaaagccacaatggatacagctgcgcagaatatcattggtacgtttgatttgcgggtccaacagctgcgtttcggtaaaatgtgtttgcatcagctcatccgtcccgggtttaagatgccacgcggatcaaattttttgcgcagggtttgagaaacatgctcaattgcgcgtccgagtggctggaagtggcacagctcttgatcacgcaaaaaacccgatttcaccaaagtcgcatgaccactcagctgcgccacatgtgtctgcaaggcctgatgcaatgctaggccggcctgtgcatttgcaatctgtgccgcctccagcccaagccagatcaatcccccaccccaatccaattgacagtgaaacccgggttctttctgcaggtcttgcatcagatcaatgaccctcaaactgtctgtaggacgcactgaaatacgccacactgtgtcgagggctgcccaagaccttaggtctttcacctcagcccaaggatcatcaaccacatcaaccgcaccaaatttcgcaaggcgttgcgtcaattcggacgcgcggtattgaaccgaggtctcaaacccctcaacccggatcaaacagtcaaagccgccgtcttccgcctgcacggttgcagcgccgctgacgtcaaacggcgtgcccaacgccgccgacatacagccgaccgcatctgcccaggtggtgacgtgaattttcaaagtggcctgggtctcactgacaggcagaaccttcaacgccacctcagtgagcaccccaagcgtgccccaagagccggacatcaatttcacaagatcatagccggtgacattcttcatcacccggccaccattgctcagcacttgccccgtcccatccacaaaggtcacgcccagcgcaaaatcacgcgcggcgcccacttgaatgcggcgcggacccgagacattggcggcgatcaccccgccaagggttggctgacccgatgtgcccaagatcgcgcggtgatccatcggctcaaaggcaagtcgctgcttttccgccgccagaacggcctcaatgtcttcaatagctgtcccagttttggccaccagggtcatggcgccgggttcataaagagtgatcccctgcacgcgacgcgtactcagggcttgcgccggcgcaatacggccaatttggcgtgtcccgccgcccatgatctgcaaaggacccntggcctcacggagcgcagcggcaagggccgcctcatcttcaggatagagtatttcgctcatgacgcccgccgcgattgggaaaccgacagggggaagactttggaggggttgagaagccaggccggatcaaacacatctttgaccgccatttggatctccagatcttctgcactgtattggtcttccatcaaatcgcgtttttcaatgcccacaccgtgctcaccggtcaaacagccgcccacctcaacacanagccgcaacacatccgcccccatcgcttcacagagctcaagatcgccctctttgttggcatcaaacatgatcagcgggtgcatgttgccatcgcccgcatgaaacacattgcccacacgcaggccataatgatccgacagctctttgatccgccgcagaacttctggcaaggcagaaacaggaatggttccatccaaacacatatagtctgcaacttggcccaccgcgccaaaggcggattttcggcccaaccaaatcgcagcactttccgcggcagattggctttgacgcagntcgaccggattgtgttnttgcgcaatcgcactgatgcgatccagttgatcttgaatttcngcctcngatccntcgacctcgacaatcaacagcgcttcacagtctggatatcccgccttggcgaaattctcacaaatttcaataattggacggtccatgaattcaattgcgacaggcaaaacaccggctttgataatgtccgccacacaggcacctgccacttcattgctgtcaaaagcgatcatcaccggacgcgcgccctcgggtttgggcaaaatccgcaaggtggcctctgtgaccacgcccagctggccctctgacccgcagatcacccccagaatatcgagcccagaggcatcaaggtagccaccgccgatctcaacaatctcaccatccatcatcaccatggtcacgcccatcagattnttggtggtcaccccatatttcaaacaatgcgccccgccggagttcatcgcgatattgccggcaatggcgcaggccaattggctggaaggatcgggggcataaaagaaatcttcttcctccacagcgccagacacgctgaggttggtccggccgctttgcacccggatcaggcggttctcgtagtctgtttctaaaactttattcatctttgccacgcccaggatgacgcaatctgccgttggcagcgcaccgcccgccaaagatgtgcccgacccccgtggcacgaccggcacgccttcgcggtggcaaatcttcaaaatntctgagacttcctgcgtggttgcgggcaagactgcgatcatcggcgggcagcgatatgcggtgagcgcgtcacattcataggcccgcgtttcagaagggtcatcaatcaccgcatcatagggcaaaacagcncgcaacgccgccgcaattttcgcctttttngacaggatttccgaatttggttgtggcatttccatgtttaaccctccaattggtaaataattataaccaattttgggggatcgcaagggcaaatcctctgctacactgaaggcatgatatttgatgtaatcctctcccaactcaccacttttgatctttttgtcgtcggatttggccttctcgccgcctttctgatcggccatgtgatcgaaaaccctcccaagtcacgcgcttcagtcaccgccctgatgtcctantatcggcgcgcttggatgctcaatttcgtagaccgcgatccccgtatttttgattctcaaacactggcctctctgcgccaaagcactgccttttttggatccacagctttgatttccattggcgggcttttggcaatcatgggcacgccagatcgcctgcttgaatttacccatgccgtcacccaatcgcaggaggccactgcgctcaaattgcaattcaaattggcctttgccgctctgtttttggtgcatgcctttttgaaatttgtatggtccagtcgcctgtttggctattgcgccgtcttaatggcagccgtgccgaatgatccagatcatccccaagcgatcccgcgcgctattatggccggtgagatcaatatccgcgctgccttgagctttaaccgcgggttgcgcgccatgtatttcgcgcttgcatctctggcctggctggctggcgccccngttatgctggcggcctttgtgattacgctttntatgctctggaaccgtgagttttcctcacaggccagcgcacttttgaaaacngggataatggagaccgacacatcatttatcccagcgcccttcgcgcaaccaaccgatcaaaagaccaagagcggcaaaaatgaggtagacccaagcgggtaagaactgcctaatctcgacgccctgcaccacataggcctcncgcgagacaagcccgatccacccgcgcccatgggccggccggccactgcgcacattgcgaaatgttggcagaccctcagataaggccaaagctcccccattggttttggccaaaatgggtgccatcacccgatcggtggcgatggtctgtacaaactcccgcggtgctgccggccccagcgcagccacgatctgcaaatcccctgagctcaaacgataaag

SEQ ID NO: 1118 - DNA, 4000 bp, Escherichia coli
  misc_feature (1985)..(1985): n is a, c, g, or t
  misc_feature (1988)..(1988): n is a, c, g, or t
  misc_feature (1991)..(1991): n is a, c, g, or t
  misc_feature (3053)..(3053): n is a, c, g, or t
ggtcttagccggcattaatttgccgatgttaatgcgtgctatttcttatcgtgctgacggcctagaatccttggcactcaaggccttgcagggtggccaaaatggcattattcgtttaggtgcaccgccgattaatgtagagctagccatcaacgagaaggcgggagactcatagtgcctaagcttgatatagagatcatcaataagttaggcttacatgcacgagcctcggccaagctatcccaattagccagtgagtatccttgcgaagtttttctgagtaagaatgggcgcaggattaatgcaaaaagtattatgggtgtaatgatgttggccgccggaatgggtagtgtcgtcacattagaaacggttggcgagcaggaagataaagcgctcaccgcgatagttgcccttatcaatgaccgctttggcgagggtgagtaagtatgagttttgcgctccacggcgtatcggtctctaaaggaattgctattggtaaagcagtactaatatcacgcgcagcactcgaggttagtcactatttagtacagccaggtacggaagagcttgaggctaataggttgctacaagcttttgagcaagttcgcaatgagctatctacccttaaagcggttttaccaaaagatgctccgcaagagatggcagcattcttagatgttcatcaaatgattttgtcagatccagccttggcacaaaagccgctcgagttaattcgtcaaaaacgtttaaatgctgcgtgggccctcactacagagcttaatgatttgcttgagcaattttctgagatcgatgatccgtatctcaaggagcggggtaatgatattcggcaggttgctgaacgtgttattaaggcaatccattcacaaaatcgtcaaacagtgatcgggggagagggcttaatttcgggtgattttgatgatggttccattgtggtggcccatgatattgcgccgcatgacatggtgcgctttaaagagaatgccttaagtggatttgtaactgatttaggtggcaagacctcacacacagcaattgttgcgcgtagtttagagattccggccttagtcggcattcgtcatgccagtgagattattgagcacggcgattggttaatcattgatggagatactgggattgtgattgtggctcccgatgaggcgctattgaagcaatatcgcaccctgcaagcccaacaggatcgcgatacgcaaaagttacaggagatcaaatatagtccaactaaaacaagggatggcattgagattgaactctttgccaatattgagctacccgaggatgctagacatgcgattgaattgggtgcagtagggattggtttatttcgttctgaatttctatttatgaaccaagaacatggtttgcccgatgaagaaaatcaatatcaagaatatactcgcgcagttgaggctatgtttggcttacccgtgaatattcgaacgattgatattggctctgataaatcagtatcgggggcggagactggaagtactggtacatcaccacttggcttgcgagcaattcggtggtccttatccgagccagagatctttttaacccagctacgcgctattttgcgagcatccgcacatggtcaggtacggcttttattaccgatggttgcgcatgcacaggaaatctatgagagtttgcgcctgattgataaggcaaaacaacagctacgcgagcgaggtcaagcgtttaatcccaatgtacaggtaggggccatgattgaggttccagcagcagcattaatgatgcctctttttgtaaaacactttgattatttatcgattggtaccaatgatttaattcaatacaccctagcaatcgatcgcgctgatcacgctgttgcccatttgtatgatccattaaatccagcagtattaaatttgattgcttccattattcggcaggctcaaaaggctaaggtgccaattgcagtntgnggngagatggctggagaccctgcattgacaaagctattgttagcgatgggcttaaccgatttctcaatgcactttagtcaattactattggttaaacgtgaaattttacaagctgacacacgcaagctgaaaacacatattgatgaactcttggctacgtttgatcctgtggagcaaggtgtgttgttcaatcgtctaaattcagtacattaaagctaaacttagtgcgccccacatacagggcagtctagattacgttgtatcttaatttcatcgatttgtgaattacgggcattccaaatcaataatcgccccagtaagggttctccaaagccaatcaagatctgtaaggcctgtgctgcttggagagatccaatgattccaacgagcggtgagaagacgcccatactcgcacaacttgtttctacaaaatgagggtctggtggaaaaacgcaggcataacagggtgagcttgcttgcctaaaatcaaatacgctgatttgtgcatcaaatccaattgcagcacccgagaccagcgtttttccgtgcttaaggctgattcgattgatgaggtgacgggttataaagttatcggtgcaatcgatcactaccgatacttgcattacaagctcttcgagtaatgcctcatccgctttttgttcgatcgcatgaatagtgattccaggattgaggttatttaaaaatcgttttcctgaccaaaccttgctcattccgacactattattttgatgcatgatttgacgctgcaagttggtaagctcaacccgatcatgatccacgagggtaatttgacccactcctgccgcagctaggtagggtgcacaagcagagcctaaaccgcccgcgccaataattaatacatggctatttagcagcttttcctgaccagcaatatcaatatcttccagtagaagatgcctggagtaacgcagtagttgctcgtcattcatgagcaaaggcgcttactcaagcttggatgctgagcgcttcacggtttggccgttcagaaaagcaacggcctgttgcaacatgaaatcctcattnctaccaaattcagggggacgtttacccttttctttttcgcgctcctcaggtgttttctttgcattgcgctcctcaattaactgtagctcttgcaagcggcgcttctcacgatctttaattaaggcttcttcagaggattgcttattccgtaaatgtttttcactatcgatctcccgcgtgatcagaacatcgtcgggatcaccatctttattctgatcaaccggaatatcaggcttaatcccgaaggcttgaattgaacgaccattcggtgtgtagtagtaggcggttgtaattttgagtgcagagtcactgctcagcggcctaacggtttgtacggaacctttgccaaacgtagtcttaccgatgatggtcgcacgtttaaagtcttgcaaagcgccggcaacgatttcggaagcggaggcggagtacgcattgactaaaacaaccatcgggattttcttaaagagtgggggtacttcatctaaaggatcaccagattcattcagtttgtacatggcaggcactgcattaaatacctgcctagagtctggggcctgacccttagtagagacaataaccgctcctggaggcaggaaggccgcagcaacgccaacggcgccttgaagaagaccgccaccattattgcgtagatcaagaaccaagcccttgagttttggatctttattcgcaagctcggctaactttttagcaagatccggaatagtacgctcttgaaaactggtgatgcgaacccatgcaatattgttatctacaatttttgctttgatcgattgcactttaatttctgcgcgtgtaatggttactggaaaagtgcgctcttcacttttacggaaaatggtgagagtaatcttggtgccgggagtaccgcgcatagtgcgaactgctttatctaaggacatgccgcgtacaggcttatcatctaggcg

SEQ ID NO: 1119 - DNA, 4000 bp, Escherichia coli
  misc_feature (3)..(4): n is a, c, g, or t
  misc_feature (6)..(8): n is a, c, g, or t
  misc_feature (11)..(11): n is a, c, g, or t
  misc_feature (15)..(15): n is a, c, g, or t
  misc_feature (18)..(18): n is a, c, g, or t
  misc_feature (20)..(20): n is a, c, g, or t
  misc_feature (25)..(25): n is a, c, g, or t
  misc_feature (28)..(28): n is a, c, g, or t
  misc_feature (30)..(30): n is a, c, g, or t
  misc_feature (32)..(34): n is a, c, g, or t
  misc_feature (43)..(43): n is a, c, g, or t
  misc_feature (45)..(45): n is a, c, g, or t
  misc_feature (47)..(47): n is a, c, g, or t
  misc_feature (51)..(52): n is a, c, g, or t
  misc_feature (67)..(68): n is a, c, g, or t
  misc_feature (71)..(72): n is a, c, g, or t
  misc_feature (77)..(79): n is a, c, g, or t
  misc_feature (82)..(82): n is a, c, g, or t
  misc_feature (85)..(85): n is a, c, g, or t
  misc_feature (88)..(88): n is a, c, g, or t
  misc_feature (90)..(90): n is a, c, g, or t
  misc_feature (96)..(96): n is a, c, g, or t
  misc_feature (98)..(98): n is a, c, g, or t
  misc_feature (100)..(102): n is a, c, g, or t
  misc_feature (105)..(105): n is a, c, g, or t
  misc_feature (111)..(111): n is a, c, g, or t
  misc_feature (114)..(114): n is a, c, g, or t
  misc_feature (121)..(121): n is a, c, g, or t
  misc_feature (125)..(125): n is a, c, g, or t
  misc_feature (128)..(128): n is a, c, g, or t
  misc_feature (134)..(134): n is a, c, g, or t
  misc_feature (137)..(137): n is a, c, g, or t
  misc_feature (141)..(143): n is a, c, g, or t
  misc_feature (145)..(145): n is a, c, g, or t
  misc_feature (152)..(152): n is a, c, g, or t
  misc_feature (158)..(159): n is a, c, g, or t
  misc_feature (165)..(165): n is a, c, g, or t
  misc_feature (169)..(169): n is a, c, g, or t
  misc_feature (171)..(171): n is a, c, g, or t
  misc_feature (174)..(174): n is a, c, g, or t
  misc_feature (178)..(178): n is a, c, g, or t
  misc_feature (182)..(182): n is a, c, g, or t
  misc_feature (184)..(185): n is a, c, g, or t
  misc_feature (188)..(188): n is a, c, g, or t
  misc_feature (191)..(192): n is a, c, g, or t
  misc_feature (200)..(201): n is a, c, g, or t
  misc_feature (207)..(209): n is a, c, g, or t
  misc_feature (211)..(212): n is a, c, g, or t
  misc_feature (214)..(218): n is a, c, g, or t
  misc_feature (221)..(221): n is a, c, g, or t
  misc_feature (223)..(223): n is a, c, g, or t
  misc_feature (225)..(225): n is a, c, g, or t
  misc_feature (236)..(236): n is a, c, g, or t
  misc_feature (241)..(241): n is a, c, g, or t
  misc_feature (243)..(244): n is a, c, g, or t
  misc_feature (249)..(250): n is a, c, g, or t
  misc_feature (252)..(252): n is a, c, g, or t
  misc_feature (256)..(256): n is a, c, g, or t
  misc_feature (259)..(259): n is a, c, g, or t
  misc_feature (265)..(266): n is a, c, g, or t
  misc_feature (274)..(276): n is a, c, g, or t
  misc_feature (278)..(278): n is a, c, g, or t
  misc_feature (281)..(282): n is a, c, g, or t
  misc_feature (284)..(284): n is a, c, g, or t
  misc_feature (288)..(288): n is a, c, g, or t
  misc_feature (290)..(290): n is a, c, g, or t
  misc_feature (292)..(293): n is a, c, g, or t
  misc_feature (300)..(300): n is a, c, g, or t
  misc_feature (308)..(308): n is a, c, g, or t
  misc_feature (311)..(311): n is a, c, g, or t
  misc_feature (316)..(316): n is a, c, g, or t
  misc_feature (322)..(322): n is a, c, g, or t
  misc_feature (324)..(324): n is a, c, g, or t
  misc_feature (326)..(326): n is a, c, g, or t
  misc_feature (336)..(336): n is a, c, g, or t
  misc_feature (339)..(339): n is a, c, g, or t
  misc_feature (345)..(346): n is a, c, g, or t
  misc_feature (350)..(350): n is a, c, g, or t
  misc_feature (353)..(354): n is a, c, g, or t
  misc_feature (357)..(357): n is a, c, g, or t
  misc_feature (361)..(361): n is a, c, g, or t
  misc_feature (365)..(365): n is a, c, g, or t
  misc_feature (373)..(373): n is a, c, g, or t
  misc_feature (376)..(377): n is a, c, g, or t
  misc_feature (379)..(379): n is a, c, g, or t
  misc_feature (382)..(382): n is a, c, g, or t
  misc_feature (386)..(386): n is a, c, g, or t
  misc_feature (388)..(389): n is a, c, g, or t
  misc_feature (395)..(396): n is a, c, g, or t
  misc_feature (400)..(403): n is a, c, g, or t
  misc_feature (405)..(406): n is a, c, g, or t
  misc_feature (410)..(410): n is a, c, g, or t
  misc_feature (412)..(412): n is a, c, g, or t
  misc_feature (417)..(417): n is a, c, g, or t
  misc_feature (425)..(426): n is a, c, g, or t
  misc_feature (429)..(430): n is a, c, g, or t
  misc_feature (432)..(432): n is a, c, g, or t
  misc_feature (437)..(437): n is a, c, g, or t
  misc_feature (440)..(441): n is a, c, g, or t
  misc_feature (444)..(444): n is a, c, g, or t
  misc_feature (449)..(450): n is a, c, g, or t
  misc_feature (454)..(454): n is a, c, g, or t
  misc_feature (458)..(458): n is a, c, g, or t
  misc_feature (463)..(463): n is a, c, g, or t
  misc_feature (469)..(470): n is a, c, g, or t
  misc_feature (472)..(472): n is a, c, g, or t
  misc_feature (474)..(474): n is a, c, g, or t
  misc_feature (479)..(479): n is a, c, g, or t
  misc_feature (485)..(487): n is a, c, g, or t
  misc_feature (489)..(489): n is a, c, g, or t
  misc_feature (491)..(491): n is a, c, g, or t
  misc_feature (498)..(498): n is a, c, g, or t
  misc_feature (505)..(505): n is a, c, g, or t
  misc_feature (508)..(508): n is a, c, g, or t
  misc_feature (515)..(515): n is a, c, g, or t
  misc_feature (518)..(518): n is a, c, g, or t
  misc_feature (523)..(523): n is a, c, g, or t
  misc_feature (529)..(529): n is a, c, g, or t
  misc_feature (531)..(532): n is a, c, g, or t
  misc_feature (543)..(545): n is a, c, g, or t
  misc_feature (548)..(551): n is a, c, g, or t
  misc_feature (556)..(556): n is a, c, g, or t
  misc_feature (566)..(569): n is a, c, g, or t
  misc_feature (571)..(572): n is a, c, g, or t
  misc_feature (580)..(581): n is a, c, g, or t
  misc_feature (584)..(584): n is a, c, g, or t
  misc_feature (586)..(586): n is a, c, g, or t
  misc_feature (589)..(589): n is a, c, g, or t
  misc_feature (591)..(591): n is a, c, g, or t
  misc_feature (593)..(594): n is a, c, g, or t
  misc_feature (602)..(602): n is a, c, g, or t
  misc_feature (609)..(610): n is a, c, g, or t
  misc_feature (612)..(612): n is a, c, g, or t
  misc_feature (614)..(614): n is a, c, g, or t
  misc_feature (619)..(619): n is a, c, g, or t
  misc_feature (621)..(623): n is a, c, g, or t
  misc_feature (627)..(627): n is a, c, g, or t
  misc_feature (638)..(638): n is a, c, g, or t
  misc_feature (646)..(647): n is a, c, g, or t
  misc_feature (650)..(650): n is a, c, g, or t
  misc_feature (652)..(658): n is a, c, g, or t
  misc_feature (662)..(662): n is a, c, g, or t
  misc_feature (667)..(669): n is a, c, g, or t
  misc_feature (671)..(671): n is a, c, g, or t
  misc_feature (678)..(679): n is a, c, g, or t
  misc_feature (681)..(682): n is a, c, g, or t
  misc_feature (686)..(686): n is a, c, g, or t
  misc_feature (692)..(692): n is a, c, g, or t
  misc_feature (708)..(709): n is a, c, g, or t
  misc_feature (714)..(714): n is a, c, g, or t
  misc_feature (716)..(716): n is a, c, g, or t
  misc_feature (718)..(718): n is a, c, g, or t
  misc_feature (720)..(720): n is a, c, g, or t
  misc_feature (722)..(723): n is a, c, g, or t
  misc_feature (727)..(728): n is a, c, g, or t
  misc_feature (730)..(731): n is a, c, g, or t
  misc_feature (734)..(734): n is a, c, g, or t
  misc_feature (736)..(736): n is a, c, g, or t
  misc_feature (738)..(742): n is a, c, g, or t
  misc_feature (744)..(744): n is a, c, g, or t
  misc_feature (754)..(754): n is a, c, g, or t
  misc_feature (756)..(757): n is a, c, g, or t
  misc_feature (759)..(759): n is a, c, g, or t
  misc_feature (761)..(761): n is a, c, g, or t
  misc_feature (764)..(764): n is a, c, g, or t
  misc_feature (770)..(773): n is a, c, g, or t
  misc_feature (777)..(778): n is a, c, g, or t
  misc_feature (780)..(780): n is a, c, g, or t
  misc_feature (782)..(783): n is a, c, g, or t
  misc_feature (787)..(788): n is a, c, g, or t
  misc_feature (790)..(790): n is a, c, g, or t
  misc_feature (796)..(796): n is a, c, g, or t
  misc_feature (799)..(799): n is a, c, g, or t
  misc_feature (802)..(802): n is a, c, g, or t
  misc_feature (804)..(804): n is a, c, g, or t
  misc_feature (806)..(806): n is a, c, g, or t
  misc_feature (810)..(810): n is a, c, g, or t
  misc_feature (814)..(815): n is a, c, g, or t
  misc_feature (818)..(818): n is a, c, g, or t
  misc_feature (821)..(821): n is a, c, g, or t
  misc_feature (826)..(826): n is a, c, g, or t
  misc_feature (828)..(829): n is a, c, g, or t
  misc_feature (831)..(832): n is a, c, g, or t
  misc_feature (835)..(835): n is a, c, g, or t
  misc_feature (840)..(840): n is a, c, g, or t
  misc_feature (849)..(849): n is a, c, g, or t
  misc_feature (853)..(853): n is a, c, g, or t
  misc_feature (856)..(856): n is a, c, g, or t
  misc_feature (860)..(860): n is a, c, g, or t
  misc_feature (867)..(867): n is a, c, g, or t
  misc_feature (870)..(870): n is a, c, g, or t
  misc_feature (872)..(872): n is a, c, g, or t
  misc_feature (874)..(874): n is a, c, g, or t
  misc_feature (876)..(876): n is a, c, g, or t
  misc_feature (880)..(881): n is a, c, g, or t
  misc_feature (884)..(884): n is a, c, g, or t
  misc_feature (886)..(886): n is a, c, g, or t
  misc_feature (888)..(888): n is a, c, g, or t
  misc_feature (894)..(895): n is a, c, g, or t
  misc_feature (901)..(901): n is a, c, g, or t
  misc_feature (904)..(904): n is a, c, g, or t
  misc_feature (911)..(911): n is a, c, g, or t
  misc_feature (913)..(913): n is a, c, g, or t
  misc_feature (916)..(917): n is a, c, g, or t
  misc_feature (920)..(920): n is a, c, g, or t
  misc_feature (923)..(924): n is a, c, g, or t
  misc_feature (926)..(927): n is a, c, g, or t
  misc_feature (930)..(930): n is a, c, g, or t
  misc_feature (932)..(932): n is a, c, g, or t
  misc_feature (934)..(934): n is a, c, g, or t
  misc_feature (936)..(938): n is a, c, g, or t
  misc_feature (940)..(940): n is a, c, g, or t
  misc_feature (944)..(944): n is a, c, g, or t
  misc_feature (947)..(947): n is a, c, g, or t
  misc_feature (949)..(950): n is a, c, g, or t
  misc_feature (959)..(959): n is a, c, g, or t
  misc_feature (965)..(966): n is a, c, g, or t
  misc_feature (969)..(969): n is a, c, g, or t
  misc_feature (971)..(971): n is a, c, g, or t
  misc_feature (977)..(977): n is a, c, g, or t
  misc_feature (980)..(980): n is a, c, g, or t
  misc_feature (983)..(983): n is a, c, g, or t
  misc_feature (987)..(989): n is a, c, g, or t
  misc_feature (991)..(992): n is a, c, g, or t
  misc_feature (995)..(998): n is a, c, g, or t
  misc_feature (1004)..(1005): n is a, c, g, or t
  misc_feature (1008)..(1008): n is a, c, g, or t
  misc_feature (1010)..(1010): n is a, c, g, or t
  misc_feature (1013)..(1013): n is a, c, g, or t
  misc_feature (1015)..(1015): n is a, c, g, or t
  misc_feature (1019)..(1021): n is a, c, g, or t
  misc_feature (1023)..(1025): n is a, c, g, or t
  misc_feature (1031)..(1031): n is a, c, g, or t
  misc_feature (1035)..(1036): n is a, c, g, or t
  misc_feature (1042)..(1042): n is a, c, g, or t
  misc_feature (1047)..(1049): n is a, c, g, or t
  misc_feature (1051)..(1052): n is a, c, g, or t
  misc_feature (1054)..(1057): n is a, c, g, or t
  misc_feature (1060)..(1060): n is a, c, g, or t
  misc_feature (1072)..(1072): n is a, c, g, or t
  misc_feature (1075)..(1075): n is a, c, g, or t
  misc_feature (1084)..(1084): n is a, c, g, or t
  misc_feature (1092)..(1092): n is a, c, g, or t
  misc_feature (1097)..(1099): n is a, c, g, or t
  misc_feature (1101)..(1102): n is a, c, g, or t
  misc_feature (1107)..(1107): n is a, c, g, or t
  misc_feature (1109)..(1109): n is a, c, g, or t
  misc_feature (1115)..(1116): n is a, c, g, or t
  misc_feature (1122)..(1122): n is a, c, g, or t
  misc_feature (1124)..(1124): n is a, c, g, or t
  misc_feature (1130)..(1130): n is a, c, g, or t
  misc_feature (1133)..(1133): n is a, c, g, or t
  misc_feature (1135)..(1136): n is a, c, g, or t
  misc_feature (1138)..(1138): n is a, c, g, or t
  misc_feature (1141)..(1141): n is a, c, g, or t
  misc_feature (1146)..(1146): n is a, c, g, or t
  misc_feature (1148)..(1149): n is a, c, g, or t
  misc_feature (1151)..(1152): n is a, c, g, or t
  misc_feature (1155)..(1156): n is a, c, g, or t
  misc_feature (1160)..(1160): n is a, c, g, or t
  misc_feature (1169)..(1169): n is a, c, g, or t
  misc_feature (1173)..(1173): n is a, c, g, or t
  misc_feature (1177)..(1178): n is a, c, g, or t
  misc_feature (1180)..(1181): n is a, c, g, or t
  misc_feature (1187)..(1188): n is a, c, g, or t
  misc_feature (1190)..(1190): n is a, c, g, or t
  misc_feature (1193)..(1195): n is a, c, g, or t
  misc_feature (1197)..(1197): n is a, c, g, or t
  misc_feature (1207)..(1207): n is a, c, g, or t
  misc_feature (1209)..(1209): n is a, c, g, or t
  misc_feature (1211)..(1212): n is a, c, g, or t
  misc_feature (1215)..(1215): n is a, c, g, or t
  misc_feature (1219)..(1219): n is a, c, g, or t
  misc_feature (1223)..(1223): n is a, c, g, or t
  misc_feature (1225)..(1225): n is a, c, g, or t
  misc_feature (1229)..(1229): n is a, c, g, or t
  misc_feature (1233)..(1233): n is a, c, g, or t
  misc_feature (1236)..(1240): n is a, c, g, or t
  misc_feature (1248)..(1248): n is a, c, g, or t
  misc_feature (1252)..(1254): n is a, c, g, or t
  misc_feature (1263)..(1264): n is a, c, g, or t
  misc_feature (1269)..(1271): n is a, c, g, or t
  misc_feature (1274)..(1275): n is a, c, g, or t
  misc_feature (1277)..(1277): n is a, c, g, or t
  misc_feature (1280)..(1280): n is a, c, g, or t
  misc_feature (1284)..(1286): n is a, c, g, or t
  misc_feature (1288)..(1288): n is a, c, g, or t
  misc_feature (1290)..(1290): n is a, c, g, or t
  misc_feature (1296)..(1296): n is a, c, g, or t
  misc_feature (1300)..(1300): n is a, c, g, or t
  misc_feature (1302)..(1302): n is a, c, g, or t
  misc_feature (1315)..(1316): n is a, c, g, or t
  misc_feature (1318)..(1318): n is a, c, g, or t
  misc_feature (1320)..(1321): n is a, c, g, or t
  misc_feature (1323)..(1324): n is a, c, g, or t
  misc_feature (1330)..(1332): n is a, c, g, or t
  misc_feature (1335)..(1335): n is a, c, g, or t
  misc_feature (1337)..(1337): n is a, c, g, or t
  misc_feature (1341)..(1341): n is a, c, g, or t
  misc_feature (1347)..(1348): n is a, c, g, or t
  misc_feature (1361)..(1361): n is a, c, g, or t
  misc_feature (1363)..(1364): n is a, c, g, or t
  misc_feature (1366)..(1366): n is a, c, g, or t
  misc_feature (1368)..(1368): n is a, c, g, or t
  misc_feature (1371)..(1371): n is a, c, g, or t
  misc_feature (1373)..(1373): n is a, c, g, or t
  misc_feature (1375)..(1375): n is a, c, g, or t
  misc_feature (1377)..(1377): n is a, c, g, or t
  misc_feature (1379)..(1379): n is a, c, g, or t
  misc_feature (1384)..(1385): n is a, c, g, or t
  misc_feature (1389)..(1389): n is a, c, g, or t
  misc_feature (1392)..(1392): n is a, c, g, or t
  misc_feature (1395)..(1395): n is a, c, g, or t
  misc_feature (1398)..(1400): n is a, c, g, or t
  misc_feature (1404)..(1410): n is a, c, g, or t
  misc_feature (1416)..(1418): n is a, c, g, or t
  misc_feature (1420)..(1423): n is a, c, g, or t
  misc_feature (1429)..(1429): n is a, c, g, or t
  misc_feature (1432)..(1432): n is a, c, g, or t
  misc_feature (1435)..(1439): n is a, c, g, or t
  misc_feature (1443)..(1445): n is a, c, g, or t
  misc_feature (1448)..(1448): n is a, c, g, or t
  misc_feature (1451)..(1457): n is a, c, g, or t
  misc_feature (1461)..(1461): n is a, c, g, or t
  misc_feature (1463)..(1476): n is a, c, g, or t
  misc_feature (1478)..(1481): n is a, c, g, or t
  misc_feature (1483)..(1490): n is a, c, g, or t
  misc_feature (1493)..(1499): n is a, c, g, or t
  misc_feature (1501)..(1501): n is a, c, g, or t
  misc_feature (1503)..(1503): n is a, c, g, or t
  misc_feature (1505)..(1505): n is a, c, g, or t
  misc_feature (1509)..(1510): n is a, c, g, or t
  misc_feature (1514)..(1515): n is a, c, g, or t
  misc_feature (1517)..(1517): n is a, c, g, or t
  misc_feature (1519)..(1521): n is a, c, g, or t
  misc_feature (1523)..(1524): n is a, c, g, or t
  misc_feature (1526)..(1543): n is a, c, g, or t
  misc_feature (1545)..(1547): n is a, c, g, or t
  misc_feature (1549)..(1552): n is a, c, g, or t
  misc_feature (1554)..(1554): n is a, c, g, or t
  misc_feature (1556)..(1556): n is a, c, g, or t
  misc_feature (1558)..(1558): n is a, c, g, or t
  misc_feature (1560)..(1566): n is a, c, g, or t
  misc_feature (1568)..(1568): n is a, c, g, or t
  misc_feature (1570)..(1570): n is a, c, g, or t
  misc_feature (1572)..(1572): n is a, c, g, or t
  misc_feature (1574)..(1577): n is a, c, g, or t
  misc_feature (1579)..(1582): n is a, c, g, or t
  misc_feature (1584)..(1606): n is a, c, g, or t
  misc_feature (1608)..(1616): n is a, c, g, or t
  misc_feature (1618)..(1621): n is a, c, g, or t
  misc_feature (1623)..(1623): n is a, c, g, or t
  misc_feature (1626)..(1632): n is a, c, g, or t
  misc_feature (1634)..(1634): n is a, c, g, or t
  misc_feature (1636)..(1636): n is a, c, g, or t
  misc_feature (1640)..(1640): n is a, c, g, or t
  misc_feature (1642)..(1642): n is a, c, g, or t
  misc_feature (1650)..(1650): n is a, c, g, or t
  misc_feature (1652)..(1652): n is a, c, g, or t
  misc_feature (1654)..(1674): n is a, c, g, or t
  misc_feature (1676)..(1680): n is a, c, g, or t
  misc_feature (1682)..(1684): n is a, c, g, or t
  misc_feature (1686)..(1690): n is a, c, g, or t
  misc_feature (1693)..(1703): n is a, c, g, or t
  misc_feature (1708)..(1712): n is a, c, g, or t
  misc_feature (1714)..(1714): n is a, c, g, or t
  misc_feature (1716)..(1726): n is a, c, g, or t
  misc_feature (1728)..(1739): n is a, c, g, or t
  misc_feature (1742)..(1748): n is a, c, g, or t
  misc_feature (1750)..(1757): n is a, c, g, or t
  misc_feature (1760)..(1761): n is a, c, g, or t
  misc_feature (1763)..(1764): n is a, c, g, or t
  misc_feature (1767)..(1770): n is a, c, g, or t
  misc_feature (1775)..(1779): n is a, c, g, or t
  misc_feature (1783)..(1791): n is a, c, g, or t
  misc_feature (1794)..(1797): n is a, c, g, or t
  misc_feature (1799)..(1800): n is a, c, g, or t
  misc_feature (1802)..(1812): n is a, c, g, or t
  misc_feature (1814)..(1823): n is a, c, g, or t
  misc_feature (1827)..(1827): n is a, c, g, or t
  misc_feature (1830)..(1830): n is a, c, g, or t
  misc_feature (1833)..(1837): n is a, c, g, or t
  misc_feature (1841)..(1846): n is a, c, g, or t
  misc_feature (1849)..(1857): n is a, c, g, or t
  misc_feature (1860)..(1860): n is a, c, g, or t
  misc_feature (1862)..(1862): n is a, c, g, or t
  misc_feature (1864)..(1866): n is a, c, g, or t
  misc_feature (1869)..(1885): n is a, c, g, or t
  misc_feature (1888)..(1888): n is a, c, g, or t
  misc_feature (1921)..(1921): n is a, c, g, or t
  misc_feature (1923)..(1924): n is a, c, g, or t
  misc_feature (1926)..(1927): n is a, c, g, or t
  misc_feature (1929)..(1935): n is a, c, g, or t
  misc_feature (1937)..(1938): n is a, c, g, or t
  misc_feature (1940)..(1945): n is a, c, g, or t
  misc_feature (1949)..(1952): n is a, c, g, or t
  misc_feature (1954)..(1954): n is a, c, g, or t
  misc_feature (1958)..(1958): n is a, c, g, or t
  misc_feature (1961)..(1961): n is a, c, g, or t
  misc_feature (1964)..(1968): n is a, c, g, or t
  misc_feature (1972)..(1977): n is a, c, g, or t
  misc_feature (1980)..(1984): n is a, c, g, or t
  misc_feature (1987)..(1988): n is a, c, g, or t
  misc_feature (1990)..(1996): n is a, c, g, or t
  misc_feature (1998)..(2003): n is a, c, g, or t
  misc_feature (2005)..(2012): n is a, c, g, or t
  misc_feature (2014)..(2018): n is a, c, g, or t
tgnntnnnatnaaanccntnagcanccngnannnctctcacantntncaanntgtcccgaaattttnnttnngcatnnnttnttntananacttcngncnnntcntcgcanatnattttantcanatnttcctntgngacnnnancatttanaaattnnaccatntccntntcncttncatntnnctngtnnatatgtcnnacaaannncnnannnnnacntntnttaatgccaantaatntnntatcnncntcanatntgccannatatattnnntnaanntnatcngngnncattgtnatcccganttnttttngaccantnanactcatatgnatntaaacnntatntannccntaantttnagcctgantcnnanaanttcnanntatatnntttnnnntnntttntnctacntaaatcgnnctnncngtcgnatnnatntatannccanattnacaancggccnngntnttatnttaatnnnancntgccctnctctctncanatttganatnatatntatcanannattctttgacnnnatnnnntattnatccaaaatnnnntnncacagctnnttnancantnanncaacattntgtgaanntntnaagantnnnatgntaataattttntttacacnncantnnnnnnnacgnctgtnnnancactcannannactnatcttnaagcctttcaatcaannttccnangnantnnttcnncnnttntntnnnnngngcatattcangnncntnaanttcccnnnncgcnntnannagcnnanacaccnttnccntngnaatntatnnatnctnttatncnntnnttnaatcngacctctcncganaanaaanatctctncantnantncaannttnancngtcatnnattcgnatnaacgttnangcnnaangannannccntntngnnnanacantangnnctgctaaanaatttnnatncnagcttncanganaatnnncnnatnnnntgattnntancnacntntttnnnannnaattanaatnnactctncatcnnncnntnnnncanaatatgatgatngtntatccattnccatgctntttcnnnannccctncnacgacnngagcancnatatcnaantnntnaanttttncnntnnttnnagtntttaatccnaccncccnngnnaagaannanctnnntngtcatagctncntnnaangatnttcntntttnaatnccnnnnncccccaanggannngcctgcctnngcaannnctnncncanattnnncntntttttnactncnctcccacaagagnngngnntnntattannnatncncgangttatnncgataaagatatntnnancnacncncncncnagagnngcgncanatnatnnntttnnnnnnnttcatnnncnnnntatttnaanccnnnnncccnnnagnggnnnnnnnagtncnnnnnnnnnnnnnncnnnnannnnnnnnatnnnnnnncncncncccnngagnngngnnncnntnnnnnnnnnnnnnnnnnngnnntnnnntntntntnnnnnnncncncncnnnngnnnngnnnnnnnnnnnnnnnnnnnnnnnannnnnnnnngnnnnanttnnnnnnncncncccncnagaggagngncnnnnnnnnnnnnnnnnnnnnntnnnnncnnntnnnnnttnnnnnnnnnnnccccnnnnngngnnnnnnnnnnntnnnnnnnnnnnngcnnnnnnnannnnnnnnttnnannccnnnnccccnnnnngggnnnnnnnnntannnntnntnnnnnnnnnnntnnnnnnnnnntttnaanccnnnnncccnnnnnnggnnnnnnnnntanangnnntannnnnnnnnnnnnnnnnaanatttcaatccacgctcccacgagaggagcgacntnntnngnnnnnnntnntnnnnnnatannnnantttnaanccnnnnncccnnnnnnggnnnnnctnntnnnnnnngnnnnnntnnnnnnnntnnnnntatttcaatccacgctcccacgagaggagcgacagcaatattgcacaaaaaatttgtttatttttatacaataccgacaataaatatataataagataaataacaagtaaaaccaaaaacctattattcattttattgtacaaatttacaagtaatttcaggtgcgagacaaccggtacattcatgtttacttatctttcgcaccacattttataatatcaatgtctgatcagcaggaatcccacggtcaacaccaacatgttctatcttcgtctgataacgatttcctaaataatagaatctgagactatccacatctttatcaataagatccgttaatatggcctttagcatcacacattgagcattatctagtatacattcaaacacagaattctgaactcttcgcccataatttacacattgtttagctacttttctcaacctggtttttccttcagcagtttcagtattcacatcatatgtaatcaatacaagcacgccatcacctcatttccataaaaatacagggtactcatccaaatctccccttaaatatcttgccaacagcattgcctgtacaaatggaaccattccccattccaccttttcattaagatatgggtgtgtaataatctcctttttcttgttttgccattctgatagtaattttttacgaatatctgtatccatcaatacagcaccgttttctttttttgtaaaactcttgccatttacaatctttttattaatcaatgataaaacaaatctatcagccatgactgctcgcaattcttctataagatctaatgaaagtgatactctaccgggacgttccgtgtgcatgtaaccaacatagggatctaaccctacaacctctagcgctgatgtaatttgagttgtaagcaatgtatacgtaaacgacaacattgcatttacattatcaagaggcggacgccgatttctcccttgaaagaaaaaatctttcttttgttgtaaaatcaactcatcaaatacgccaaaatatatacttgctgcttcaccttcatatcctcttaactgattcatagactgtgaattttggatataatcaagaaattctttcagttttatagatgctttttttaccttatccacatctatctgcattgaatgatctctaattgctctttctagaacccatcttgaattatacacttttccaagaatacagttttttgcgatttccaggcactttatatcttcactactgctttggaattgttgtttccttagcacgacattccccttaactttgcctgaaactcttgcaagaaattttccctgtggtgtcagataacaaagagaaatatttctatccgcacaagctcccattaatgccggacttgttcctctatatccaaatgaaattattgcttcgagattgtgtaaaggtaatctgcctatttcatttttatcatcatatacaacaacattttctccatccaaccccagataactattttccgatgtaacatacaatgtattcaataatttcttcataacgtttcccccagcatcttattgatatacgatttcaccgaaccacttttatcaatctttggcatacaaatatcttttaaagagcaagatacacaccttttcgacgttttgaccttaggtgtataatttcgatcataataatcatgcatttctccaaatatttttttcacttcatcccgaagttcatctgtaaacactatcggtttgcgtcttcttgtctcaccataaaatatagcaccctccgttatttttgttgaaaacatttcttccagacacatagcctgcgccattagctgaagttcatcttcgtttgacgctttgggtttcccctttttgtactcaattggatataatgaataggttccacgatgtccatagagcttcactccatcttcacatttgtgaaattcaacaatatcacactccccactcacacccat

SEQ ID NO: 1120 - DNA, 4000 bp, Escherichia coli
  misc_feature (2)..(2): n is a, c, g, or t
  misc_feature (5)..(5): n is a, c, g, or t
  misc_feature (10)..(13): n is a, c, g, or t
  misc_feature (15)..(18): n is a, c, g, or t
  misc_feature (21)..(22): n is a, c, g, or t
  misc_feature (24)..(24): n is a, c, g, or t
  misc_feature (26)..(32): n is a, c, g, or t
  misc_feature (36)..(36): n is a, c, g, or t
  misc_feature (39)..(39): n is a, c, g, or t
  misc_feature (41)..(41): n is a, c, g, or t
  misc_feature (43)..(47): n is a, c, g, or t
  misc_feature (49)..(53): n is a, c, g, or t
  misc_feature (56)..(58): n is a, c, g, or t
  misc_feature (61)..(61): n is a, c, g, or t
  misc_feature (63)..(64): n is a, c, g, or t
  misc_feature (67)..(67): n is a, c, g, or t
  misc_feature (69)..(70): n is a, c, g, or t
  misc_feature (72)..(75): n is a, c, g, or t
  misc_feature (78)..(78): n is a, c, g, or t
  misc_feature (81)..(81): n is a, c, g, or t
  misc_feature (83)..(85): n is a, c, g, or t
  misc_feature (88)..(88): n is a, c, g, or t
  misc_feature (91)..(98): n is a, c, g, or t
  misc_feature (102)..(107): n is a, c, g, or t
  misc_feature (110)..(111): n is a, c, g, or t
  misc_feature (114)..(114): n is a, c, g, or t
  misc_feature (120)..(120): n is a, c, g, or t
  misc_feature (122)..(122): n is a, c, g, or t
  misc_feature (126)..(126): n is a, c, g, or t
  misc_feature (128)..(128): n is a, c, g, or t
  misc_feature (132)..(137): n is a, c, g, or t
  misc_feature (139)..(139): n is a, c, g, or t
  misc_feature (141)..(144): n is a, c, g, or t
  misc_feature (146)..(153): n is a, c, g, or t
  misc_feature (156)..(157): n is a, c, g, or t
  misc_feature (159)..(162): n is a, c, g, or t
  misc_feature (164)..(166): n is a, c, g, or t
  misc_feature (168)..(168): n is a, c, g, or t
  misc_feature (170)..(170): n is a, c, g, or t
  misc_feature (173)..(173): n is a, c, g, or t
  misc_feature (175)..(177): n is a, c, g, or t
  misc_feature (179)..(180): n is a, c, g, or t
  misc_feature (182)..(182): n is a, c, g, or t
  misc_feature (184)..(195): n is a, c, g, or t
  misc_feature (198)..(200): n is a, c, g, or t
  misc_feature (203)..(212): n is a, c, g, or t
  misc_feature (214)..(214): n is a, c, g, or t
  misc_feature (216)..(216): n is a, c, g, or t
  misc_feature (218)..(220): n is a, c, g, or t
  misc_feature (225)..(225): n is a, c, g, or t
  misc_feature (229)..(229): n is a, c, g, or t
  misc_feature (233)..(233): n is a, c, g, or t
  misc_feature (238)..(238): n is a, c, g, or t
  misc_feature (240)..(244): n is a, c, g, or t
  misc_feature (246)..(257): n is a, c, g, or t
  misc_feature (261)..(261): n is a, c, g, or t
  misc_feature (263)..(267): n is a, c, g, or t
  misc_feature (270)..(273): n is a, c, g, or t
  misc_feature (276)..(277): n is a, c, g, or t
  misc_feature (281)..(281): n is a, c, g, or t
  misc_feature (284)..(284): n is a, c, g, or t
  misc_feature (289)..(289): n is a, c, g, or t
  misc_feature (292)..(292): n is a, c, g, or t
  misc_feature (295)..(298): n is a, c, g, or t
  misc_feature (300)..(300): n is a, c, g, or t
  misc_feature (302)..(302): n is a, c, g, or t
  misc_feature (304)..(306): n is a, c, g, or t
  misc_feature (308)..(310): n is a, c, g, or t
  misc_feature (312)..(316): n is a, c, g, or t
  misc_feature (319)..(319): n is a, c, g, or t
  misc_feature (321)..(321): n is a, c, g, or t
  misc_feature (326)..(331): n is a, c, g, or t
  misc_feature (334)..(336): n is a, c, g, or t
  misc_feature (338)..(342): n is a, c, g, or t
  misc_feature (345)..(346): n is a, c, g, or t
  misc_feature (348)..(353): n is a, c, g, or t
  misc_feature (355)..(356): n is a, c, g, or t
  misc_feature (358)..(358): n is a, c, g, or t
  misc_feature (360)..(363): n is a, c, g, or t
  misc_feature (365)..(365): n is a, c, g, or t
  misc_feature (368)..(368): n is a, c, g, or t
  misc_feature (370)..(370): n is a, c, g, or t
  misc_feature (372)..(372): n is a, c, g, or t
  misc_feature (376)..(385): n is a, c, g, or t
  misc_feature (387)..(388): n is a, c, g, or t
  misc_feature (393)..(396): n is a, c, g, or t
  misc_feature (400)..(400): n is a, c, g, or t
  misc_feature (403)..(403): n is a, c, g, or t
  misc_feature (407)..(408): n is a, c, g, or t
  misc_feature (411)..(416): n is a, c, g, or t
  misc_feature (418)..(423): n is a, c, g, or t
  misc_feature (426)..(427): n is a, c, g, or t
  misc_feature (1095)..(1095): n is a, c, g, or t
  misc_feature (1098)..(1098): n is a, c, g, or t
  misc_feature (1257)..(1257): n is a, c, g, or t
  misc_feature (1854)..(1854): n is a, c, g, or t
  misc_feature (1991)..(1991): n is a, c, g, or t
  misc_feature (2320)..(2320): n is a, c, g, or t
  misc_feature (2797)..(2797): n is a, c, g, or t
  misc_feature (2977)..(2977): n is a, c, g, or t
  misc_feature (3130)..(3130): n is a, c, g, or t
  misc_feature (3154)..(3154): n is a, c, g, or t
  misc_feature (3163)..(3163): n is a, c, g, or t
  misc_feature (3198)..(3198): n is a, c, g, or t
  misc_feature (3313)..(3313): n is a, c, g, or t
gnttnaaaannnntnnnnggnntngnnnnnnntttnggntngnnnnnannnnnttnnnttntnnaananntnnnnttnttncnnnaanccnnnnnnnnaaannnnnnggnnttntttttnantttngnaaannnnnngncnnnntnnnnnnnnaanncnnnnannnantnaanannnanngnannnnnnnnnnnnttnnnccnnnnnnnnnnancnannnaaaanaaanaaanaaaanannnnncnnnnnnnnnnnnaaangnnnnnttnnnnggnntttnaanaaaanaanaannnntnangnnnannncnnnnnccntnaaaannnnnnaannngnnnnnaannannnnnnanncntnnnnanttnantnaaannnnnnnnnnannttttnnnnaaanaanaaannccnnnnnntnnnnnnggnnttttttttgtagcgaggagcagacttgaactgccgacctctgggttatgaatccagtgctctaaccagctgagctacctcgccaaatgttactggttgtgctttgttatgcattatgtataccaaagcggctgcaaagataaaaacaaaataatgtagggcaaacaatccaccattttttattctattttatttctgttaaaatttctgaagaaataaaccgtacatttgtcgctcattaagaataggttcttgcctattcttttaacattatttatgtcatttcaatcactagggctttctgatgccttgcttaaagcaattagcaaaaaaggatacactacaccaagtccaattcaacaaaaagcaatccccaaaatacttgacggtagagacgttttagcctctgctcaaactggaacaggaaaaactgctggctttacattaccaatgctacaacagtttttagctaaacccggccagcatcaaggaagaagaaaaataaaatctttaatcttaactccaactagagaacttgctgcgcaggtacttgaagatgttaagacctactcagagtttacagatcttaaaagtacggtagtatttggtggcgttaacgccaatcctcaaataaaaacactgcgccaaggcgtggatatattggtagcnacncctggtaggttactagatttgcacaatcaaggtgttattaatttttctggaattcagttcttggttttggatgaggcagacagaatgctagacatgggttttttaagagacataaaaagaattttagcgctgttgccaagtaaacgccaaaacctgttnttttctgcaactttttcaaaagaaatcaaaacccttgcaaatagctttttaaataatcctgctatggtggaggcagctccacaaaatacaactgcagagaaagtagatcaaataatttacagaactaacaaaggcttaaaaactaatcttgtaatcaaactcataacggaaggaaactggaatcaagtattggtatttactagaactaaacatggcgccaacaagctatcacaaaaattagaaaaagcaaacattaaagctgcggccatacacggtaataaaagtcagggagcaagaacaagagcactcgctggttttaaagagggtagcatatctgttttggtagctacagatatcgcagcacgcgggcttgatattccattgcttcctcatgtaataaactttgagttgcctaacataccggaagattatgttcacagaataggacgtacaggtagggcgggagccagtggaaaagcaatttccatagtaagcgttgatgaatatgcttacgcaagaggtatagaaaagttgcttaacattaagcttgaaagcactgtaatacctggttttgaaccaaccgaatcactacatgangtagaagctaaaaaagcagaaaacaaagctgctcataatagaggaagacgcaacaataatcgttctcaaccaagttcatcttctcaagatggtgccaaaaagagacgtaaatttagaagatagtatactgtcatagnaataagaatattctattactgccagatattatttcttaggcgtaaataataggtttctttcttttggtttttatatttaatatctatattggactaactaacaaacaacaatggaagaaaaaataaaatatgaaatggaaattccaatacaagtttccccttcattattgtacacgtatatatctacaccatctggactctctgaatggtatgcagataacgtaaactctagaggagaaaattttgaatttatttgggatggtgccgaagaaaaagctgttttgctaacaaaaaagaacgccgaacgaattaaatttaggtgggatgtngatgcaggtacagattattattttgaattgcgtattcaagtagatgagattaccaaagatgtttcactgatgatcacagactttgctgaggatggtgaagttgaagaggggaaaatgctttgggaaaacatggtttctgagctaaaacaaatattgggatcaacctaaaaaataaatatagatactcgtatctttgtgccactctataataaattagagtggcatttttttatgataaatttaaatggtaccattctcgaaaagcacaaggcagctatatctatttctaatagagggttaaattatggcgacgcgctttttgaaaccctccgcgttagcgggggtaaaatttatttttgggaggatcattactttaggctaatggcctctatgcgtatattacgcatggaaattcctatgaattttactcaagaatacttagagaagcaaattttagcaaccatagaggctaacggngctataactggggcctatagagttaaaattcttgtatggcgccaagaaggtggtttttatagcccaacaattaacgaaattcaattttccgtagcgtgtagtgatttacaaaatcctttttacttattaaggcaaaatcagtacgaagtagaactatttaaggatcattacattacatcnggactactctcaacattaaaaacaaataataaagtcataaacgttttgggcagtatttatgctaaagaaaataagtatgataattgcttacttttgaatgaaaaaaagcaaattgtagaagccttaaacggaaatatttttttagtaaaaggngatactataaaaaccccaccactnaaagatggntgtttaaaaggcataatgcgtaaacaaattctcgncatcctggctgatttgtacgattatgatgtgcaagaagtatctatatcaccttttgaattgcaaaaggccgatgaaatgtttgtcaccaacgtaattacaggaattcaatctatnacaaagtatagaaagaaacaatacaccaacattatagcaaaagaattattgggcaagcttaatgcaaaagccagactcggataatcttgttacataaacaagatatttaattgtaagaagggttttggggggcgttagaccacaacatgtagttgcctccaagttctaacattttttctttccacagattgttattgttattaccaatgatgttgtttttgtagtcatttggtgcaaccacccagctatttaattcaagctcctggtctagttgttgtttagaccaaccagaataacccaagaaaaaacgtatctgtgattgagttagtttgtcctgtattagcaatttagagatagctttaaagtctcctccccaaaagataccttgggatatttcaacacttccaggaattagttctggtattttatgaataaagtacagattatcttgctctactggaccaccgttgtaaactggtaggttagagttaatctcaggtataaagtctttaagagtatattcaagtggtttgttgagaataaaacccacagaaccattttctgtattatactctgtcaataatataacagatctattaaaggacacatctccaattatggatggctttgcaactagtaaatgacctttatcgggtttaagtagtgtcattgttggtggttaggtta

SEQ ID NO: 1121 - DNA, 4000 bp, Escherichia coli
accaccaccgatagcttctgaaacacggttaccgaattccaaaataagcgcttgtggcagacgcgcaatgataccaatcataatgataatagagataccgtttccgacacctttatccgtaatacgctcaccgagccaaagaatgaacattgaaccagctgcaagaataattgtagctggaatcataaatgtagtccaatcaatacctgatgctaacgcaccagcggcctgcatttttaagttcatcaggtaagacggtgcctgaaacagtaggatcactactgtcaggacacgcgtataccaatttatcttcttatggccactctcgccttcacgctgcatcttctgaaaataaggtacagcgacagcaaggagctgcataacgatagaagctgagatgtatggcataattcctaatgcgaagattgacgcatgagaaaatgcaccaccggagaacatgtccaaaagtgacataagaccgcccttggtctgtgcctgcaatttttccaacagggtaggattgatgccaggaagcaccacaaacgacccaaaccggtaaatagctgtgaacagaatagtaatgagaagtcgctgacgcaaatcctcaattttccaacagttcttcagtgtctcaataaactttttcattaacttagattatagttgtgttaccacctactgccttgatagcctcttcagcagtcttagagaaggcatttgctgaaacctccaacttagccttcaattcaccattaccgagaaccttaacaagttccttaccattggtaagtccagcagccttaagctcctcaacaccaatcttagtaagattgttcttctcagcaagtgcctgaagagtagaaagatttacagcgaaatattccttgtggttgatgttcttgaaaccagccttcggtacacgacgctggagaggcatctgaccaccctcaaagccaatcttcttcttataaccagaacgtgactttgcacccttatgaccacgagtagaagtaccaccgagtccagaacctggaccacgaccaatacgacgacgtgaatgtgtagagccaacagctggtttcaaattatttaatttcataattactgttttctttaaaagattaattaatcaattactgataccaggtgatgcaccttacggatcatacctcggcagcttggagtatcctctacctcaacaacctgagaaatcttacgaagtcccaatgcctgcaaagtttccttctggtccttaggagcaccaatacggctcttaatctgcttaatcttaattgttgccataatttaatacctcctaaaattaaccgttaaatactttatccatgctaataccacgctcaccagcgattgtatatgcgtcacgcatatcagcgagtgcagcgatagtagcctttacaaggttatgagggttagaagagccctttgactttgcaatcacgtcagtaacacctgcgctctcaagaacagcacgcatagcaccaccggccttcaaaccagtaccggcagcagctggcttaaggagaacatgagcaccgctaaagcgagcctctgcctcatgaggaacagtacccttcaaaacaggaaccttaacaaggttcttctttgctgaatctgtacccttctggatagcagcagtaacctcaccagccttaccaagaccccagccaataacgcccttaccgtcacctacaacgacgatagctgcgaatgtgaaagtacgaccaccctttgtaaccttagttacacggttgatagcaaccaagcgatctttcagttctacatcactatttacttttactctattcattgccataatcgtttagaatttaagtcctccctcacgtgcagcatcagccaaagcctgtacacgtccgtgatagagataaccgttacggtcaaaaacaacctgctctacgccagcagccttagcatgctcagcaacgagtgcacctaccttcttagcctgttcaatcttagccatcttatcaaggccaagtgaagaagcagaagcgagtgttgttcctgtcagatcgttaataacctgtgcataaatctgcttattactgcggaaaacgctcaaacgtgggcgctcagcagtaccgttcacactcttacgaatgcggaactttatcttaattcttctttgttctttctttgttgtcataatcgtaatgatgtattaaagttacttagctgcagctgtcttaccagactttctgcgaataacctcaccctggaacaggacacccttacccttgtaaggctcaggcttacggaaagaacgaatctttgcacagatgagaccaagcagctgcttgtcagctgattcaagagtgatgattggattctggttacgctcgctctttgtctcaaccttaacttctgaaggaagctgaataaagattgggtgagtataaccaagagagaactctaccaagttaccctggttagaaacacgataacctacaccaacaagttccaatgtctttttgtaaccctcacttacaccaacaaccatattgttaacaagtgaacgataaagaccgtggaaagcctgcttctgcttgtagtttactgggctattctcatcaatttcgaatgttacctgaccgtcctcgatgatagtcttaatagaagaatctaccttctgagaaagttcacccttaggaccctttactgtaacaacaccattgttaagagcaactgtaacgccagctggaacactaattggtaattttcctattcttgacatattcaatcctccaattaataaacatagcaaagaacctcaccaccgatcttctctgcagcagcttccttgtctgtcattacacctttagacgtggaaaggatagcaattccaagtccgttaattactctcggcatgtctttgtaaccagtatactggcgaagacctggggtagaaacacgcttcaacttcttgatagcgctctgctttgttacaggatcgtacttaagtgcgaccttgattgaaccttggggaccatcctcaatgaacttatagttcaagatgtaacccttctcgaagagaatcttagtaatagacttcttcaagttagacgcaggaacctcaacaacacggtgatgagccatgattgcgtttctgagtcttgtcagataatctgctattggatctgtcataaaaatataaagtttaattaatcgggactaccccgacaatattaaaaaatcgcttgaaagcggataatgaactgcaaagatacaaaataaatttcacaattcactatccgcgtcgatatatttgcttaccagcttgccttcttaactcctggaatgagtccctgagatgccatctcacggaactgaatacgagagagaccgaactgacgaatgtaaccctttggacgtcctgttatcttgcaacgattgtgcaaacggattggattagcattcttaggaatagactgcaacttgcgagcagcctcataagcctcttcaggatcatttgaagtagcgataatcttcttcagagcagcgcgtttctcagcatagcgagcaacaagctttgcacgctttacctcgcgagctttcattgattcttttgccatatcaattaatcgtttttagcattcttgaatggaagtccgaagcccttcagcaaagcataaccctcttcatcagtcttagctgatgtaacgaaggtaatgttcataccctggatgcggtcaacctgatcgatattaatctctgggaaaataatctgctcggtgataccgagagtataatttccacgaccatcgaacttgctctcgatacccttgaagtcacggatacgtggcaaagatacgcgaacgagtttctcgaggaactcatacatacgctcacgacgcagagttaccataacgccaataggcatcttcttacgcaacttgaagtttgcaatatcctttttagaatatgttgcaacagccttctgacctgtgatagaagaaatctc

SEQ ID NO: 1122 - DNA, 4000 bp, Escherichia coli
  misc_feature (1045)..(1045): n is a, c, g, or t
  misc_feature (1099)..(1099): n is a, c, g, or t
  misc_feature (1108)..(1108): n is a, c, g, or t
  misc_feature (1986)..(1987): n is a, c, g, or t
  misc_feature (1989)..(1991): n is a, c, g, or t
  misc_feature (2056)..(2056): n is a, c, g, or t
  misc_feature (2070)..(2070): n is a, c, g, or t
  misc_feature (2276)..(2277): n is a, c, g, or t
  misc_feature (2281)..(2281): n is a, c, g, or t
  misc_feature (2284)..(2285): n is a, c, g, or t
  misc_feature (2290)..(2292): n is a, c, g, or t
  misc_feature (2294)..(2296): n is a, c, g, or t
  misc_feature (2299)..(2300): n is a, c, g, or t
  misc_feature (2304)..(2305): n is a, c, g, or t
  misc_feature (2308)..(2311): n is a, c, g, or t
  misc_feature (2313)..(2313): n is a, c, g, or t
  misc_feature (2318)..(2318): n is a, c, g, or t
  misc_feature (2320)..(2329): n is a, c, g, or t
  misc_feature (2331)..(2334): n is a, c, g, or t
  misc_feature (2336)..(2337): n is a, c, g, or t
  misc_feature (2339)..(2340): n is a, c, g, or t
  misc_feature (2342)..(2346): n is a, c, g, or t
  misc_feature (2348)..(2349): n is a, c, g, or t
  misc_feature (2351)..(2354): n is a, c, g, or t
  misc_feature (2356)..(2361): n is a, c, g, or t
  misc_feature (2364)..(2366): n is a, c, g, or t
  misc_feature (2368)..(2368): n is a, c, g, or t
  misc_feature (2370)..(2370): n is a, c, g, or t
  misc_feature (2372)..(2372): n is a, c, g, or t
  misc_feature (2375)..(2379): n is a, c, g, or t
  misc_feature (2382)..(2383): n is a, c, g, or t
  misc_feature (2385)..(2389): n is a, c, g, or t
  misc_feature (2391)..(2391): n is a, c, g, or t
  misc_feature (2393)..(2395): n is a, c, g, or t
  misc_feature (2399)..(2409): n is a, c, g, or t
  misc_feature (2411)..(2412): n is a, c, g, or t
  misc_feature (2414)..(2416): n is a, c, g, or t
  misc_feature (2418)..(2418): n is a, c, g, or t
  misc_feature (2420)..(2426): n is a, c, g, or t
  misc_feature (2429)..(2436): n is a, c, g, or t
  misc_feature (2438)..(2438): n is a, c, g, or t
  misc_feature (2440)..(2448): n is a, c, g, or t
  misc_feature (2450)..(2451): n is a, c, g, or t
  misc_feature (2453)..(2457): n is a, c, g, or t
  misc_feature (2460)..(2461): n is a, c, g, or t
  misc_feature (2463)..(2464): n is a, c, g, or t
  misc_feature (2466)..(2466): n is a, c, g, or t
  misc_feature (2468)..(2472): n is a, c, g, or t
  misc_feature (2475)..(2476): n is a, c, g, or t
  misc_feature (2478)..(2480): n is a, c, g, or t
  misc_feature (2482)..(2483): n is a, c, g, or t
  misc_feature (2485)..(2488): n is a, c, g, or t
  misc_feature (2490)..(2490): n is a, c, g, or t
  misc_feature (2492)..(2494): n is a, c, g, or t
  misc_feature (2496)..(2496): n is a, c, g, or t
  misc_feature (2498)..(2502): n is a, c, g, or t
  misc_feature (2504)..(2507): n is a, c, g, or t
  misc_feature (2512)..(2514): n is a, c, g, or t
  misc_feature (2516)..(2516): n is a, c, g, or t
  misc_feature (2518)..(2521): n is a, c, g, or t
  misc_feature (2523)..(2525): n is a, c, g, or t
  misc_feature (2528)..(2531): n is a, c, g, or t
  misc_feature (2533)..(2540): n is a, c, g, or t
  misc_feature (2542)..(2548): n is a, c, g, or t
  misc_feature (2550)..(2553): n is a, c, g, or t
  misc_feature (2555)..(2558): n is a, c, g, or t
  misc_feature (2563)..(2564): n is a, c, g, or t
  misc_feature (2566)..(2569): n is a, c, g, or t
  misc_feature (2571)..(2572): n is a, c, g, or t
  misc_feature (2574)..(2574): n is a, c, g, or t
  misc_feature (2576)..(2576): n is a, c, g, or t
  misc_feature (2578)..(2583): n is a, c, g, or t
  misc_feature (2585)..(2589): n is a, c, g, or t
  misc_feature (2591)..(2591): n is a, c, g, or t
  misc_feature (2593)..(2593): n is a, c, g, or t
  misc_feature (2595)..(2600): n is a, c, g, or t
  misc_feature (2602)..(2603): n is a, c, g, or t
  misc_feature (2605)..(2605): n is a, c, g, or t
  misc_feature (2607)..(2608): n is a, c, g, or t
  misc_feature (2610)..(2610): n is a, c, g, or t
  misc_feature (2612)..(2622): n is a, c, g, or t
  misc_feature (2625)..(2625): n is a, c, g, or t
  misc_feature (2627)..(2628): n is a, c, g, or t
  misc_feature (2630)..(2633): n is a, c, g, or t
  misc_feature (2635)..(2637): n is a, c, g, or t
  misc_feature (2639)..(2640): n is a, c, g, or t
  misc_feature (2642)..(2643): n is a, c, g, or t
  misc_feature (2645)..(2646): n is a, c, g, or t
  misc_feature (2648)..(2649): n is a, c, g, or t
  misc_feature (2651)..(2659): n is a, c, g, or t
  misc_feature (2661)..(2662): n is a, c, g, or t
  misc_feature (2664)..(2668): n is a, c, g, or t
  misc_feature (2671)..(2672): n is a, c, g, or t
  misc_feature (2674)..(2675): n is a, c, g, or t
  misc_feature (2681)..(2681): n is a, c, g, or t
  misc_feature (2683)..(2691): n is a, c, g, or t
  misc_feature (2693)..(2697): n is a, c, g, or t
  misc_feature (2699)..(2700): n is a, c, g, or t
  misc_feature (2702)..(2703): n is a, c, g, or t
  misc_feature (2705)..(2705): n is a, c, g, or t
  misc_feature (2707)..(2715): n is a, c, g, or t
  misc_feature (2717)..(2721): n is a, c, g, or t
  misc_feature (2723)..(2723): n is a, c, g, or t
  misc_feature (2725)..(2729): n is a, c, g, or t
  misc_feature (2731)..(2733): n is a, c, g, or t
  misc_feature (2735)..(2739): n is a, c, g, or t
  misc_feature (2741)..(2743): n is a, c, g, or t
  misc_feature (2745)..(2745): n is a, c, g, or t
  misc_feature (2747)..(2748): n is a, c, g, or t
  misc_feature (2750)..(2751): n is a, c, g, or t
  misc_feature (2753)..(2753): n is a, c, g, or t
  misc_feature (2755)..(2761): n is a, c, g, or t
  misc_feature (2765)..(2769): n is a, c, g, or t
  misc_feature (2771)..(2774): n is a, c, g, or t
  misc_feature (2776)..(2777): n is a, c, g, or t
  misc_feature (2779)..(2781): n is a, c, g, or t
  misc_feature (2783)..(2783): n is a, c, g, or t
  misc_feature (2785)..(2786): n is a, c, g, or t
  misc_feature (2788)..(2790): n is a, c, g, or t
  misc_feature (2792)..(2795): n is a, c, g, or t
  misc_feature (2797)..(2802): n is a, c, g, or t
  misc_feature (2804)..(2804): n is a, c, g, or t
  misc_feature (2806)..(2810): n is a, c, g, or t
  misc_feature (2814)..(2816): n is a, c, g, or t
  misc_feature (2819)..(2820): n is a, c, g, or t
  misc_feature (2822)..(2823): n is a, c, g, or t
  misc_feature (2825)..(2829): n is a, c, g, or t
  misc_feature (2831)..(2832): n is a, c, g, or t
  misc_feature (2835)..(2840): n is a, c, g, or t
  misc_feature (2843)..(2847): n is a, c, g, or t
  misc_feature (2850)..(2850): n is a, c, g, or t
  misc_feature (2852)..(2852): n is a, c, g, or t
  misc_feature (2854)..(2856): n is a, c, g, or t
  misc_feature (2858)..(2865): n is a, c, g, or t
  misc_feature (2867)..(2868): n is a, c, g, or t
  misc_feature (2870)..(2876): n is a, c, g, or t
  misc_feature (2878)..(2882): n is a, c, g, or t
  misc_feature (2884)..(2892): n is a, c, g, or t
  misc_feature (2894)..(2895): n is a, c, g, or t
  misc_feature (2897)..(2898): n is a, c, g, or t
  misc_feature (2900)..(2900): n is a, c, g, or t
  misc_feature (2902)..(2907): n is a, c, g, or t
  misc_feature (2909)..(2910): n is a, c, g, or t
  misc_feature (2912)..(2913): n is a, c, g, or t
  misc_feature (2915)..(2915): n is a, c, g, or t
  misc_feature (2917)..(2919): n is a, c, g, or t
  misc_feature (2921)..(2921): n is a, c, g, or t
  misc_feature (2923)..(2924): n is a, c, g, or t
  misc_feature (2926)..(2927): n is a, c, g, or t
  misc_feature (2929)..(2932): n is a, c, g, or t
  misc_feature (2935)..(2949): n is a, c, g, or t
  misc_feature (2951)..(2951): n is a, c, g, or t
  misc_feature (2954)..(2955): n is a, c, g, or t
  misc_feature (2959)..(2965): n is a, c, g, or t
  misc_feature (2968)..(2969): n is a, c, g, or t
  misc_feature (2971)..(2972): n is a, c, g, or t
  misc_feature (2974)..(2983): n is a, c, g, or t
  misc_feature (2985)..(2985): n is a, c, g, or t
  misc_feature (2987)..(2991): n is a, c, g, or t
  misc_feature (2993)..(2993): n is a, c, g, or t
  misc_feature (2996)..(3000): n is a, c, g, or t
  misc_feature (3003)..(3003): n is a, c, g, or t
  misc_feature (3005)..(3006): n is a, c, g, or t
  misc_feature (3008)..(3015): n is a, c, g, or t
  misc_feature (3017)..(3021): n is a, c, g, or t
  misc_feature (3023)..(3024): n is a, c, g, or t
  misc_feature (3026)..(3028): n is a, c, g, or t
  misc_feature (3030)..(3036): n is a, c, g, or t
  misc_feature (3038)..(3046): n is a, c, g, or t
  misc_feature (3048)..(3054): n is a, c, g, or t
  misc_feature (3057)..(3057): n is a, c, g, or t
  misc_feature (3059)..(3062): n is a, c, g, or t
  misc_feature (3064)..(3064): n is a, c, g, or t
  misc_feature (3067)..(3067): n is a, c, g, or t
  misc_feature (3069)..(3072): n is a, c, g, or t
  misc_feature (3074)..(3078): n is a, c, g, or t
  misc_feature (3080)..(3081): n is a, c, g, or t
  misc_feature (3083)..(3084): n is a, c, g, or t
  misc_feature (3087)..(3089): n is a, c, g, or t
  misc_feature (3092)..(3099): n is a, c, g, or t
  misc_feature (3102)..(3107): n is a, c, g, or t
  misc_feature (3109)..(3114): n is a, c, g, or t
  misc_feature (3116)..(3116): n is a, c, g, or t
  misc_feature (3118)..(3118): n is a, c, g, or t
  misc_feature (3120)..(3122): n is a, c, g, or t
  misc_feature (3124)..(3125): n is a, c, g, or t
  misc_feature (3127)..(3129): n is a, c, g, or t
  misc_feature (3131)..(3132): n is a, c, g, or t
  misc_feature (3136)..(3141): n is a, c, g, or t
  misc_feature (3143)..(3143): n is a, c, g, or t
  misc_feature (3145)..(3150): n is a, c, g, or t
  misc_feature (3152)..(3156): n is a, c, g, or t
  misc_feature (3158)..(3158): n is a, c, g, or t
  misc_feature (3160)..(3166): n is a, c, g, or t
  misc_feature (3169)..(3170): n is a, c, g, or t
  misc_feature (3172)..(3174): n is a, c, g, or t
  misc_feature (3177)..(3182): n is a, c, g, or t
  misc_feature (3184)..(3189): n is a, c, g, or t
  misc_feature (3191)..(3195): n is a, c, g, or t
  misc_feature (3197)..(3201): n is a, c, g, or t
  misc_feature (3204)..(3204): n is a, c, g, or t
  misc_feature (3206)..(3207): n is a, c, g, or t
  misc_feature (3209)..(3210): n is a, c, g, or t
  misc_feature (3212)..(3215): n is a, c, g, or t
  misc_feature (3217)..(3218): n is a, c, g, or t
  misc_feature (3221)..(3225): n is a, c, g, or t
  misc_feature (3227)..(3228): n is a, c, g, or t
  misc_feature (3230)..(3232): n is a, c, g, or t
  misc_feature (3234)..(3237): n is a, c, g, or t
  misc_feature (3239)..(3250): n is a, c, g, or t
  misc_feature (3252)..(3254): n is a, c, g, or t
  misc_feature (3256)..(3259): n is a, c, g, or t
  misc_feature (3261)..(3261): n is a, c, g, or t
  misc_feature (3263)..(3263): n is a, c, g, or t
  misc_feature (3266)..(3269): n is a, c, g, or t
  misc_feature (3271)..(3274): n is a, c, g, or t
  misc_feature (3276)..(3277): n is a, c, g, or t
  misc_feature (3279)..(3279): n is a, c, g, or t
  misc_feature (3281)..(3284): n is a, c, g, or t
  misc_feature (3965)..(3966): n is a, c, g, or t
  misc_feature (3970)..(3973): n is a, c, g, or t
  misc_feature (3976)..(3977): n is a, c, g, or t
  misc_feature (3979)..(3979): n is a, c, g, or t
  misc_feature (3983)..(3983): n is a, c, g, or t
  misc_feature (3985)..(3985): n is a, c, g, or t
  misc_feature (3987)..(3991): n is a, c, g, or t
  misc_feature (3993)..(3994): n is a, c, g, or t
  misc_feature (3996)..(3996): n is a, c, g, or t
  misc_feature (3999)..(4000): n is a, c, g, or t
gtaataataaagagtgtgacacgtgtgctcggggcactaatggagtaacccaaaattctcttgaagtcagtgaatccattatttccaccaaagcccgtttcatttctgaagaacaaaagcatggcagcgtatgtgagggcttgtgtaatgatggagaaatacactcctttaatcctggatcggaaagcaaagtatccgaatatccaagaaataacaccaggcaccaaaattaacatcatgagcatccaccaaaaatgctcgctacctttccagaaccaaggcaaatctttccagtctaagaaaaccatgaagtcgggtaattcacttttgtaaacaccgtcagtaccgatctgacgcatgagatacatgcccatgatgtacccaccgatggcgaagaataagccatggcccagactcaagattccgcagtagccccaaactaagtcgagcgctaatgccgctatcgcaaagcacatgatcttgccaattaaagtcagcgcataagctgacatataaaacatgctggtatcgggaaccaacaatgagaagattggcacaccaatcaatacgcacaacgtaagcgcagccaatgcaatataggatcgcttgctcagaatggattcacgctctggcaccaaaagactaaagctggatgaaggggcaagttttctaatatccatactaatcaacgctcctgccttttaatgcgaagaggccttgaggacgtctctggatgaagatgatgatgaacactaagatagcaatcttggccaatacagcgccgataaagggttctagtagcttgctcgtaatgccaagtccaaatgcgccatatattgtgccggcaagttgaccgacaccaccaagcactaccaccatgaatgaatcgacgatatagctttgacctagatcaggtccaacgttaccgatttgtgaaagtgcaaccccacctaatccagcaatgcctgccccaaaggcaaaagcatacatatctacgcgaactgttttaacaccaacacaggccgccattgtccgattttgagtnaccgctctaacgaaaagcccaagccgggttttgttaagcactagccaggtaacngcgaccacngcaatcgcaaatccaaaaataatgatgcggttatatggcaccactaaatttggcagtacctgcaaagcgcctgacatccatgtcgggttagcaacttctacgttttgagcaccaaaaatagttctagtcatttggatcattagcaaactaacgccaaatgttgccaacaaagtttctagtgggcggccatataaaaacttaatgaccgttctttcgattaagatgccgaccaaagcggccgcaagaaaggctacaggtagtgcgaatagcaaataccaatccaggtagcctggggcatattgcctaaagaagccctgaacaacataagttgcataagcacccaccatcaagaactcaccatgggccatattaatgacgccaatcaaaccatacgtaatcgctaggcccaatgcacacagcaaaaggatgctgccgtaactaaagccggcaatgacattacctaaaatctcgccactaaactcagatttcttaattttggctagagccttctcggcagcttcctgaactggaccgccctctttagctagcggagccaataaagcagcgacttgagggtcaccactatcacccaataaggcaatagctttcaattttgattcttgattatctgattgcaacgccaatagcgcccaaagcttttctacttttggctttagcactggatcgttttcagttgaaagtaatttttcaaccactggaaaagtatcgggctcaggatccttaatcaaagcatcaacagctttggtacgaatctgtgaatctgtggatgcaagctgcaagcccagcaaagcattatcaaccttgccacgcaattggttgttcaaaattacgtcttgtaattcgtcagattttacggnnannntttgccctgtaagcacatcaacataatgatcgcctttttggacaaccgcaccctgaggtgatagnaacagcacctctgnactcaatgcttgaagaatttctatagcttcaggactatcttctttagataagacttgaactacttttacttttgcatcaaagttttcaccgaataatggctttaaatctgtgactgtaatctttgcaaaaacaaacccacaactcagaagacaaatcgccgaaaggagtggttttagaaaaaaggaggatctcattaagatttttnnaaanccnnccccnnntnnnggnngggnnttnnnntnaaaantnnnnnnnnnnannnngnntnncnnnnntnncnnnnannnnnnggnnncnangnttnnnnnggnntnnnnntngnnntttnnnnnnnnnnntnnannngncnnnnnnnttnnnnnnnncnannnnnnnnngnntnnnnnaanngnngntnnnnnccnntnnntnnannnnancnnntngnnnnntnnnnttttnnncnannnntnnnttnnnnannnnnnnnannnnnnntnnnncnnnnttttnnannnncnncntncnnnnnnannnnncngntnnnnnngnntncnntngnnnnnnnnnnnaangnntnnnngnnncnngnnanntnntnnnnnnnnnannannnnnccnntnntttttncnnnnnnnnntnnnnngnntnntnannnnnnnnnannnnntncnnnnngnnnannnnncnnncnanngnntngnnnnnnncccnnnnnannnntnntnnncnanngnnnannnnannnnnngnannnnntttnnnttnnanncnnnnntnnccnnnnnnttnnnnnaangnannntnnnnnnnncnntnnnnnnngnnnnnannnnnnnnntnncnncntnnnnnnanntnntnannntngnnannannnnttnnnnnnnnnnnnnnncnaanngggnnnnnnnttnntnnannnnnnnnnncntnnnnncnttnnnnnttnannannnnnnnnannnnntnntnnntnnnnnnngnnnnnnnnnannnnnnnccnannnnanccnannnntnnnnncnncnnccnnnttnnnnnnnnaannnnnnannnnnngnantnnntnntnnntnngggnnnnnncngnnnnnnannnnntncnnnnnnnttnntnnnccnnnnnntnnnnnngnnnnnannnnnaancnntnnannnntnnaannnnngnnannncnnnntnnnnnnnnnnnnannncnnnnancnaannnnannnncnncntnnnnttggttagcatttggcgggctttctcggcaaataaaggccagttagaagctgggtcaacaactaccggctctaatttacgacctaaaacaccaccacttttgttgatctgatcaataaccatcaaatccatatctttcagtgatgtttcagaaatagccattgttccagacagtgaatgcaagatacccaccttaattggctccttactttgagccattgctaaatgacttaagcctgtaaaacttaaagccgctgctaaagctgacaacttcaatattgatctacgtttcatatctcacctcttgagtaaattaatcatgtgggcaggaatacctaatgcctacagtcattagagaatggttcaagttggtgcaaatttaacaaatccccaaaagagagcacatgcaccagaaaaaggcataaaaattaggtagatcgcacgatacgagaatatttgctgcggttgcaaatgaaaaagtcagaataccgcagtctaaaagtagttcattgctccaatggcagacctatatgtttattggggttgccatggaggatgtatcaagattgtttgcacaccgactacacattaaagaaaaatgacctagcgttctcacgctaagtcattgattttgttggtgggcccagctggactcgaaccagcgaccaaaggattatgagtnntgtnnnntanncnactncntnnnnnanncnttnn

SEQ ID NO: 1123 - DNA, 4000 bp, Escherichia coli
  misc_feature (1)..(2): n is a, c, g, or t
  misc_feature (4)..(14): n is a, c, g, or t
  misc_feature (16)..(19): n is a, c, g, or t
  misc_feature (21)..(45): n is a, c, g, or t
  misc_feature (47)..(67): n is a, c, g, or t
  misc_feature (69)..(100): n is a, c, g, or t
  misc_feature (102)..(125): n is a, c, g, or t
  misc_feature (127)..(138): n is a, c, g, or t
  misc_feature (140)..(183): n is a, c, g, or t
  misc_feature (185)..(193): n is a, c, g, or t
  misc_feature (195)..(212): n is a, c, g, or t
  misc_feature (214)..(221): n is a, c, g, or t
  misc_feature (224)..(226): n is a, c, g, or t
  misc_feature (230)..(240): n is a, c, g, or t
  misc_feature (242)..(249): n is a, c, g, or t
  misc_feature (252)..(253): n is a, c, g, or t
  misc_feature (255)..(275): n is a, c, g, or t
  misc_feature (277)..(294): n is a, c, g, or t
  misc_feature (296)..(301): n is a, c, g, or t
  misc_feature (303)..(303): n is a, c, g, or t
  misc_feature (305)..(306): n is a, c, g, or t
  misc_feature (308)..(311): n is a, c, g, or t
  misc_feature (313)..(314): n is a, c, g, or t
  misc_feature (316)..(319): n is a, c, g, or t
  misc_feature (321)..(328): n is a, c, g, or t
  misc_feature (330)..(380): n is a, c, g, or t
  misc_feature (382)..(383): n is a, c, g, or t
  misc_feature (385)..(414): n is a, c, g, or t
  misc_feature (416)..(425): n is a, c, g, or t
  misc_feature (427)..(427): n is a, c, g, or t
  misc_feature (429)..(447): n is a, c, g, or t
  misc_feature (449)..(449): n is a, c, g, or t
  misc_feature (451)..(452): n is a, c, g, or t
  misc_feature (454)..(463): n is a, c, g, or t
  misc_feature (467)..(467): n is a, c, g, or t
  misc_feature (469)..(476): n is a, c, g, or t
  misc_feature (479)..(479): n is a, c, g, or t
  misc_feature (482)..(483): n is a, c, g, or t
  misc_feature (485)..(491): n is a, c, g, or t
  misc_feature (493)..(497): n is a, c, g, or t
  misc_feature (499)..(499): n is a, c, g, or t
  misc_feature (502)..(505): n is a, c, g, or t
  misc_feature (512)..(512): n is a, c, g, or t
  misc_feature (515)..(515): n is a, c, g, or t
  misc_feature (519)..(519): n is a, c, g, or t
  misc_feature (521)..(537): n is a, c, g, or t
  misc_feature (539)..(540): n is a, c, g, or t
  misc_feature (543)..(544): n is a, c, g, or t
  misc_feature (546)..(551): n is a, c, g, or t
  misc_feature (557)..(558): n is a, c, g, or t
  misc_feature (560)..(563): n is a, c, g, or t
  misc_feature (567)..(570): n is a, c, g, or t
  misc_feature (574)..(580): n is a, c, g, or t
  misc_feature (586)..(587): n is a, c, g, or t
  misc_feature (592)..(596): n is a, c, g, or t
  misc_feature (598)..(598): n is a, c, g, or t
  misc_feature (600)..(606): n is a, c, g, or t
  misc_feature (611)..(612): n is a, c, g, or t
  misc_feature (615)..(615): n is a, c, g, or t
  misc_feature (617)..(617): n is a, c, g, or t
  misc_feature (619)..(619): n is a, c, g, or t
  misc_feature (621)..(623): n is a, c, g, or t
  misc_feature (625)..(626): n is a, c, g, or t
  misc_feature (628)..(631): n is a, c, g, or t
  misc_feature (633)..(633): n is a, c, g, or t
  misc_feature (635)..(636): n is a, c, g, or t
  misc_feature (638)..(640): n is a, c, g, or t
  misc_feature (643)..(643): n is a, c, g, or t
  misc_feature (645)..(646): n is a, c, g, or t
  misc_feature (649)..(650): n is a, c, g, or t
  misc_feature (656)..(656): n is a, c, g, or t
  misc_feature (659)..(660): n is a, c, g, or t
  misc_feature (671)..(671): n is a, c, g, or t
  misc_feature (677)..(677): n is a, c, g, or t
  misc_feature (857)..(857): n is a, c, g, or t
  misc_feature (1988)..(1988): n is a, c, g, or t
  misc_feature (2417)..(2417): n is a, c, g, or t
  misc_feature (2436)..(2436): n is a, c, g, or t
  misc_feature (2481)..(2481): n is a, c, g, or t
  misc_feature (2775)..(2775): n is a, c, g, or t
  misc_feature (2853)..(2853): n is a, c, g, or t
  misc_feature (3050)..(3050): n is a, c, g, or t
  misc_feature (3147)..(3147): n is a, c, g, or t
  misc_feature (3435)..(3436): n is a, c, g, or t
  misc_feature (3440)..(3441): n is a, c, g, or t
  misc_feature (3444)..(3445): n is a, c, g, or t
  misc_feature (3447)..(3447): n is a, c, g, or t
  misc_feature (3450)..(3451): n is a, c, g, or t
  misc_feature (3453)..(3453): n is a, c, g, or t
  misc_feature (3457)..(3457): n is a, c, g, or t
  misc_feature (3459)..(3459): n is a, c, g, or t
  misc_feature (3462)..(3468): n is a, c, g, or t
  misc_feature (3470)..(3473): n is a, c, g, or t
  misc_feature (3475)..(3478): n is a, c, g, or t
  misc_feature (3481)..(3489): n is a, c, g, or t
  misc_feature (3491)..(3491): n is a, c, g, or t
  misc_feature (3493)..(3493): n is a, c, g, or t
  misc_feature (3495)..(3497): n is a, c, g, or t
  misc_feature (3499)..(3506): n is a, c, g, or t
  misc_feature (3508)..(3512): n is a, c, g, or t
  misc_feature (3514)..(3516): n is a, c, g, or t
  misc_feature (3519)..(3525): n is a, c, g, or t
  misc_feature (3527)..(3531): n is a, c, g, or t
  misc_feature (3533)..(3537): n is a, c, g, or t
  misc_feature (3539)..(3544): n is a, c, g, or t
  misc_feature (3546)..(3551): n is a, c, g, or t
  misc_feature (3553)..(3555): n is a, c, g, or t
  misc_feature (3557)..(3563): n is a, c, g, or t
  misc_feature (3565)..(3566): n is a, c, g, or t
  misc_feature (3568)..(3573): n is a, c, g, or t
  misc_feature (3575)..(3576): n is a, c, g, or t
  misc_feature (3578)..(3586): n is a, c, g, or t
  misc_feature (3588)..(3609): n is a, c, g, or t
  misc_feature (3611)..(3611): n is a, c, g, or t
  misc_feature (3613)..(3614): n is a, c, g, or t
  misc_feature (3616)..(3621): n is a, c, g, or t
  misc_feature (3623)..(3641): n is a, c, g, or t
  misc_feature (3643)..(3650): n is a, c, g, or t
  misc_feature (3652)..(3681): n is a, c, g, or t
  misc_feature (3683)..(3728): n is a, c, g, or t
  misc_feature (3730)..(3745): n is a, c, g, or t
  misc_feature (3747)..(3757): n is a, c, g, or t
  misc_feature (3759)..(3765): n is a, c, g, or t
  misc_feature (3767)..(3780): n is a, c, g, or t
  misc_feature (3782)..(3794): n is a, c, g, or t
  misc_feature (3796)..(3799): n is a, c, g, or t
  misc_feature (3801)..(3817): n is a, c, g, or t
  misc_feature (3819)..(3822): n is a, c, g, or t
  misc_feature (3824)..(3845): n is a, c, g, or t
  misc_feature (3847)..(3897): n is a, c, g, or t
  misc_feature (3899)..(3901): n is a, c, g, or t
  misc_feature (3903)..(3906): n is a, c, g, or t
  misc_feature (3908)..(3965): n is a, c, g, or t
  misc_feature (3967)..(3985): n is a, c, g, or t
  misc_feature (3987)..(3987): n is a, c, g, or t
  misc_feature (3989)..(4000): n is a, c, g, or t
nncnnnnnnnnnnncnnnngnnnnnnnnnnnnnnnnnnnnnnnnnannnnnnnnnnnnnnnnnnnnncnnnnnnnnnnnnnnnnnnnnnnnnnnnnnnnngnnnnnnnnnnnnnnnnnnnnnnnngnnnnnnnnnnnngnnnnnnnnnnnnnnnnnnnnnnnnnnnnnnnnnnnnnnnnnnnnannnnnnnnncnnnnnnnnnnnnnnnnnncnnnnnnnnacnnnacannnnnnnnnnncnnnnnnnnccnncnnnnnnnnnnnnnnnnnnnnncnnnnnnnnnnnnnnnnnnannnnnngngnncnnnncnnannnngnnnnnnnnannnnnnnnnnnnnnnnnnnnnnnnnnnnnnnnnnnnnnnnnnnnnnnnnnncnncnnnnnnnnnnnnnnnnnnnnnnnnnnnnnnannnnnnnnnncntnnnnnnnnnnnnnnnnnnngnannannnnnnnnnnaaanannnnnnnnccnggnncnnnnnnncnnnnngnggnnnnaaaaaanagngaanannnnnnnnnnnnnnnnngnnaannannnnnnaaaaannannnnaaannnngggnnnnnnnaccccnnaaaannnnncngnnnnnnncggcnncancngncnnngnnannnncnanncnnnccncnnccnnaaccgnacnnaaccggaaaancgcggnggcgccctcaccagggcgcctccgcgcacaaaagctaactagctcaccgaaacagccggggaaccctcgggaacatactcgcccgaagcctccatctcagcagcaatacgggtcgcctcttcaatcagagtctcaacgatctgatcctcaggcacagtcttaatgacctcacccttcacnaaaatctggcccttaccgttaccggacgccacacccaggtcagcctcacgagcctcacccggaccgttcaccacgcaacccatcacggcaacacgcagcggaaccttcatgtgctccaggcccttagtcacgttctcagcaagctcccacacgttcacctgcgcacgaccacacgacgggcaagaaacgatatccagcttgcgggggcgaaggttcagcgactccaggatcttggtgcccaccttcacctcctcaaccggaggagcagacagcgacacgcgaatagtatcgccaataccctgagacagcagagtaccgaacgccaccgagctcttaatagtgccctggaacgccggaccagcctcagtcacacccaagtgcaggggccagtcaccgcgctcagccagctgacggtacgcctccaccatcaccacagggtcattatgcttcacagaaatcttgaaatcacggaaaccgtgctcctcaaagagcgaagcctcccacacagcagactcaaccagagcctccggagtagccttaccgtacttctccaacagacgcttatccagcgaaccagcattcacaccaatacgcagagaaacgccgtggtccgaagccatctgagcgatttccttcacctggtcatcgaacttacggatattacccgggttcacacgcacagcaccgcaaccagcctgaatagccgcatacacgtacttcggctggaagtgaatatcagcaatcaccggaatacgggactgcttcgcaataatgggcagagcctccgcatccttatcagtcgggcacgccacacgcacaatatcgcaaccggcagcggtcaactcagcaatctgctgcagagtcgcaccaatgtcgtgggtcttagtggtcgtcatcgactgcaccgaaatcggagattcagaaccaacaccgacagaacccaccttaaactggcgagtcttacgacgcggggacagaaccgcgggagcgggcttcggcataccaaggctgaccgacaaggttttcctccatacatgggttatgaaggacgtacgacgcatccttcgttcaactttttattgtgccactgacgcgaaagaaagcactaatacgggtacccttaccgcgcgnaacaacacactaaaacagggtgatgggcttaacaatatccgccacaatcagaatgacagacatcacaataaacgcgcccgccaccacatacgtcaacggcaacaacttcaccggatcaaacggacccggatccttacgcccagtcaaacgtgcaaagaaacgacgcacaccctcccagagcgcacccaacacgtggccaccatccagaggcagaagcggaatcagattaaacgcaaaaagcatcaaattcatattcgccaccagcgagaccaacatcgcagccttcgccttcacatcaatacggtcagtagccgtcacctcaccggcaatacgactcacaccaaccacagacaccggcgactcaacactacgctcaccaccagtcaccaaagtcaccgtcaactcccacacacgctgcggcaacgacancatcgacgaacccacacgngagagcgtatcgcccaccatcgcaggcacctcagtaatagaaccnggcaccaactcactcgacggcgaaacacccacaaaaccgccgcgagtcgtcgcaatcgaaccatccgcagcacgcgcatactggcccttaccatcagaaaccgggcggatcatctcaaccggagtcaccgacaaatccagacgctgaccattacgctccaccgtcaaagtgctcgggtgagaacccgccgcacgaatcgccgaagacacagcctcccacgaacccgtcgacgcaccattcacagcaaccacacggtcacccacctgcacaccagcagccttcgcaggcgacggngtggacttatccgtacactcgccatagctaatcgaatcatgagtgacattcacgctcggcacgcactcagacaccgcngacaccttattcgtcacctgcgccgtaccaaaaccacaaatcagcacagcagtacacaccacaccaatcagcaggttcatggtcgggccacccagcataatcaccatgcgcttgagcaccggcaacttatagaacaggcggtcctcatcaccgggcttcaggcgctcagcatccgccgcacgcgcctcctcagccanggacgcaaacgggctggtactgcccgaatggccctcctcatggtgctccttcacctcagcagggctcggcgggtacatgccaatcatcgaaatgtanccgcccaacgggatcgccttgaaaccgtactcagtctcgccgcggcggaaagagaacacggtcttaccgaagccaatcatgtactgcgggacgcgcacattgaacagcttcgcgggcaccagatgccccacctcgtgcagggcaatcgagacggcaatagcgattgccatgaggataatgcccacagcgtacagcaggatttccacgctttttctcgtttcggttcggggatacgaagcttctaggatactcgcttagcctgtgaaggcgccctcccccgctttctgnngggnntgnngncgnngngggngngtnnnnnnnannnntnnnncgnnnnnnnnngngnannngnnnnnnnngnnnnngnnnccnnnnnnncnnnnncnnnnncnnnnnntnnnnnncnnncnnnnnnntnncnnnnnngnncnnnnnnnnncnnnnnnnnnnnnnnnnnnnnnncngnngnnnnnngnnnnnnnnnnnnnnnnnnncnnnnnnnngnnnnnnnnnnnnnnnnnnnnnnnnnnnnnngnnnnnnnnnnnnnnnnnnnnnnnnnnnnnnnnnnnnnnnnnnnnnnannnnnnnnnnnnnnnncnnnnnnnnnnncnnnnnnncnnnnnnnnnnnnnncnnnnnnnnnnnnngnnnncnnnnnnnnnnnnnnnnncnnnngnnnnnnnnnnnnnnnnnnnnnncnnnnnnnnnnnnnnnnnnnnnnnnnnnnnnnnnnnnnnnnnnnnnnnnnnncnnncnnnncnnnnnnnnnnnnnnnnnnnnnnnnnnnnnnnnnnnnnnnnnnnnnnnnnnnnnnnnnngnnnnnnnnnnnnnnnnnnncncnnnnnnnnnnnn

SEQ ID NO: 1124 - DNA, 4000 bp, Escherichia coli
  misc_feature (1484)..(1484): n is a, c, g, or t
  misc_feature (1956)..(1956): n is a, c, g, or t
  misc_feature (2641)..(2641): n is a, c, g, or t
  misc_feature (2656)..(2656): n is a, c, g, or t
  misc_feature (2956)..(2956): n is a, c, g, or t
  misc_feature (3715)..(3715): n is a, c, g, or t
  misc_feature (3730)..(3730): n is a, c, g, or t
  misc_feature (3800)..(3800): n is a, c, g, or t
  misc_feature (3802)..(3802): n is a, c, g, or t
  misc_feature (3905)..(3905): n is a, c, g, or t
  misc_feature (3916)..(3916): n is a, c, g, or t
  misc_feature (3970)..(3970): n is a, c, g, or t
gcgatctcggctcgggtcgtgccgatgcgcgcgccgagcacgcgcccggcagaagcgacgatcgacaggcgcggaccctcgatgcgcacgtcgccgacgatctcggtgatcggcggccacgcgtcggcgtactgcagcgtggcgtcctgcgccttcgcggcgaacacgaactggccgcccttccccgcggcaaacggaaactgcgcgagatcgccggcgagcgtcagcttcgcgtcgctcgacgtgcctttcacgagagcatggcgcagccagtccttgacaccctgtcctgcgtcaagcggcaggtaccggtacgtgctgccgagattgacgcgcgacagttgcgccttgatgtcgacgtcgccgggactgccggcgcgcgggcgccagctgccggcggtcgtccccgcggcatcgccgttggcaaacgcgacgtccttgaactgcaagtgcgattcgctgccgtcgttctgccaggcgacgtcgccgcgcagcgtgtcgaacgcgatgggctccgcgaagagcttcggcagcgtgaacgatgccgcacgcgtgtcgatgtgcaggcgtccgtcgcgatcgttcgcgtcgagcgttcccgcgaggttgctcgcaccgggcatgccgtcgtgcgccgcaacggccaatgcgcggaattctgttttcaccgcatagccggacatggcatcgatgtcacccgtccactgtacggcgccgttgcgcagcgtgccgcgaggatcgaaccgtgcgatgtcgcggcgaacgccctccgggatcggcaggtgcggcgcaatcgcgaccagcggccgcagttcgagctcgccgaacgagaagctcccaccggcacccgcgccacttgccagcgccatccgcacgtccgcggcggcctgcgtcgttccgtccggcagcgtgaacgtcaattccttcgatgcaaccgtcgtctgcgctgcggtgcgctgccattgcatccgcccgccaagatgcgcgagagccagcggtgccaagccttcgcccagcgtcgcgcgcacgtcctcgagctccacgtcggccgtgacgtcgaccggctgagcctcagcgaaatccatccagacgcgcaacgcacccttgccactttcgatcggcaacgcaagcggaagccagtcgcgccacgcggcgacgtcggcgtaatcgaggcgcaggtacagcttgcccttcagctggttccagtccttcagcgattcaccggtcacgtcggcacgaagctcgattggcgcggcgacgtcggcgggcggtattcccgtcaggccggcctgatggcggccaaatcgctgctcgagacgaaacgcgacatgatcgagcagcagttgcggcgccttgcggtattcgtcgtcccacgcgaccagtgcatcacggacgacgacttgcggctggcgcatcagccagtccgcgacggcggtatcgtcggtgccctcgtcgggttcgcgctcgatgccggcgaggtgcanccgtcccgccgtatcgcgccgcagcgaaagccgcggaccttcgatcagcagttccttgaggcgcaggtcgaggagcggcagcgacgtccacgcaacgagcaggtccacgcgcggcagcgccagcaaaacgctgccatcgggcgcgcgcgcgcggacgcgaaatccgcgcacggataacttcggattccagccgtcccagccggtgacgagggcatcgatctcgaccggctggccgatgcgcttggccatccattgggcgatgtcgtcacggcgcgcttcgatcgccgggaacgcaacgagccgaaccgcgagtagcagcgcgcagaacgcgcccgccagcagcagcgccgacatcgcgacgagccgcacggcgcgcgcagcgaaggacggcgtcgacaagtgcgcaggcataatgaaggtcgttgacccgacgacgattgtagcggaagcatcgctggcagagtgcgaccancgccgctgcaccgcgtaaccctgttccccgccccgtgatggacctcgatcgcgcccttgcgttcagccgctacgcggaccgggtcttcgccgtgtcgcccgcgctgcgcgacgaaatcgtcgccgcgctggacacatcgttcgactggaccggcgcggacgccgcccttgacgattgcatcgacaccggcaacccggtcgcgctcgcaacggcgatgcggcggttgcgccgtcgcgtgttcgtgcattcgatgcttcgcgacctgaccggtcgcgcgacgctcgtcgaagtcgtgcaggcagtcagcacgctggccgagcgcacgctggccgccgccatcgccgtgcacacgcgcgtgctgaccgaggcgcatggccggcccatcggcgatgaaaccggtcttgcgcaggcgcttgtcgtcatcggcatgggaaagctcggcgggcgcgagctcaacgtctcgtccgacatcgatctcgtgttcgcttatcccgaggatggcgacaccgacggacagcggcgcatctccaatcgcgagttcttcgatcggctgggccagcgtgtcatcgcgtcgatatcgcatgtcgatgccgacggctacgtgttccgcgtcgacatgcggctgcgaccttatggcgaaagcggaccgctgaccgtctcgttcgcggcgctcgagcactatctngtctcgcaggggcgngcgtgggagcggtacgcatggctcaaggcgcggccgttgaccggagagcggcacgacgagctcgcggctctcgtgacgccgttcgtctatcgcaagtacctcgactacgacgcctacgacgggctgcgcggcatccatcgccagatccgcgagcaggagaagcggcgcgactatgcgcaggacatcaagctcggcgcgggcggcatccgcgagatcgagttcgtcgtgcaggcgctgcagatcgttcgcggcggacgcgagcctgcgctgcggatcgccggcacgctgccggcattgagngcgctcgcctaccgcggtgcgatcgcaccgcacacggccagcgtgctgcgcgacggctacgccttcttgcgaatgctcgagcaccggcttcagtatcgcgacgaccgccagacgcaaatcgttcccgtcgacgcgagcgagcgcgcgttgatcgcggaagcgctggattgcgccagcgtcgcagcattcgacgatcgactccgagagcatcgagacacgatctcgcggcagttcaatgccgtgttcgacgcgcccggcggcggcgagcagtcgagcgacgccgaccagcgttaccgtgcgctatgggacgatccgtcgcccggtgccgacgccgtcgccgatctcgccgaagcgggcttcgacgatccggcgggtctcgtccaaacgctcgtgcggatgcggcggagccgacgctacctgcagttgccagcgctgtcgcgcgatcggttcgaccggctggtcccgcggctgctcgccgttgcggccgagcatcgcagcccgctggccagtcccaacgcggtggtccagcgactgctcggcctgctcgacgcagtcggcgggcgcagtgcctatcttgcgctgctgatcgagcatccaccgcttctgccccggctcgcccaattgatgggggcgtcagcgtgggcggccgactacctgacgcgcaggccgctgctgctcgacgaactgctcgatgcgcgcgtgctgcttgccgaagcggactgggatgcatggcgcgccgagctcgatcgggtgctcgcngcgcatcgcgacgangccgaggcggcgatggacgcgctacgccacttccagcatgcgcacacgttcaggctgctcgcgcaggacntngcgggccagctgacgatcgagcggctggccgaccatctgtcggcgctcgcggacacgatcctcgatgcgacgctcgcccgttgctggcaggaattgcgcaagngcgcgcaagcnccgccgcgcttcgcgatcatcggctacggcaagctcggcggcaaggaactcggntacgcgtccgacctcgacctcgtcttcctt

SEQ ID NO: 1125 - DNA, 4000 bp, Escherichia coli
  misc_feature (121)..(122): n is a, c, g, or t
  misc_feature (995)..(995): n is a, c, g, or t
  misc_feature (1112)..(1112): n is a, c, g, or t
  misc_feature (1226)..(1226): n is a, c, g, or t
  misc_feature (1797)..(1797): n is a, c, g, or t
  misc_feature (1985)..(1985): n is a, c, g, or t
  misc_feature (2009)..(2009): n is a, c, g, or t
  misc_feature (2032)..(2032): n is a, c, g, or t
  misc_feature (3111)..(3111): n is a, c, g, or t
  misc_feature (3351)..(3351): n is a, c, g, or t
  misc_feature (3353)..(3354): n is a, c, g, or t
  misc_feature (3357)..(3361): n is a, c, g, or t
  misc_feature (3363)..(3366): n is a, c, g, or t
  misc_feature (3369)..(3371): n is a, c, g, or t
  misc_feature (3374)..(3377): n is a, c, g, or t
  misc_feature (3379)..(3387): n is a, c, g, or t
  misc_feature (3390)..(3391): n is a, c, g, or t
  misc_feature (3393)..(3401): n is a, c, g, or t
  misc_feature (3404)..(3405): n is a, c, g, or t
  misc_feature (3407)..(3408): n is a, c, g, or t
  misc_feature (3413)..(3415): n is a, c, g, or t
  misc_feature (3417)..(3417): n is a, c, g, or t
  misc_feature (3419)..(3421): n is a, c, g, or t
  misc_feature (3423)..(3425): n is a, c, g, or t
  misc_feature (3427)..(3430): n is a, c, g, or t
  misc_feature (3432)..(3437): n is a, c, g, or t
  misc_feature (3439)..(3444): n is a, c, g, or t
  misc_feature (3447)..(3451): n is a, c, g, or t
  misc_feature (3453)..(3453): n is a, c, g, or t
  misc_feature (3457)..(3461): n is a, c, g, or t
  misc_feature (3463)..(3464): n is a, c, g, or t
  misc_feature (3466)..(3466): n is a, c, g, or t
  misc_feature (3469)..(3470): n is a, c, g, or t
  misc_feature (3473)..(3473): n is a, c, g, or t
  misc_feature (3475)..(3484): n is a, c, g, or t
  misc_feature (3486)..(3494): n is a, c, g, or t
  misc_feature (3496)..(3498): n is a, c, g, or t
  misc_feature (3501)..(3502): n is a, c, g, or t
  misc_feature (3505)..(3510): n is a, c, g, or t
  misc_feature (3512)..(3512): n is a, c, g, or t
  misc_feature (3514)..(3514): n is a, c, g, or t
  misc_feature (3516)..(3519): n is a, c, g, or t
  misc_feature (3522)..(3524): n is a, c, g, or t
  misc_feature (3526)..(3535): n is a, c, g, or t
  misc_feature (3537)..(3540): n is a, c, g, or t
  misc_feature (3542)..(3542): n is a, c, g, or t
  misc_feature (3544)..(3546): n is a, c, g, or t
  misc_feature (3548)..(3549): n is a, c, g, or t
  misc_feature (3552)..(3553): n is a, c, g, or t
  misc_feature (3555)..(3556): n is a, c, g, or t
  misc_feature (3558)..(3562): n is a, c, g, or t
  misc_feature (3564)..(3564): n is a, c, g, or t
  misc_feature (3566)..(3566): n is a, c, g, or t
  misc_feature (3569)..(3571): n is a, c, g, or t
  misc_feature (3573)..(3573): n is a, c, g, or t
  misc_feature (3576)..(3578): n is a, c, g, or t
  misc_feature (3580)..(3581): n is a, c, g, or t
  misc_feature (3583)..(3586): n is a, c, g, or t
  misc_feature (3588)..(3590): n is a, c, g, or t
  misc_feature (3593)..(3595): n is a, c, g, or t
  misc_feature (3602)..(3602): n is a, c, g, or t
  misc_feature (3607)..(3610): n is a, c, g, or t
  misc_feature (3612)..(3616): n is a, c, g, or t
  misc_feature (3620)..(3621): n is a, c, g, or t
  misc_feature (3623)..(3625): n is a, c, g, or t
  misc_feature (3627)..(3636): n is a, c, g, or t
  misc_feature (3638)..(3646): n is a, c, g, or t
  misc_feature (3649)..(3649): n is a, c, g, or t
  misc_feature (3651)..(3661): n is a, c, g, or t
  misc_feature (3663)..(3668): n is a, c, g, or t
  misc_feature (3670)..(3670): n is a, c, g, or t
  misc_feature (3673)..(3675): n is a, c, g, or t
  misc_feature (3677)..(3677): n is a, c, g, or t
  misc_feature (3680)..(3681): n is a, c, g, or t
  misc_feature (3684)..(3684): n is a, c, g, or t
  misc_feature (3686)..(3687): n is a, c, g, or t
  misc_feature (3690)..(3693): n is a, c, g, or t
  misc_feature (3697)..(3700): n is a, c, g, or t
  misc_feature (3702)..(3702): n is a, c, g, or t
  misc_feature (3704)..(3706): n is a, c, g, or t
  misc_feature (3708)..(3709): n is a, c, g, or t
  misc_feature (3711)..(3719): n is a, c, g, or t
  misc_feature (3722)..(3724): n is a, c, g, or t
  misc_feature (3726)..(3726): n is a, c, g, or t
  misc_feature (3729)..(3739): n is a, c, g, or t
  misc_feature (3742)..(3743): n is a, c, g, or t
  misc_feature (3745)..(3747): n is a, c, g, or t
  misc_feature (3749)..(3753): n is a, c, g, or t
  misc_feature (3755)..(3758): n is a, c, g, or t
  misc_feature (3760)..(3765): n is a, c, g, or t
  misc_feature (3769)..(3775): n is a, c, g, or t
  misc_feature (3777)..(3777): n is a, c, g, or t
  misc_feature (3781)..(3781): n is a, c, g, or t
  misc_feature (3783)..(3795): n is a, c, g, or t
  misc_feature (3797)..(3804): n is a, c, g, or t
  misc_feature (3806)..(3817): n is a, c, g, or t
  misc_feature (3819)..(3821): n is a, c, g, or t
  misc_feature (3823)..(3824): n is a, c, g, or t
  misc_feature (3826)..(3830): n is a, c, g, or t
  misc_feature (3832)..(3842): n is a, c, g, or t
  misc_feature (3844)..(3844): n is a, c, g, or t
  misc_feature (3846)..(3849): n is a, c, g, or t
  misc_feature (3851)..(3851): n is a, c, g, or t
  misc_feature (3853)..(3857): n is a, c, g, or t
  misc_feature (3859)..(3862): n is a, c, g, or t
  misc_feature (3864)..(3873): n is a, c, g, or t
  misc_feature (3875)..(3875): n is a, c, g, or t
  misc_feature (3880)..(3885): n is a, c, g, or t
  misc_feature (3887)..(3894): n is a, c, g, or t
  misc_feature (3896)..(3896): n is a, c, g, or t
  misc_feature (3898)..(3900): n is a, c, g, or t
  misc_feature (3902)..(3907): n is a, c, g, or t
  misc_feature (3911)..(3915): n is a, c, g, or t
  misc_feature (3917)..(3919): n is a, c, g, or t
  misc_feature (3922)..(3922): n is a, c, g, or t
  misc_feature (3924)..(3924): n is a, c, g, or t
  misc_feature (3926)..(3926): n is a, c, g, or t
  misc_feature (3928)..(3928): n is a, c, g, or t
  misc_feature (3930)..(3930): n is a, c, g, or t
  misc_feature (3932)..(3934): n is a, c, g, or t
  misc_feature (3937)..(3940): n is a, c, g, or t
  misc_feature (3944)..(3946): n is a, c, g, or t
  misc_feature (3949)..(3949): n is a, c, g, or t
  misc_feature (3996)..(3997): n is a, c, g, or t
gggggccgccgggggtaagcgcgttgaaccctgcaattgcgcgggccacttcgggggcgcatttgtcgccctgcacagccacgggccaaatcaacaccttgcgcggaaaccggtcgcgtanncggtgcaaaatatcacggatcaccgcccccgagggcgatgtgacaaccccaataatttcaggcaaatagggcagcgggcgtttgcgcgccgggtcaaacagcccctcggcggccaatgcggccttgcgcttttccagcatcgccatcagcgcgcccatgccggcgggtttgatatcgtcgatcacgatttggtattttgactggccgggaaaggtggtcagccgcccggtggccaccacttccatgccctcttcgggctgcacagacagccgctgcgcgacgcccttccagatgaccccggaaatcaccgcgcggtcgtctttcagatccagatagatatggcccgatcgtggcagcgatacgcgccccacctcgcctttgatgcgcacatgggcaaactcgccctcgatcatgcgtttgatcgcgcccgaaagctcggataccgaaaattccggggcgtttgtgccttcgggggcctcgtcgatcaggtcggacattgtgcctcgcttgctcttgcctttggtgcagcttagaacgcccgggaacaaaggccaagacggagtgcgccagatgaatatcttgatccttggaagcggtgggcgtgaacatgccttggcctgggctgtgctgcaaaaccccaaatgcgaccggctgatcgtggcgcccggcaatgctggcattgcccagatcgcggaatgcgccgatatcgacacgcttgatggcggtgcagtggccagtttttgcgaggccgaggcggtggatttcgtcatcatcggccccgaggcgcctttggcggctggggtggccgaccggctgcgccaagcggggctgttggtgtttggcccctcggctgcggcggcgcggttggaggcntcgaaaagctttaccaaggaaatttgcgatgcggcgggcgcccccacggccgcctatggccatttcaccgatgccaacgccgcgcgcgcccatattcgtgcccatggggcgcccatngtggtaaaggccgatggtttggcggccggcaagggggtgatcgtggctgaaaccgaggcccaagcgctggctgcgattgatgacatgttcggcggcgagttcggcgcggcgggngccgaggtggtgattgaagaatttatggagggcgaggaggcatcgtttttcgtgctatgcgatggcaccgatgtgctgcccatcggcaccgcgcaagaccacaagcgcgtgggcgagggcgataccggccccaacaccggcggcatgggcgcatatagccccgcgccggtgctgagcgatgcgatcgccgctttggcgatggagcaaatcgtaaagcccacaatggcggaaatggcgcgccgcggcatgccctatcaaggggtgctttacgcggggctgatgatcaaagatggccagcctaggttggtggaatacaacgtgcgctttggtgacccggaatgccaagtgctgatgatgcggctgggcgcgcaagccttggatctgatgcaggccgcagccgaggggcggctggccgaggcgcaggtaaattgggccgacgaccacgccatgactgtggttatggctgcaaacggatacccgggcgcttatgaaaaaggttctgttatcaacggtctgggggatattgccgaaagctctagccagattgtgtttcatgctggcaccagcctgnacgaggggcaggtggtggccacgggcgggcgggtgctgaacgtgaccgcgcgtggtgccagcttggccgaggcagcccagcgggcctatgcgatggtcgattgcatcgattggcccgaaggcttttgccgccgtgacattggctggcgcgccttgggttgacacgctttatgggtgtcgaaacccgcncgtaatactctttaagatgtattngttgctctaagggatatgtgttnctacccacttggataatgtgggtgagagcatgttaatgagtgatgagtttttgtgctgcatgggcgcgcgcctgtgtggtcaggtgttgtcgggccttgatcggggtggggccgcgtggagcgtagagctgcaaaatgtgcggcgcttggtctattccgagcggcgcacccgaaatagcacgatttatagcctgcgcttaaaagacaaagccgggtggcacacgatcagcgtggatattccgcgccagcgtatggcgcccagcatcgatctgatcgaacatcgcgccctttcggcgcgggtggccgaggtgctggccgatttgcggcccgggttccgggtgcgctacgaggtggtgcagggcgggcgttttctgccggtttgggttggtttgggcgcaggtgcgctggttggggcgctggtgtggctttgggcgtttttcgcccaagtgcaaggcccgcccgtgggcgcgtttccggccatcacgctgggggcggggctggtcagcggggttggcgccgggctggtgatggggctggccatgcgccaccgcgtgccagatgtcagcgccagcgccttgccggggctgttgacggctgcgtcgcggcgcggttaggggcggggttgcacagggccggggcaacgctgcgcctttgccatgctggcaggcccgtcataggggccaaggcgacggctgtgcaagcgcccgtcgcggcccaaactggtggcaaggacgtggcgccaactggcgtctgcggtaatgatctggggcaggcccccgcagcggcgcaggccgccttcgatttgggccgcgcgcagctggtggttgctgtgcccctgttgctgggcaatttcggttagctgccagcctgtggcaccggccatgggatagacccgcacaacccgtaacacccgcgccagatgcgggcgatccacataagcgatctcgatctgcccgtcgccatccagatcggcgatgcctgcaatggccagccagcggtggcgttggccaatgggggccgtggcggcgatgggcgccagatgggccaaactggaatcgggttgggcataaatctgaatncgggcgcccttggcgaaatcggccaccaccgtcaccagctcgggccgcccgtcgccgtttagatcggccagccggggctgggtatcttcgaaaatgcccccgcttgggcgcaaaacatggcgctgcccggttgtccaggtgatctcaagcccgtcatattcgcccccggccacagcgccatggccataggcatctgtgggcccgacatagcgcgctgtggcgatttgcgggggcgtttgngnnggnnnnngnnnnggnnnggnnnngnnnnnnnnngcnnannnnnnnnncanncnngcaannngncnnncnnngnnnntnnnnnngnnnnnnttnnnnngntgcnnnnncnncngcnncancnnnnnnnnnntnnnnnnnnntnnncanncannnnnncnancnnnncgnnnannnnnnnnnngnnnntnannngnnagnncnngnnnnngngntgnnngncgnnntnnannnngnnntcnnncatgtcntcttnnnngnnnnntttnncnnncnnnnnnnnnncnnnnnnnnnatngnnnnnnnnnnngnnnnnngngcnnncncanncgncnncgnnnncggnnnngntnnngnngnnnnnnnnntcnnncncgnnnnnnnnnnnggnnannncnnnnncnnnntnnnnnncatnnnnnnngncatngnnnnnnnnnnnnntnnnnnnnncnnnnnnnnnnnntnnngnntnnnnntnnnnnnnnnnntngnnnngngnnnnngnnnntnnnnnnnnnntntggcnnnnnntnnnnnnnngntnnnannnnnnatcnnnnntnnnatntntntncncnnntcnnnncccnnntcngccccccagtctgcaccccagtctgccgcgccatattgcccggcccnntca

SEQ ID NO: 1126 - DNA, 4000 bp, Escherichia coli
  misc_feature (488)..(488): n is a, c, g, or t
  misc_feature (1985)..(1985): n is a, c, g, or t
tttgtcagtccatgtgtatactttttgatcgagttctattgttgcaccaaagttagaagtatagacagtcaagccaatatcttcatcctcttgtccaacatagtcagctccggctggaccccagtcggtatattctaagtcgattttctctcctctatctaagttatttgaactaattgctgcagggatttctaggactacttggaagattccagtagagtcaccagtttctctgagctcagatggttcaggatcaaaggtagtggattggtcttgaatagatacggttgcagcatcactgtcccactcgattaaatcaagtgttaaggattgtgctccgtcattatcaagatcaaagtctggctcaattaaggttaagatcatatctgaaccaattaagtagactgatttatcggattgtaatacaccgtttctaaggtcaaaagtagcagagtcagttacagtttgtttcttaccagaagcatcgnagttatctgtgtattctacagtgataatatcaccttgtaagatacaaccatcactaaatacacttggacaatcagttgctggtccagatgtatatgtgactgtttgatcccactcgaatacaccagaatctggcgatacttctacgatagcaccattaccggttaacccatcaagggatccggatgtagtgttaccagcagtggcaaggaacttacttgaagaacctctttcaatattaattgtaacgttagcatctgtgattttatcttcaccagaggcggagacattgtaatcagcatctgttactctaacgtgtatgacgacatcaccttgggctaatgctgcactaccagttgcagtagcgtgctctgcaaatctagtatcagcggcatctgcaccataaggtactggataaacagttctatcaaaagcaacagaaccggtgtttgcattaatgcttgcacctgctccaacttcaatagattcaccagaagcgtttctgaaatcttgatagttaacttccatatctgtaccagttactccattaatggtatcatcaccactatgacagaaattggttgggacttggaaggtacctacaaagagaccagaatcagcagcagtctctactaatgtaaagcctgttgcttcaagaccgttgtcaccgactattgtgccagtggtttcggtacatgcagcgtcatctgtatttacccagtattgatcgtcaaatgtaatatcgagaactaatccagcggtcgtagcatcaccaactttatcgtcagtagatgttatgtacacatcgattagtgaggtatctgtattcatatcttgatcatctaatgtaacaacaacagtatctgcaatcttgtaattctctgaatcaaatgaaactacaccattatgtgttggagcttcttgttgatcagcgatttgtgtactaacaccatctgctcctaaatcataataattgattcttggagaatcctcgtcagtcatatcttgttcaacaataatgttgacagaagatgagattgaatcaagggttgtgtaggttgcatcggcattaatgttaagttgatttaacattgtatactcgacggtaccttcaaatgttgatgtgttatcaccagtttcctctaattggagtctgtagattgcattattgacacctgcaccaaaactaaatacatcagccacgaatggtgctgtatttaatgttgcatcagcagtaagtgttacgttaacattcattgcagcactagtttgttggtctgctgcgaagatttctacaattcctttgctttcaaagtcagcgccgcaagcgacgttaagcattgaaccagcagtgccgttcactaagcaaacttttgctactgtttgtgttgcattgaaagatgtgaaatcgaagttaaagtaagtatttactgtgtcaatgccatttatgtcagcaccactatatccagtattaatagtcacattttgactattacctnctttgatatcactaccataaccacctccaccaagactattactaggattatcataccatgtaatattgctgaatttggatgttatagatacttgagcatcatcgacagccacggttagtggactaccaatgactaatgctggtactaaatgaccttgtgttgtattcactaagagtagatcttcatcaacaagagtgttcttgttaagatcgtgatcaattaatgtaactgttatctcttcaccggaattccactcatcaccaacagaggtttcatccatgtcaatgacaccaaagtcatttgtgacaacgaatgattgtgcactatcgttataatcgatagttgcagttgttcctcttttagcgttaagtgcaacttctagattagaagcataaagatcatcagtattgtagaacataccactgttttcaccaccttcaaagaagacaaggaatttgtctgcttgtgggtcgtctgcagttgctttatctacaaatacatctctaccgatacttgaagcatcgtagttaatgatcaatttaccgttatcaccaaaagtattactccatgctctaaaggtacctgctccttcgccaattacacctggtacagtaccattagtaaatgacatagattcagcacctgaagttaccttgaatattactttatcttcagaagttggatcaatgtttagttgattatcagtaatgattaaatgaacatcagattcctgagaagctgcatttctatctaattcaattcctgcgaaatcatctaaatcaccagaattatagtctaatgtgactacttcatctgatccggcttgttcgtaaacaacattaaaggtatattcacctgttgtaaaatcatacaattgtacaaatggccaatcacctgttgtgattacaccaatctgtccttgtgtgaagttggcactagttcctgatagatagtcacccgtacctgtaccagtaccattccatgcggaaagggctgggaagttatggattgcaccagagccatcggaattgagtacattggtggattgataaacattagttgcttcagcaaagtcacctaaatgtaaggtaggattagcatccgtaccaaagtctaagttatttgcgaaagaatctgctgctgctactttggttttatcaccaaagtaaccataccaattaccatcaacaccttgtgccattctaagttgattttcatcaactttgacgacaggttcaccaactgattcgttagttgctgatctgttaggatcaataactacaacttctacaatttgtgctcctccaaatgtgttaccgaacattgcgttttctgcggagacatataatgagcctgcggctgcggcttctggcaccattgaaggtgcggcaataaccataccaccggctaacattattgtcattagcgtaagactagttaatttacgtcctatttcgttattcatgttattagttatttttgccaaaaattagtatataacactaatggacgatacgtccacaaaaaggtggttttttgtagttatttcaccatatttgaaatattgttattaatattatattttattaaagaattttttgaattaattctatttttatatctatgatctaattatattataaaaataatattataattatcaaaattttagagactatttttgtaattttttgataaaaaattattttttggttttactttggttttaatccatattacggccttttagtgtaaaaatagacatattggttttggttttatcagatacaccacaatttaacactgaactaggcacaaattactccattttggtgttaccataccatttggttttgagtggtttacagttggttttagccaaaaaaaggaccttttagaatcgtgccggtatgcaaattacactaaaaccacttggtttgcatttggttttacggtttattgtttgaaaacgatagaatgtaaagaatttcactatgttaaaatcagaatagaat

SEQ ID NO: 1127 - DNA, 4000 bp, Escherichia coli
  misc_feature (7)..(7): n is a, c, g, or t
  misc_feature (1322)..(1322): n is a, c, g, or t
  misc_feature (1830)..(1830): n is a, c, g, or t
  misc_feature (1971)..(1971): n is a, c, g, or t
  misc_feature (2332)..(2332): n is a, c, g, or t
  misc_feature (2389)..(2389): n is a, c, g, or t
  misc_feature (2910)..(2910): n is a, c, g, or t
  misc_feature (3051)..(3051): n is a, c, g, or t
  misc_feature (3429)..(3429): n is a, c, g, or t
  misc_feature (3435)..(3435): n is a, c, g, or t
  misc_feature (3462)..(3462): n is a, c, g, or t
  misc_feature (3594)..(3594): n is a, c, g, or t
  misc_feature (3951)..(3951): n is a, c, g, or t
agttttntgaaatgttatgtcagtacttgttcctaaaaattcacttttttttaaattaaaaaagccagtttcaaaataatattcatcttctttattttcttgttcatttcttctataaaatactctttctcctttaagaacctcatcatttactgagtattcaaattgatcaagtttataaacatttgaattaatatcagtaataatagttttattatttgacatcaatatcatttcattttttaagaaggtcaagtctgaacccacaacgttatattgatcgtctacatttaccaatgttttacccacagtataaattatctcttcagacttgagataaaacattttgtcagcattgatagtaatattatttttgatatcagttaattcaacattgccatttgtttcaaggcgattaattttttttaaatatataaaattatcagacattaattcaacttgagtgtctgttacaactttacctctattattacctttgtagacagtgttattttctaagatctctaaatcagtaacttcaaatgtaaattcatcactattagcaaaacttagtgggcttatgttaaatattaatattaaaaaaataataattattctatttttcattaatctttattatagaagtaaaattaattattgctaacataccaaggggcataaaaatcgataatactaaaggaattttttgatttgtacctaaaatatttaaaaaataatttatataataaatgatcacggataaaaaaattcctaatgttattttgtagaatgtatttttttggtatccaatattaaacatgataattgatgataaaatagtaattaaagttaaataaactgggtaagagataactctataaaaatgagagtcaatatccactaaagaataatttagagttttataactttttcttaattcaattaatttaaatactgtaagcgaagatagatttgagaataaactattaatcttcttgagatcaaaatttgatttaaaaattaactcacttaagtcataatcttgattgttgtttaaaattaaaggtttaattattttccattcaaaagaggatatatcaactttatcactctgtatcatgttcaaaacatcaaaatttttattaagctgtgttattgaaacatttaataaaaactgattgttaactttacctgcattaattatatttatcttgttttcaatctcgtctttaatccataacccattttctgtaattacagctaaatatttattatcacttgaatatttattttttattaataaataagaatttttcatgacngctgaaacattatagaaaagaagaataaaaattattccaataaaaaaagtataaaaaccaatgatcttaatgatcataaaattagttaagccattatatttaaaaatttctaactcttttttatctataagataaataaaaaaaacttgtgttgataataaaaaaataaatggaagtatttcaaatacaatagcaggtgtatttaaaaatgataaaaaaataaggtacaaaaaactaatatctagatttttaaaaaattctatctgttctaaaatattagttattagaattattataaaaaaagaaaaaaaaactttcaaaaaagagatattaaaaagattaattaaaaatttaatataaactttcatatttttttgactttcatagttattaaaaaataaaaatatatcattaatatcaaaacaaggggtagtactgataaaaacgaattttgtattaagttattggaaataaattttgaagaagactctataaagataatagatanaaaacctaaagaatatgttttaattttttgtgtcttaaatgtcggatcacttttagattttaatattaataaaagtgaaatagatataagaagcgtaatatataaaggttttattaatcttgagtatatctccttatatanatttgtcatattcattgaggtacaattgttaagttcagattttattttgttaccaatatcttttttaaaattattgatgatcaataaacataataccagctctttagttgaagtttcttgtgttttttgatgagtaacagtttgtgtgctaaaattggaaatattaaaatctgttttagaaaaattgaattcagaagtttttctattgacattattgattgtttttccatcatataagacaagtatttttttgtctccacgtatttcaaatttaccagtttttgcaattgtggtttgagattcattagggctagatttgtcatttaaaaacatgttttctagctctccattttcatttttnctatcataataaattgttaaatttttaactatatctacaaatgtttttggttttaangcactttcaaaaaaatctagatctgaagatcgtataaaagatcttgctttatcttgagctgtgggcacaattaaagcatttaatagtaggctaaaaattacaaataaaaatgagacttttataaagaaatttataagatgaattttttttattccaaaattccaaaatataagcagttcatttttgtcttcatattttagcaatatgtatgaaaaacttaaaaaaactgcaaaggggtaaattctgctaagtatttttgggaaactaagtaatgtgaagttaaaataaacaaaaaaaccatgaccatcttcaatcacaaagtctaaataattgactgcctgtaaaacccagataattgtactgatggtaaatatagttaatagaaaaaactttacacaatcagtagctaaatttctgtaaatgatttttttcattgaaatatgataatttaactcatatatagcactcaacccgtatagagtgtattaaaatttatgtctattaagatcaattacaaaaanatcatttctaccaaatctacaataaatcttgtcttatttgttaatgaaaatttcaatattaaagatattaagaaatatatttcaaattctgaattttcttacatagcagatttactaaaaaatagtgatttaaaaaaaganacacttttttttgaagttaattcaaaaaaaacaatattcttagtatctgttaagaaaaacataaaaatatcagatatagaaaatttaggagcaaaatttcacagttatataaattttgataagaaagatgattactttataaactcagacacagttaatgataaaactaaaaattttataggtcattttctacatggactgaagttaaagtcatatgaatttaatatttataaatcaaaaataaataaaaaaattgtttctataaatgttataggaaaaaagaataaaatatctactaaagatcatttaagatttaaagctctagaagaaggaagtttttttgcaagagaccttgtgtctgaaccaggaaatgttttncacccngatgaatatgcaaagagaataaatacncttaaaaaatttggattaaaaataaatatctacgatgaaaaaaaattaaaaaaacttggaatgaacgccttacttggtgtagggcaaggtagtattagaggatcatatcttgtaacaatggaatggaatggngcaaaaaataattctaatcctttagcttttgttggaaaaggtgtttgttttgataccggtggttactctttaaaaccagcaaagtttatggaagatatgacttatgatatggcaggttctgctacggttgtgggattaatgaaaaatttagcaattagaaaagcaaaaattaacgctgttggcgttgtagggcttgttgagaatatggttagtggaaatgctcaaagacctggtgatatagtaaaatcttatagtggtaaaacaatagaggtattaaatacagatgctgaaggtagattagttttggctgatgctttaacttttactgagaaaaaatttaaacctaagtttatggtngatctagcaactttaacaggtgctattatagtttcattaggctctgaat

SEQ ID NO: 1128 - DNA, 4000 bp, Escherichia coli
  misc_feature (1)..(7): n is a, c, g, or t
  misc_feature (9)..(15): n is a, c, g, or t
  misc_feature (17)..(18): n is a, c, g, or t
  misc_feature (20)..(20): n is a, c, g, or t
  misc_feature (22)..(23): n is a, c, g, or t
  misc_feature (25)..(25): n is a, c, g, or t
  misc_feature (27)..(27): n is a, c, g, or t
  misc_feature (30)..(30): n is a, c, g, or t
  misc_feature (32)..(33): n is a, c, g, or t
  misc_feature (62)..(62): n is a, c, g, or t
  misc_feature (285)..(285): n is a, c, g, or t
  misc_feature (688)..(688): n is a, c, g, or t
  misc_feature (3200)..(3200): n is a, c, g, or t
  misc_feature (3203)..(3203): n is a, c, g, or t
  misc_feature (3213)..(3214): n is a, c, g, or t
  misc_feature (3228)..(3228): n is a, c, g, or t
  misc_feature (3243)..(3243): n is a, c, g, or t
  misc_feature (3252)..(3253): n is a, c, g, or t
  misc_feature (3257)..(3257): n is a, c, g, or t
  misc_feature (3260)..(3262): n is a, c, g, or t
  misc_feature (3277)..(3277): n is a, c, g, or t
  misc_feature (3973)..(3973): n is a, c, g, or t
nnnnnnnannnnnnntnngngnnananttngnnaaaaaagatgctccaggattgacctccgntaagtatgacattttaacctatattttgtagtaatatcttcatggggagaatagagctatgtcgttaatgaataaaattagtgaattgcccagagcaccgcaacctccgatagcatggaaggtgttgtggattacttctcttggttccgtgattggtatagggattacggcgtttcttgcttttgcttggaaatgtcccctgctattagggccttttggtgcnacagcagttttggtttatggcgcctacaaggctccgctggcacaaccaaggaatgtcctattagggcattttctaggtgcattgatgggtgttgccatatatgacttttttggtctctcatggtggtcgctaacacttggagttgttctgacaatcgttttcatggcagtgacatattcggttcatccccctgcaggcgctactgcgtatgtggctattcagaccggtggtttgggtatggattattggtatatcttaaaccctgttcttcttggggccgtcattttagttgttgttgccatcgttgtaaataggatgggcaaaagggattatcctgtagcttggtggtgatatctggtaaagctaactgctcaggctaccgagtatgatgtggttggtgggntaatcgcttgtaaatgggtttcctgctatgtgtagactcttttttagtacgtcataaattagggagttaggttgcgccaagcggcgcttgaatattttaacttcagactggcaaaacgcccttgagattcaacagaaaattctaaatatgcattttatggagaaaaataatgaaaatatcgcttaaaaattacatcatactaatgctgattttcttcactctgctaccgtttgttttgcttaggattattgcatatccgaaaatacagtccgatcttaagacggtaataatggataatcttgaaactgtaggcaacaagcaggcggacatcgtgtcatcatggatgacggaaagaaaaacagatgtcatcgttgttgcaaacaatccgtatattgctgatagcttgaaaggtgcaggaaggaatggcgatagtgatgctaccgcatatttagagttggttgttaatgaatatggctacaagggcgcatttgtaagtaatgcagacggaatagtcacgcttgctacgtcggaagaggatgttggagctgatctgtctggaagagattttttccaacaatcgatgcagggaaatgcatacgccacaagtatcataccatctgaaatcgcccttacgaatgagtttgatgagaaggaagtaggcttgcctacaatgttcgtgtctgcgcccttaaaagacggtgatactgtgattggtgttgttgctttcaggatccatgttgctactttgagtaatttgctgcaaagtcaaaaatttgggaagacaggtgaaacgttcattgtcggtaaagatgggtatatgcttacggaatccagatttagctcaaatttaatgaaaacgggagcgattcaggtaagaagcgctttggagttgaaagtggttaatcccgataacggaaagatgacctatgctgttaaccagtgccttaagggcaaagacggttctagttccaagggctataaagattatgccggtatatccgtactgggagtatggcactggctacctgagcttgattgggctgttattacagagatagacaaggctgaagtttacggagtggcttataatctcaatacgcttggttgggtgttgctgtttggaatcgcattcccgattgtgttttttgcatatatagttggtaaaaaaatatctgcaccaatagttgagctgactgaggcgactgaaaagatgtcagcaggagatctgacccagcgggtaaatattgataggggggatgagcttggtgttttggcaacatcgtttaatgcaatggctggggctctcgataaaaagacaaaagaggttgaggaatccgagagaacatacagggaattatttaatgctctccaggctggtatttatcagtgtgagccaggagttgaaggcaagtttgcatgggtaaatcagtcttgtgcggaaatgtttggctatgaatcacctgaagagatggaaggtacgaaggtaaaagatatctatgtggatcaagccgatagaaaaaaacttgtagataagcttgaaaaagacggtgtctggaaagactttacgtcctattgtgtaaacaaaaaaggagggaaattttacactgagcgtacatcaaatatggtgaaggacgaaaaaggaaaacctgtccgtattgagggtgtgatcagggacattagtgatcgaaagaaaaaggaagatgatctgcaaaagaaagccagaaagaagtccgattgataagagttgaaaaggtgtatgctgtaaggatttaggcaaattattatgtaagcttgttttgtcaacgaatttaaatatataacactacactaacaaggagtaggaaattatgggtaatggaaactctaagggtctttcagtaaatgcgaagaccattattctgctgatattgtttttggatgtcggatttacggttaagatgatacacaaatacaacgagatgaaggatgctggttttgtaagggaaaaaacctttgctgaaaatatggaaaaaagggttatgaaagcttttggttcggcagaaggggcacaaaaactggttcaagatgcagttctacagaagcaagaagctgagaaaattgcagcatctctaagaacagagaatgccgctttgaagagcaaaaaccgacagcttacagaagagaatgagaagcttaaacagtgacgtgtcgaaagtaacaaaaaataaaaggacttaagggaaagcattgaactgacaggcagagaacgcgtactagtaggtctctgttgtcgctagtccagggtttcaaattacagggttaacgtatcaaccgcaattcataagccgtgagctaggctaagcatatgcagttacggatcttacgtgacctgtgtttacttaaattatggcactccttatcgcgcacaagggtagatgttgctccaatcaaagtaggagtacctctgtagcaataaatacggatatcgctttggataaaaacctcatatttaggttgaaaagttgattgtttnttntaaatggggnngttttaaaatttanttttaaataattatnaaggtgttnnaatnaannnttctatgatttgttntgacataatttttttttaaagttttgggaggatgaatctgtggcatatttaaaaggtaagaaaggaattagtgaaaaaagcaatttgttctggaagagcattcttttcagtgcagttgttgctgtttttgtttccatgctgtgccttggtaattcagcatcagcaggaggcggtcttgaagggaaagacctttataataaatactgtgcaccgtgtcacggtgaagaaggtgacgggtatggtccattatatggagcgctttatccaaaacctagagattttacgaagggtcagtacaagattcgtactaatgcgacaggttctttgcctacggatgcagatcttattcatgtaatttctgttggaattcatggaacttctatgatgccatgggatatccttgataaagaccagatcgcgtctctgctaccggtattaaagagtttttctgaagcctggcagtacagaaaacctgaagcagcagtagttttaggaactgaattgagagcgacacagaagacgattgcaaggggtaaagaactttatcagcagaaagagtgctttaagtgtcatggcgagacaggaaatggcgatggccctagtagttacgatcttgaggatgaatgggaaattcctattttgccttatgattttacccgtgctggcaagtttaaaggcggggcaacaaacaagganatctatatgagatttacaacaggtatg

SEQ ID NO: 1129 - DNA, 4000 bp, Escherichia coli
  misc_feature (1251)..(1251): n is a, c, g, or t
  misc_feature (1303)..(1303): n is a, c, g, or t
  misc_feature (2328)..(2328): n is a, c, g, or t
  misc_feature (2419)..(2419): n is a, c, g, or t
  misc_feature (2421)..(2421): n is a, c, g, or t
  misc_feature (2598)..(2598): n is a, c, g, or t
  misc_feature (2629)..(2629): n is a, c, g, or t
  misc_feature (2652)..(2652): n is a, c, g, or t
  misc_feature (2655)..(2655): n is a, c, g, or t
  misc_feature (2658)..(2658): n is a, c, g, or t
  misc_feature (2745)..(2745): n is a, c, g, or t
  misc_feature (2774)..(2774): n is a, c, g, or t
  misc_feature (3113)..(3113): n is a, c, g, or t
  misc_feature (3251)..(3251): n is a, c, g, or t
  misc_feature (3401)..(3401): n is a, c, g, or t
  misc_feature (3437)..(3437): n is a, c, g, or t
  misc_feature (3633)..(3633): n is a, c, g, or t
  misc_feature (3639)..(3639): n is a, c, g, or t
  misc_feature (3753)..(3753): n is a, c, g, or t
  misc_feature (3809)..(3809): n is a, c, g, or t
  misc_feature (3812)..(3812): n is a, c, g, or t
ggcaagataaaaattgcgtaaaacttggatccaaaacattgctagagcatgttttgttcaaaattagcaataaatttgaagaaatattgattgtctcaagtaatccattgaagatagaagaagcaaaaaataccacagtaattccagattgttttaatgatctaggacctttagcaggagtgctaagttccatgaagtgggtaaaagaaaataaaaaatcatacaaatggattgcaacttttccatctgatactccattttttgatccaattattattgaagaatacaaagcaagaattgaacaaagtaaaagcagtttatattttgttaaatctaacgaaaaaagacataatatttttggtttatggtcaattgatttaatggaaaaattagaagaagatttaataataaataattatcgaaaagttgaggaatgggctaataaagttggtgtgagcacaattgatattaaaataaaaaattacgatcctttttttaatataaataccaaagaagaccttgatgttgctcaaactattttaaatcttgataaaaatgattgattacaaaaaagcaaaaaatattttaataaaatcaaaaataaacattaaagatgaagttataaacacatcaaaatcattaaatagaattaatgttcaagatatttattgtcctgtgaattatcctgcaggaactaatgctgcatttgacggttttgccattaattctaaagatacatctacgattaataaaaaaaatcctaaagaatttaaaattttaaaatcaatatcagcaggtgataatcctaaattaaataaagtaaaaaaatttcaagctgttgaagtgatgacgggtgctctaattcctaaatattttgacaccattattcccatagaaaaaattgtgtttactaacaataaaaagtctatcgtaataaatgaaaagattaaaactaatcaacatataagacatgcaggatctgattataaaaaaaaggaattagttattaataaaggaactattattcagccatcgcatatcttagcctttaaaacattaggtattaaaagcattaaggttaaaaagaagcttaatattttatttttttcaacaggaaatgaaatttcaaataacgtagatattgctgattggaaggttagaaattcaaacagtcattatataaaatctttatctaataattttttgtttaattatatagaaggtggaattttgagagataaagatgaacanttttttaaaaaacaaattgataaaaatcttagatcaaaaatagatatcatanttacctcaggtgctgtttcagcaggtaaacatgattttatcccctctgtagtaaaaaaatttaatttatcaaattttttcaaaggggtggctattagaccgggtaaaccaattttatttgctaaatttaaaggaagtgaaaaggctttctttgggcttccaggtaatcctatttcttcttccgcctgctttagattttttgtatatccctatattttaaatatccttggagttaaggaggaaaaaccttttaaagctaagttaaaaaattctttctttaagaaaaaaaattttactagatttataaaagcaaggcttactacaactcataatggaaatttagaaatcaaggtactcaaaggtcaggaatcttttagaataaaatcttttgtagagtctaatatttggggcctatttaaacatggtcagtcaaattttaaaaagagcgaacttattgattgctattctccaattggttcaaatattaatatttttaaatagatctcatttttattgtagtgccaattaataagcattaagtatcgaattatgattgagctaaaaaatgaaaaaattgcaattccagtagttttattagcaggtcttatatggtcctttggacctttggttgtaagatacatggatcaacccaatttagttccatggcaatatatttttgcaagaggcttaacaatttttttgattttaaatctttatcttttttttgaagaaggaaaagatttttataagaattatttaaaaattggaatgtcgggtgttattggtggaactggactaggtattgcaatgattacctttatttattcaataacaaatactagtgcggctgttactttactctgtttagctgcaatgccattttttacagctttattaggtttcttatttttaaaagaaaaaatttcacttaatgtttggatagctatatttattgcaacagttggaataataattatagccattggtaatactgaaaaaaattctttattagggcttatttttggnatgacttcttcaattgggttttctgttttttcagtgactttgagatggaaaaaagaaacaccaaaatttacaacagtagcttttgcaggtntnttttgctttgtagttgctgcaatagttattttatctaatgatatggttttcttgtcttcaagttataacggagcattattttctatacatggaacgttagtttgtatgggtttaattttatattctattggatcaaaagcaatccctgctgcagaacttactttattgtcactaacngaagttataggaggaattttttgggtatggnttccaattttaggaattaatganatnccntcgactaatacgataataggtggcttctttctttttatgtctatcatttattatagtcttacaattaaaactaatagacggtttatngctcttaattaattataatggaaagaccnaatttttttactctaaagaatggtgaaaaggctaaactaccttttacagatcaagaatatcaaagtcgattaactaaattaagaaccacaatgagtaaaaataatcttgatatgattattttaacttcaatgcacaacattgcttactatacaggatttatttattgttcttttggtagaccttatggctgtgtagtaacggctaataaaatttcaacaatttcagcaaacattgatgctagtcaaccttggcgtagatctcatagtgataatgttatttatactgattggaaaagagataattttttaaaagcaattgtttcaattattggaagagangaacctcctaagaatattggtattgaaaatgatcatgtaaccttagatgttaaagaaaagcttacgtctatttttactttttcagttttcagcgatgtttcaaaagatttaatgcaacttagaatgattaaatctgcngaagaaatagaaattattaaaaatggtgcaagaattgctgatcttgggggcgaagagattgtcaaaaatattaaagttggagaaagcgagcttgaaattgcaatagccggtagagatagaatggagcgtgaaattgcaaaaacgtatccngatgctgaatatatggatacctgggtttggtttcantcaggacttaatacggatggtgctcataacccaaaaaccaatagaaaattaaaatcaggagatattctttctttaaatactttccctatgatctcagggtactacacagctttagagagaactctttttttagataaaattgatgatgcatccttaaaagcttgggaagcaaatgttaaagttcataaaagaggantagagntaattaaaccaggtgtaaaatgttctgatatttgtcatgagttgaatgaactatttgctgagcttggttatcttcattatcgaacatttggttatggtcattcatttggtgtcntatctcatttctatggaagagaagcaggattagaacttcgtgaagatatagatacngtnttagaggaaaacatggtggtttctatggaaccaatgatcatgataccagagggtaaaccaggagctggtggatatagagagcatgatatcttggttataggaaaagataatgctgaaaacattactaagtttccttttggtccagaacataatattatcaaatcataaattatgagtgaaaaaactgt

SEQ ID NO: 1130 - DNA, 4000 bp, Escherichia coli
  misc_feature (206)..(206): n is a, c, g, or t
  misc_feature (426)..(426): n is a, c, g, or t
  misc_feature (568)..(568): n is a, c, g, or t
  misc_feature (640)..(640): n is a, c, g, or t
  misc_feature (643)..(643): n is a, c, g, or t
  misc_feature (646)..(646): n is a, c, g, or t
  misc_feature (648)..(649): n is a, c, g, or t
  misc_feature (651)..(653): n is a, c, g, or t
  misc_feature (656)..(657): n is a, c, g, or t
  misc_feature (659)..(659): n is a, c, g, or t
  misc_feature (662)..(662): n is a, c, g, or t
  misc_feature (665)..(665): n is a, c, g, or t
  misc_feature (667)..(669): n is a, c, g, or t
  misc_feature (671)..(678): n is a, c, g, or t
  misc_feature (680)..(681): n is a, c, g, or t
  misc_feature (683)..(683): n is a, c, g, or t
  misc_feature (685)..(685): n is a, c, g, or t
  misc_feature (687)..(688): n is a, c, g, or t
  misc_feature (691)..(691): n is a, c, g, or t
  misc_feature (694)..(695): n is a, c, g, or t
  misc_feature (698)..(698): n is a, c, g, or t
  misc_feature (705)..(709): n is a, c, g, or t
  misc_feature (711)..(712): n is a, c, g, or t
  misc_feature (714)..(714): n is a, c, g, or t
  misc_feature (716)..(718): n is a, c, g, or t
  misc_feature (721)..(723): n is a, c, g, or t
  misc_feature (725)..(725): n is a, c, g, or t
  misc_feature (728)..(729): n is a, c, g, or t
  misc_feature (731)..(732): n is a, c, g, or t
  misc_feature (735)..(735): n is a, c, g, or t
  misc_feature (737)..(741): n is a, c, g, or t
  misc_feature (743)..(743): n is a, c, g, or t
  misc_feature (746)..(750): n is a, c, g, or t
  misc_feature (752)..(752): n is a, c, g, or t
  misc_feature (755)..(756): n is a, c, g, or t
  misc_feature (758)..(759): n is a, c, g, or t
  misc_feature (761)..(761): n is a, c, g, or t
  misc_feature (764)..(765): n is a, c, g, or t
  misc_feature (770)..(771): n is a, c, g, or t
  misc_feature (773)..(775): n is a, c, g, or t
  misc_feature (778)..(778): n is a, c, g, or t
  misc_feature (780)..(781): n is a, c, g, or t
  misc_feature (784)..(784): n is a, c, g, or t
  misc_feature (786)..(789): n is a, c, g, or t
  misc_feature (792)..(797): n is a, c, g, or t
  misc_feature (800)..(800): n is a, c, g, or t
  misc_feature (806)..(808): n is a, c, g, or t
  misc_feature (810)..(810): n is a, c, g, or t
  misc_feature (813)..(814): n is a, c, g, or t
  misc_feature (817)..(818): n is a, c, g, or t
  misc_feature (821)..(822): n is a, c, g, or t
  misc_feature (830)..(830): n is a, c, g, or t
  misc_feature (833)..(834): n is a, c, g, or t
  misc_feature (837)..(840): n is a, c, g, or t
  misc_feature (842)..(843): n is a, c, g, or t
  misc_feature (845)..(849): n is a, c, g, or t
  misc_feature (851)..(852): n is a, c, g, or t
  misc_feature (854)..(854): n is a, c, g, or t
  misc_feature (856)..(857): n is a, c, g, or t
  misc_feature (859)..(859): n is a, c, g, or t
  misc_feature (861)..(861): n is a, c, g, or t
  misc_feature (864)..(867): n is a, c, g, or t
  misc_feature (874)..(874): n is a, c, g, or t
  misc_feature (877)..(877): n is a, c, g, or t
  misc_feature (880)..(880): n is a, c, g, or t
  misc_feature (882)..(882): n is a, c, g, or t
  misc_feature (885)..(885): n is a, c, g, or t
  misc_feature (887)..(893): n is a, c, g, or t
  misc_feature (896)..(896): n is a, c, g, or t
  misc_feature (898)..(898): n is a, c, g, or t
  misc_feature (900)..(902): n is a, c, g, or t
  misc_feature (904)..(908): n is a, c, g, or t
  misc_feature (911)..(911): n is a, c, g, or t
  misc_feature (913)..(913): n is a, c, g, or t
  misc_feature (916)..(920): n is a, c, g, or t
  misc_feature (922)..(922): n is a, c, g, or t
  misc_feature (926)..(926): n is a, c, g, or t
  misc_feature (928)..(929): n is a, c, g, or t
  misc_feature (931)..(932): n is a, c, g, or t
  misc_feature (936)..(936): n is a, c, g, or t
  misc_feature (939)..(940): n is a, c, g, or t
  misc_feature (943)..(943): n is a, c, g, or t
  misc_feature (945)..(950): n is a, c, g, or t
  misc_feature (953)..(953): n is a, c, g, or t
  misc_feature (955)..(955): n is a, c, g, or t
  misc_feature (957)..(959): n is a, c, g, or t
  misc_feature (961)..(961): n is a, c, g, or t
  misc_feature (963)..(963): n is a, c, g, or t
  misc_feature (965)..(965): n is a, c, g, or t
  misc_feature (967)..(968): n is a, c, g, or t
  misc_feature (971)..(971): n is a, c, g, or t
  misc_feature (973)..(976): n is a, c, g, or t
  misc_feature (978)..(978): n is a, c, g, or t
  misc_feature (982)..(982): n is a, c, g, or t
  misc_feature (984)..(984): n is a, c, g, or t
  misc_feature (988)..(990): n is a, c, g, or t
  misc_feature (992)..(992): n is a, c, g, or t
  misc_feature (994)..(994): n is a, c, g, or t
  misc_feature (996)..(996): n is a, c, g, or t
  misc_feature (998)..(1000): n is a, c, g, or t
  misc_feature (1002)..(1002): n is a, c, g, or t
  misc_feature (1006)..(1007): n is a, c, g, or t
  misc_feature (1012)..(1013): n is a, c, g, or t
  misc_feature (1015)..(1017): n is a, c, g, or t
  misc_feature (1019)..(1021): n is a, c, g, or t
  misc_feature (1023)..(1025): n is a, c, g, or t
  misc_feature (1029)..(1029): n is a, c, g, or t
  misc_feature (1275)..(1275): n is a, c, g, or t
  misc_feature (1284)..(1284): n is a, c, g, or t
atggatgaaaatctaacttcctaaggcatgagaataatattgcatcctcaacaacaacttttatgatagattgatcaaattgctcctttactaatctctattaagctattaggtcacagcatggatatgccgaagttatgagattatttaatccaagttgctgcagagcgctgaaacgttatcatacttgaggattacgcttgganaattctaagttcgtacctagaatatataaagcgtgtgttatttttatatcctagttcttatataaatgcaacaatgttcaacagagtaggcgcagttatacttcttgtttccgatatgaagaaatcaaaggaattttataataatgtgatgggtatggaaataaagctgcagactgatgattgggttgaattttcaaaacagggaactgttatcgctctncacccggcaaagaaaaagaagcaaaacaaatcgataaagaataagagcatgttgataggattcaacgttagcgatctggaggcagtttgtagtgaccttgaaagtaaaaaagtaaagttctacaagaaactgactcaagaanaatttggaaaacatgctattatagaagatccagatgaacacctaatttcgttagtagaaatggctccaaaanaanaantnntnnnganncnttnttntnnngnnnnnnnncnnananannganaannggnagtaaannnnnannanannnaannntnaannannttntnnnnnanatnnnnnanaanntnncnganncaacnnannnccnanntanannnnccnnnnnnganaaagcnnntngannagnnctnnaaatgctntgnntannnnannannnnntnntntnnananacnnnnttacaanaanttnanttncnnnnnnntantntnnntnnnnnaanantannnnntntgananntnntttnaannganannnnnnccnanannntngnananngantnnnnanggananccannngnanangnnncngganngccannannntnnntnnnatcnaataaattaaagatccttgcaggcatagtgacgtttatagttatagtcatagtaatggctgaatcagtagttatagtacaagcaggacataggggtgtagttctttatttaggtgcagtcgaaaatcgcgtccttggagaaggagtacacttcattgttccatttgccgaacaagtaatacaattagaagtacgtacactcaagtttcaagccgaagcaacagctgcatctaatgacctacaggangtacaaacngttatagctttaaactatcatattgatccaaatgatgcaaacgtaatatatcagcaacttggagaaaattatgcagatagaataatagctcctactatacaagaatcagttaaagcaagtgttgcaaaatttaatgcagaggagctcataactaagagagaaacagctaaaggtgttatagccaatactattcgtaatactttatcagccagaaatataatcgttgaaacggtatttataactgactttaaattctcacagtcatttgctgatcagatcgaagcaaaagtagtagcattccaaaagtttctgacagagcagaataatctaaaggccatccaagtagtcgcaaaccaaacagttgtacaagctcaagcacaagcaagagcaaatgtagctaaagctggtggtgaatcacaagcaatcaaaattattactgagcaactaagacaaagcccacaatacttgcaatggcaggctatcaatagatggaacggtcaaatgccctatgctcttggtagtagtggatttccttttttccagctgccaacaataccccagtcatcacaaccacaacagcaacaacaacaacagcaacagccgctgctgcagcaaaatcaaacaagataattgcaaacaacttccctcccttgcaacgctaccagaaacagaagttttttgatattgagcatagttcaaaagacataaatccatttttctaaccgctagcagctcatcagctatttaatattctgtctaatcggctcaatagctcttgattttctattggctttcggatgaactcatttttatcaaatataccttgatatattccataaggcatttcaccagctgtcagaaaacataccttaactttatcatctatcctctttatctccttgtataattcaaagccattcattttgggcattctgatatcaagtatcagcaagtcatatgaaccagcttcaaaattttctaatgctagcagggagtcattgaatgcatcaactttgagtccattttcttctaaagcttcctttaatgctaaattgacatctggttcatcgtctactaccaaaattctctttttcattatcgacgattaattctctcttttaggtctatagtctgtggctcctgcttgatctcatgctgtttttcatttaatggcaggctgaacgtaaaggtagctcctttttctacttgccctctcccatctttaataattttgttattctcagcccatatccttcctccatgagcttctatgatgcttttggatatgaataacccgagccctgtcccttgataagattttgaggtaaactttgaaaataacctgggcattatttcaggatctatgccaataccagtgtctgtgacgctgacaagagcctcggcgtcaatatttttcacgctaatacttatagttcccgctcttccatctttctcctttgcttcagtaaatttaatagcgttgtttaaaaggttagaaatcacttgggttatccttgctttatctgcctctacaaaaatatcatagggctgatataataattttatcatatttttctgttggatgttcttaataaagtctatatttgctacaatatcctctatagtatttgatattacatcatttagattaaattgctccttttttagatttagtgattggctctcaatctttgtaacgtctaatatatcatttgtaagtctccctaaccttcttgcatttcttacaatggcatccaaaagttcgctctgtttggtatcctttatttttgactgaagaatttgtgtcaagccaagtattggctgtattggcgttcttaattcatgtgcagctacattgataaattcattcttcatgttatccgcttcttttagcttttcatattgaatacgaattaattcttctctttgccttaacctttcattggtttctctcaaccttgcattatactgaatacttgataatgccagtgctataatattaatgaagtaaccagcatctttgagaacatgagccacgttgtgtgctgtatcaaaagatgcagcagaataagacattatgatttgagaaaagatatctactatcaaataacctaatattcctttatagaagacgtcagttctttcatataacttatttttataaaaataaaataaagctatcaaaaatagcacaagcgaaggaagctcatatggtctatgtacaggagaattatccagtacgctggcaggaaaaaccaagaatagtgaacttatggcagcacttgcagcaagaatagcaaggactgttaaataaactttgagagtattttgtaatttcacccgtcttcctgcttcttcatgttgctcttgttcgtcttttagtgaggataaagttgggtatttaacaattgcaataaccaggatggcactaagaaatattcttccagcaaaccaggtctgaggaatgaagtattttagaaatataggattatcaattgagctataagatattatcacatgcaataaatcaatcaaggcactggttaggaatccaattcctacaaagaggctgaatttatcgtctaatgtaagagctcttgaaagataagagaatgccaataccgcagcaagtattactgcaaacaactctatgtagaaatgatgaatctcagatgacagccaagtattaggattagcagatagaaccgctattatt

SEQ ID NO: 1131 - DNA, 4000 bp, Escherichia coli
  misc_feature (213)..(213): n is a, c, g, or t
  misc_feature (240)..(240): n is a, c, g, or t
  misc_feature (1240)..(1240): n is a, c, g, or t
  misc_feature (1684)..(1684): n is a, c, g, or t
  misc_feature (1985)..(1985): n is a, c, g, or t
  misc_feature (1988)..(1988): n is a, c, g, or t
  misc_feature (2545)..(2545): n is a, c, g, or t
  misc_feature (2614)..(2614): n is a, c, g, or t
  misc_feature (2800)..(2800): n is a, c, g, or t
  misc_feature (3112)..(3112): n is a, c, g, or t
  misc_feature (3970)..(3970): n is a, c, g, or t
ttgatacggctgctatacacgcttactccgtcaatatggctgtcaggtcttgcgaaataaatgtattcaaacacgcatctggcctgtttttcaggggcaagtgccatagtcatatcagactcaatgcccttttcaggagtgatggtgataacctctcccggctctatatccctgacaaactctgcaccgattgtatcaagtgcacaggtctcngatgtaacgatatatgcattgtctctntttccgatgcaaagaggcttaaaaccaaatgggtctctggctgcaataagctttctcgggctctcaaccacaagtgcataggctcccttaagcttctggcaggcacgtctgaccgcctcctccgctgtttttgagttaagacgctctctggcgatatgataagctataacctcagagtcgattgtggtctggaaaattgctcctgtatactcaagctccttgcgaagctcctttgcgttaatgaggtttccgttgtgtgccatggcaagtgtgcccttgacataatttaatacgagaggctgtgcattctcacgtgttgatgagcctgctgttgaatagcgcacatgtcccactccgatatcacccttcataggctctaaaatatcaggagtaaatacctcatttacaaggcccatacccttgtgtgtggtcacctttccctttggtccgtgtgtatcactcactgcaataccacagctttcctgtcctctgtgctgaagcgcaaaaaggccataatagatagtggatgcgacatttcctccatcaaaatcatacatgccgaacacaccacactcctcatgaagctcatcaaatacatggttatgctcgtcaatatcagaacacctttttaattttgtaccggtatgactttttgtatctatactagtatttatatactgatttatgttattgtcctggttcataatatctccgtttataattgcgaaatagtaacgcggaataaataatatattagcggctgaatttgcttcctgtaagaagctcaaatgcctctttatatttctctacagtcttcacaacaacctcatcaggtaaaagaaggtcattgtccggatttgccttgagccagtctcttacatactgcttgtcaaatgaaggctgtccctgtccaggcttatatccatcaagtggccagaagcgtgagctgtcaggtgtgagcatctcatcggcaagcactacctcaccctgctcatttaanccaaactcaaacttggtatctgcgatgatgatgccctttgtaagagcatactctgcacatttcttgtagagagcaattgtataatcgcgaatcttctctgcgtactctctgcccttctcaggataaatcttctctaatacttctactgatttttcgaatgagatattttcatcatgatctccaagatcagccttggtagatggtgtataaataggctcagggagcttatcagactcaacaagtccctccggaagtctgattccgcagactgtaccgttctcctggtagcttgcccagccgcttcctgtgatatatccacgaactatacactcgattggaagcatctcaagcttcttgcagagcatgctgtttccgttgaacctgtcctgaccgaagaactccggcatatcctttgcgtctactgaaatcatatggttaggaacnacatcctttgtgaattcaaaccagaacttagacatctgtgtgaggatggctcccttgtctgtaattttattctttaaaatatggtcaaaagcggaaatacgatctgttgcgaccataataaggctgtccccgttatcatatacttctcttacttttccttctttgaatggtttaaattcctgcatgattgtcctccatcttatgtgtaatttattttacaaatcaaatgctacccttaaattatataccagctcaatttgtaaagtcaacgtatattataagtttttttaaataattttgnacnatttataagcaattcttatatttattattatatctttaatatatcaaaacaaaagctccggttcaaaccctttgtctgcgccggagcctatataatacaaattttatttaacgataagtgactttcctgtcatctcttttggctgtggaagtcccataatctcaagcagtgttggagcgatatctgcaagacatccgccctcacgaagcttgtaagaagggtcagcgtttacaagaatgaaaggaacaggattggttgtatgagctgtatgaggttttcctgtctcataatcaatcatcttctctgcgtttccgtggtcagcacagatgaataatactccatccacatccttgattgcctgaactgcatcacctacgagtgaatcaactctctcaacagcctttacagcagccggaatcacacctgtatgtccaaccatgtcagggttagcaaagttgatgataataacatcatacttatctgacttgatagcctcaacaagatccattccaacctcaggagcgctcatctcaggctttaagtcatatgttgcaacntccttaggactgtttacaagaagacgtgcctcatcgatattcggctcctctactccaccattaaagaanaaggttacgtgtgcatacttctctgtctctgcgagacgaagctgtttcttgccatttgctgcaagatactcaccaaatgtattcttgatttcttccttctcaaaagcgataagcttgttaggaattgactcgtcataatccttgaagcatacaaatgttgtcttaaggaatgggcgctcaaagccngtaaacttatcatcgcaaaatgctcttgtcatctcacgagcacggtccggacggaagttgaagaagataacagaatcattgtcctttacaacagataccggtgtgccatcctcgtttgtgataactgtaggaagcacgaactcatctgtaacgtcatttgcgtatgactcctccatagcctttacagggcatgtagcttttacgccttcacccttagtgagtgaatcataagccttctgcacacgatcccagttgttatctctgtccattgcatagtaacgtcctgaaagagatgcaatctttcctacaccnatttccttcatcttggcgagaagctgctcgatatagtccttgcctgatgcaggaggtgtatcacgaccatcaaggaatgcgtgtacatatactctgtcaaaattctctttcttgcaaagctcaagaagtccgtaaagatgctcgatatggctgtgaactccaccatctgaaagaagtccccaaagatgcagatcggagtcattcttcttgcagttttcgattgcagaaattaataccttgttcttgaagaaatcaccatcagcaattgcctttgtgattcttgtaagatcctgatatatgatacggcctgcgccgatattcatatgtcctacctcagagtttcccatctgtccgtcaggaagtccaactgcaagacctgaagctgcgccctttacaaaaggacactctgccatcaatttatccataacaggggtatttgccatagctatggcatttccctctttgtggtcacttaagccgtaaccatcaagtaccattaatactaccggtttcttactcatttatatttcctctattcttcatatgaggcttgcaaaatgctctattacagtgacatatgcaagctcacaaaaaatttcattacataataaatgccactaaatgcagctaagctggtgaatttagtgacatttagttattgtgattgtcaaatcaaatattaaattatgatttaataattacttgtagtttacgatctttccaaaatcagccttgagtgaagcgccaccaactaatccaccgtcgatgtcaggctttgcaaaaagctctgctgcatttcctgcatttacagatccgccgtactggatacgaactgaatctgctgtagcctgatcatanatctcagctacacactcacgaattgcaccg

SEQ ID NO: 1132 - DNA, 4000 bp, Escherichia coli
  misc_feature (63)..(63): n is a, c, g, or t
  misc_feature (148)..(148): n is a, c, g, or t
  misc_feature (154)..(154): n is a, c, g, or t
  misc_feature (406)..(406): n is a, c, g, or t
  misc_feature (861)..(861): n is a, c, g, or t
  misc_feature (874)..(874): n is a, c, g, or t
  misc_feature (1554)..(1554): n is a, c, g, or t
  misc_feature (2016)..(2016): n is a, c, g, or t
  misc_feature (2053)..(2053): n is a, c, g, or t
  misc_feature (2142)..(2142): n is a, c, g, or t
  misc_feature (2304)..(2304): n is a, c, g, or t
  misc_feature (2346)..(2346): n is a, c, g, or t
  misc_feature (2358)..(2358): n is a, c, g, or t
  misc_feature (2379)..(2379): n is a, c, g, or t
  misc_feature (2388)..(2388): n is a, c, g, or t
  misc_feature (2408)..(2408): n is a, c, g, or t
  misc_feature (2484)..(2484): n is a, c, g, or t
  misc_feature (2547)..(2547): n is a, c, g, or t
  misc_feature (2769)..(2769): n is a, c, g, or t
  misc_feature (2943)..(2943): n is a, c, g, or t
  misc_feature (2952)..(2952): n is a, c, g, or t
  misc_feature (2984)..(2984): n is a, c, g, or t
  misc_feature (3024)..(3024): n is a, c, g, or t
  misc_feature (3072)..(3072): n is a, c, g, or t
  misc_feature (3255)..(3255): n is a, c, g, or t
  misc_feature (3432)..(3432): n is a, c, g, or t
  misc_feature (3435)..(3435): n is a, c, g, or t
  misc_feature (3525)..(3525): n is a, c, g, or t
tctactgcggggactgatgtagctcgtcgtaagtccataacccgctgcggccaaacttttttnaagggccggcacatccaatagctccttatccacggtggctttaaaactcccactggcatagcgcacctgaatttgttccataccnggagtnccctcagcaatgctatgcgcactgtgcgcgcagccggcgcaggtcattcctgataaagcccattgaatttgctcttttgccatggttcaaaggtaggtattgcgaatggtaaaaagtatctttgaatatccgcataactagttacacctttcatgaatccacttatagattttcccgcaacgccgcatcaagcacttgcttttgaccgtattgatccagaacattttttacccgcattggaacattggattnaggtatcaaaggagcgtcaggatgccattgtggctaattctgaggcacccacatttgaaaataccgtggccgctctagaattctcatcgctggaattgaataaagtaagcagttgtttttttaacctcaatagtgcagagacgaacgacgcaattcaagaaattgcgcgcactttttcgccgaagttgacggcatttagtagcgagactttgttgaatgagcctttgtttttgcgcattcagactgtctatgaatccgagggtaaggacctagcgttagaagcacagcgtttattgaaggaaacctatgagagttttgtccgtaatggtgcggctttaaaaggcgatgaccggaatagattaactgttctaaatgaagaattaagcacgttgtcattgacgtttggggagcatattttgtccgaaacgaaggcgtttcattaccatactacttcngccgaggaccttnaaggaattcctgaagacgtggttgaatctgccgctcaactcgccgaacagcaggggaaagaaggctatgtattgggtttagatatgcccacctacatggcagtgatgaaatatgccgaccgctccgaattgcgcgcgcatttttaccgcgcttatggctctcgtggtgctaaagagaacgaaaacaacaatgagcaagtcatcacagacctcgtgaacaaacgtatggagcgcgcacaattgcttgggttcgattctcatgcccagctcaccttgagcaagcgtatggcgaaaacgccgcatacggtgcttaactttttggaccacctacttgcggtcgctaaaccagccgcagagaaagatttggaagcggtggctgactatgcttcagcacaaggtgctgaacttccacttcagccttgggattttagttattggtctgaaaaattcaagatggagcgtctttccctagacgatcaggcgttgaagccctattttaaacttgaaaatgttttagcgggtgcctttaccgttgcggcccgattgtttggactccgtttcgaacacaataccgagctccccgtgtaccataaggacgttgatgcctatgaagtttttgatgccaacggtaattttttaagtctcttttacgcggactttttccctcgagacggaaagcgngcaggagcttggatgaccagctaccaaagcatgcatacgatgaagggacaggaagtacgaccacacattagtattgtgtgcaacttcaccaagcctacagcatcaaagccatcactactgaccttcaatgaagtcacaaccttattccatgagtttggacatgccttgcacggaatgatggcgcgtgggacgtacccgtcactcacgggtaccagtgtttattgggattttgtggaacttccgtctcaaatcatggaaaattggtgctaccagcctgaagctttggcgctcttcgctaaacattaccagaccggtgcagtgctgccaacagaatttattgataagataaaagaaagtcagacctttttagaggggtacatgacgctgcgtcagctcaactttggctatttagatatgagttggcaccacaggactgaccgcttcgaaggcagtgtggctgcncatgaaaaggcggcaacggagcgaacttccttatttncagaagttgccggaaccctttcgagcaccgcatttagtcatattttccagggcgggtatagtgccggctactacagttacaaatgggcngaggtattagatgcagatgcttttgaacggtttgaagaggaaggattgttcaatccaaacgtagctgccgatttctcggttgtcttacaaagtggtggtacggttccaccggatgaactgtatcgaaactttagaggacgtgatccaaaggtagacgccctnttaaagcgtgcgggaatttcggcttaatgcaaactacgcacnttgtactgaaancgccaatacaaagcaattgcngcgagtaanagtcctatagccaacccaanccaaacgcctaaaggacctatggccattaccacgcccaggtagtagcacagcggtacagcaacaacccaataggcnataaaggcaataatggtaggaatgttaacgtcctgaacacctcgaagcgcgcctaaggttgtngcttggagtccatctggcaattggaaaataccagcggcaatcatcagcacggcagtgtattgcaatacttcaggatcggagctgtaaaattcgggtacaatattgcgcaatgcaatgagcagtcccatggtcaataccatcatggccagagttaggtggaacaagctttggccagctaagcgaagcataggaaagtctttcttgcccaattgattccccacnctaatggttgctgctgccccaagtccgcttaccatcatgtagctgacagaagcgatgttgagtgcgatctgatgtgcggcttgttgcacaggacctatcatcccgacgatcactccgctcatagcaaaagcaccagcttcaaatacatattgcaaaccacttgggacaccaatnactaatatntctcgaatgcttttccatgagatttggctgtngcgccaatggctccagtaactggcaaatttttggtgcttncggatgtacaaagccatccccgcaagcattaagaaacgagtgcttaangtagctatagcagcaccggctaggcccaactccgggaacggtccccaacctgtaattagtggatagttcaataatatgttcagcaaattggctaccagactaacgcgcataccggccttcgtatcgctcaatccttccgcgaattgcttaaaggcaaaaaagctcatcatggggacgatcganagcccaaccaaatggatatatggcaatgaagcctcaacgacacgtgcatcctgacctaaaaggtgcgcaaattgagcaaaaagggccagaacaccgtatacgagtaatcccaatatggaatttaaaacaagcccgttcttgaagtatttcacggcctctgcaggatcttctttgccntcngcacccgcaattaaaggggtaaggccgtacgcaacaccaatagcaaaaaccatgggtatgatgagtatagaaacggctagggaaacggcngctaaaggaatagtgcctaagaacttacccaccatgatagaatctgcaacagagacaagaatttgtcctaattgcccgatcatgaccgggtaggccaattttagactaatcccgtattgggatttatatgtattccattgataggccaattcggcttagagattatagcgctctacctcacgggtataaaacacctctgcctctgcgatcaatccttctagaattttggtcaaatcaccttcactttcatcgccgatatcatccaaccactttatctcatcgttctcgagattgagaatgaaggcaggaaactctgtgtgaacgatataaaccgcatccggtagatcggtattgtctgcaactaagaatttaggaaagtccatttgtatccgttttgaaaggcaaaagtacgtctatttacgtgcgtatgtgcttacgtcgtcagcactaatttctgaaccgcctaaaatatgta

SEQ ID NO: 1133 - DNA, 4000 bp, Escherichia coli
  misc_feature (146)..(146): n is a, c, g, or t
  misc_feature (407)..(407): n is a, c, g, or t
  misc_feature (1985)..(1985): n is a, c, g, or t
  misc_feature (1993)..(1993): n is a, c, g, or t
  misc_feature (2931)..(2931): n is a, c, g, or t
  misc_feature (2947)..(2947): n is a, c, g, or t
  misc_feature (2989)..(2989): n is a, c, g, or t
  misc_feature (2998)..(2998): n is a, c, g, or t
  misc_feature (3027)..(3029): n is a, c, g, or t
  misc_feature (3033)..(3034): n is a, c, g, or t
  misc_feature (3037)..(3038): n is a, c, g, or t
  misc_feature (3043)..(3043): n is a, c, g, or t
  misc_feature (3046)..(3047): n is a, c, g, or t
  misc_feature (3050)..(3050): n is a, c, g, or t
  misc_feature (3053)..(3053): n is a, c, g, or t
  misc_feature (3055)..(3058): n is a, c, g, or t
  misc_feature (3062)..(3062): n is a, c, g, or t
  misc_feature (3065)..(3066): n is a, c, g, or t
  misc_feature (3068)..(3069): n is a, c, g, or t
  misc_feature (3076)..(3077): n is a, c, g, or t
  misc_feature (3079)..(3079): n is a, c, g, or t
  misc_feature (3081)..(3081): n is a, c, g, or t
  misc_feature (3084)..(3084): n is a, c, g, or t
  misc_feature (3089)..(3092): n is a, c, g, or t
  misc_feature (3095)..(3095): n is a, c, g, or t
  misc_feature (3098)..(3099): n is a, c, g, or t
  misc_feature (3102)..(3102): n is a, c, g, or t
  misc_feature (3104)..(3104): n is a, c, g, or t
  misc_feature (3107)..(3109): n is a, c, g, or t
  misc_feature (3112)..(3112): n is a, c, g, or t
  misc_feature (3114)..(3114): n is a, c, g, or t
  misc_feature (3116)..(3117): n is a, c, g, or t
  misc_feature (3120)..(3120): n is a, c, g, or t
  misc_feature (3122)..(3125): n is a, c, g, or t
  misc_feature (3128)..(3129): n is a, c, g, or t
  misc_feature (3131)..(3131): n is a, c, g, or t
  misc_feature (3134)..(3136): n is a, c, g, or t
  misc_feature (3142)..(3143): n is a, c, g, or t
  misc_feature (3146)..(3147): n is a, c, g, or t
  misc_feature (3149)..(3150): n is a, c, g, or t
  misc_feature (3152)..(3153): n is a, c, g, or t
  misc_feature (3155)..(3155): n is a, c, g, or t
  misc_feature (3158)..(3161): n is a, c, g, or t
  misc_feature (3163)..(3163): n is a, c, g, or t
  misc_feature (3165)..(3165): n is a, c, g, or t
  misc_feature (3168)..(3168): n is a, c, g, or t
  misc_feature (3170)..(3173): n is a, c, g, or t
  misc_feature (3176)..(3176): n is a, c, g, or t
  misc_feature (3179)..(3180): n is a, c, g, or t
  misc_feature (3182)..(3183): n is a, c, g, or t
  misc_feature (3185)..(3190): n is a, c, g, or t
  misc_feature (3192)..(3192): n is a, c, g, or t
  misc_feature (3194)..(3195): n is a, c, g, or t
  misc_feature (3199)..(3199): n is a, c, g, or t
  misc_feature (3201)..(3203): n is a, c, g, or t
  misc_feature (3209)..(3210): n is a, c, g, or t
  misc_feature (3213)..(3216): n is a, c, g, or t
  misc_feature (3219)..(3219): n is a, c, g, or t
  misc_feature (3222)..(3222): n is a, c, g, or t
  misc_feature (3224)..(3227): n is a, c, g, or t
  misc_feature (3229)..(3231): n is a, c, g, or t
  misc_feature (3233)..(3233): n is a, c, g, or t
  misc_feature (3238)..(3240): n is a, c, g, or t
  misc_feature (3242)..(3242): n is a, c, g, or t
  misc_feature (3244)..(3244): n is a, c, g, or t
  misc_feature (3247)..(3251): n is a, c, g, or t
  misc_feature (3253)..(3254): n is a, c, g, or t
  misc_feature (3257)..(3258): n is a, c, g, or t
  misc_feature (3261)..(3261): n is a, c, g, or t
  misc_feature (3264)..(3266): n is a, c, g, or t
  misc_feature (3269)..(3272): n is a, c, g, or t
  misc_feature (3275)..(3275): n is a, c, g, or t
  misc_feature (3278)..(3279): n is a, c, g, or t
  misc_feature (3281)..(3281): n is a, c, g, or t
  misc_feature (3285)..(3288): n is a, c, g, or t
  misc_feature (3291)..(3291): n is a, c, g, or t
  misc_feature (3293)..(3293): n is a, c, g, or t
  misc_feature (3296)..(3296): n is a, c, g, or t
  misc_feature (3298)..(3300): n is a, c, g, or t
  misc_feature (3306)..(3307): n is a, c, g, or t
  misc_feature (3312)..(3314): n is a, c, g, or t
  misc_feature (3316)..(3316): n is a, c, g, or t
  misc_feature (3320)..(3321): n is a, c, g, or t
  misc_feature (3326)..(3327): n is a, c, g, or t
  misc_feature (3329)..(3329): n is a, c, g, or t
  misc_feature (3332)..(3332): n is a, c, g, or t
  misc_feature (3341)..(3341): n is a, c, g, or t
  misc_feature (3344)..(3344): n is a, c, g, or t
  misc_feature (3348)..(3350): n is a, c, g, or t
  misc_feature (3352)..(3352): n is a, c, g, or t
  misc_feature (3356)..(3357): n is a, c, g, or t
  misc_feature (3359)..(3359): n is a, c, g, or t
  misc_feature (3361)..(3362): n is a, c, g, or t
  misc_feature (3364)..(3369): n is a, c, g, or t
  misc_feature (3371)..(3372): n is a, c, g, or t
  misc_feature (3376)..(3376): n is a, c, g, or t
  misc_feature (3381)..(3381): n is a, c, g, or t
  misc_feature (3383)..(3386): n is a, c, g, or t
  misc_feature (3389)..(3390): n is a, c, g, or t
  misc_feature (3392)..(3393): n is a, c, g, or t
  misc_feature (3395)..(3397): n is a, c, g, or t
  misc_feature (3399)..(3400): n is a, c, g, or t
  misc_feature (3405)..(3405): n is a, c, g, or t
  misc_feature (3408)..(3408): n is a, c, g, or t
  misc_feature (3414)..(3414): n is a, c, g, or t
  misc_feature (3416)..(3417): n is a, c, g, or t
  misc_feature (3419)..(3421): n is a, c, g, or t
  misc_feature (3423)..(3423): n is a, c, g, or t
  misc_feature (3425)..(3428): n is a, c, g, or t
  misc_feature (3431)..(3431): n is a, c, g, or t
  misc_feature (3433)..(3437): n is a, c, g, or t
  misc_feature (3441)..(3441): n is a, c, g, or t
  misc_feature (3443)..(3443): n is a, c, g, or t
  misc_feature (3446)..(3448): n is a, c, g, or t
  misc_feature (3450)..(3451): n is a, c, g, or t
  misc_feature (3453)..(3456): n is a, c, g, or t
  misc_feature (3458)..(3458): n is a, c, g, or t
  misc_feature (3461)..(3462): n is a, c, g, or t
  misc_feature (3464)..(3464): n is a, c, g, or t
  misc_feature (3466)..(3467): n is a, c, g, or t
  misc_feature (3470)..(3471): n is a, c, g, or t
  misc_feature (3473)..(3473): n is a, c, g, or t
  misc_feature (3475)..(3476): n is a, c, g, or t
  misc_feature (3478)..(3478): n is a, c, g, or t
  misc_feature (3481)..(3481): n is a, c, g, or t
  misc_feature (3485)..(3485): n is a, c, g, or t
  misc_feature (3487)..(3487): n is a, c, g, or t
  misc_feature (3489)..(3491): n is a, c, g, or t
  misc_feature (3493)..(3494): n is a, c, g, or t
  misc_feature (3496)..(3496): n is a, c, g, or t
  misc_feature (3499)..(3499): n is a, c, g, or t
  misc_feature (3502)..(3502): n is a, c, g, or t
  misc_feature (3509)..(3510): n is a, c, g, or t
  misc_feature (3515)..(3515): n is a, c, g, or t
  misc_feature (3517)..(3521): n is a, c, g, or t
  misc_feature (3524)..(3524): n is a, c, g, or t
  misc_feature (3528)..(3528): n is a, c, g, or t
  misc_feature (3530)..(3530): n is a, c, g, or t
  misc_feature (3533)..(3533): n is a, c, g, or t
  misc_feature (3536)..(3536): n is a, c, g, or t
  misc_feature (3539)..(3539): n is a, c, g, or t
  misc_feature (3543)..(3543): n is a, c, g, or t
  misc_feature (3545)..(3546): n is a, c, g, or t
  misc_feature (3550)..(3550): n is a, c, g, or t
  misc_feature (3552)..(3552): n is a, c, g, or t
  misc_feature (3554)..(3555): n is a, c, g, or t
  misc_feature (3560)..(3561): n is a, c, g, or t
  misc_feature (3563)..(3566): n is a, c, g, or t
  misc_feature (3569)..(3569): n is a, c, g, or t
  misc_feature (3575)..(3578): n is a, c, g, or t
  misc_feature (3581)..(3582): n is a, c, g, or t
  misc_feature (3584)..(3584): n is a, c, g, or t
  misc_feature (3586)..(3586): n is a, c, g, or t
  misc_feature (3588)..(3590): n is a, c, g, or t
  misc_feature (3592)..(3596): n is a, c, g, or t
  misc_feature (3599)..(3599): n is a, c, g, or t
  misc_feature (3604)..(3604): n is a, c, g, or t
  misc_feature (3606)..(3606): n is a, c, g, or t
  misc_feature (3608)..(3608): n is a, c, g, or t
  misc_feature (3610)..(3612): n is a, c, g, or t
  misc_feature (3616)..(3616): n is a, c, g, or t
  misc_feature (3619)..(3622): n is a, c, g, or t
  misc_feature (3624)..(3624): n is a, c, g, or t
  misc_feature (3627)..(3628): n is a, c, g, or t
  misc_feature (3631)..(3631): n is a, c, g, or t
  misc_feature (3638)..(3641): n is a, c, g, or t
  misc_feature (3646)..(3646): n is a, c, g, or t
  misc_feature (3648)..(3651): n is a, c, g, or t
  misc_feature (3653)..(3654): n is a, c, g, or t
  misc_feature (3656)..(3656): n is a, c, g, or t
  misc_feature (3660)..(3660): n is a, c, g, or t
  misc_feature (3667)..(3668): n is a, c, g, or t
  misc_feature (3672)..(3673): n is a, c, g, or t
  misc_feature (3675)..(3675): n is a, c, g, or t
  misc_feature (3677)..(3680): n is a, c, g, or t
  misc_feature (3682)..(3684): n is a, c, g, or t
  misc_feature (3687)..(3688): n is a, c, g, or t
  misc_feature (3690)..(3690): n is a, c, g, or t
  misc_feature (3692)..(3692): n is a, c, g, or t
  misc_feature (3695)..(3696): n is a, c, g, or t
  misc_feature (3700)..(3700): n is a, c, g, or t
  misc_feature (3703)..(3704): n is a, c, g, or t
  misc_feature (3706)..(3707): n is a, c, g, or t
  misc_feature (3710)..(3713): n is a, c, g, or t
  misc_feature (3715)..(3716): n is a, c, g, or t
  misc_feature (3718)..(3718): n is a, c, g, or t
  misc_feature (3721)..(3722): n is a, c, g, or t
  misc_feature (3725)..(3725): n is a, c, g, or t
  misc_feature (3729)..(3730): n is a, c, g, or t
  misc_feature (3732)..(3732): n is a, c, g, or t
  misc_feature (3734)..(3735): n is a, c, g, or t
  misc_feature (3737)..(3738): n is a, c, g, or t
  misc_feature (3740)..(3740): n is a, c, g, or t
  misc_feature (3742)..(3742): n is a, c, g, or t
  misc_feature (3744)..(3745): n is a, c, g, or t
  misc_feature (3747)..(3748): n is a, c, g, or t
  misc_feature (3750)..(3751): n is a, c, g, or t
  misc_feature (3753)..(3753): n is a, c, g, or t
  misc_feature (3756)..(3756): n is a, c, g, or t
  misc_feature (3758)..(3759): n is a, c, g, or t
  misc_feature (3761)..(3761): n is a, c, g, or t
  misc_feature (3763)..(3765): n is a, c, g, or t
  misc_feature (3768)..(3768): n is a, c, g, or t
  misc_feature (3770)..(3770): n is a, c, g, or t
  misc_feature (3772)..(3772): n is a, c, g, or t
  misc_feature (3774)..(3778): n is a, c, g, or t
  misc_feature (3780)..(3782): n is a, c, g, or t
  misc_feature (3785)..(3786): n is a, c, g, or t
  misc_feature (3789)..(3789): n is a, c, g, or t
  misc_feature (3791)..(3791): n is a, c, g, or t
  misc_feature (3793)..(3793): n is a, c, g, or t
  misc_feature (3795)..(3795): n is a, c, g, or t
  misc_feature (3797)..(3799): n is a, c, g, or t
  misc_feature (3801)..(3801): n is a, c, g, or t
  misc_feature (3806)..(3809): n is a, c, g, or t
  misc_feature (3817)..(3817): n is a, c, g, or t
  misc_feature (3820)..(3820): n is a, c, g, or t
  misc_feature (3822)..(3822): n is a, c, g, or t
  misc_feature (3824)..(3824): n is a, c, g, or t
  misc_feature (3826)..(3827): n is a, c, g, or t
  misc_feature (3830)..(3835): n is a, c, g, or t
  misc_feature (3837)..(3837): n is a, c, g, or t
  misc_feature (3841)..(3841): n is a, c, g, or t
  misc_feature (3845)..(3845): n is a, c, g, or t
  misc_feature (3848)..(3848): n is a, c, g, or t
  misc_feature (3855)..(3855): n is a, c, g, or t
  misc_feature (3864)..(3864): n is a, c, g, or t
  misc_feature (3866)..(3867): n is a, c, g, or t
  misc_feature (3869)..(3870): n is a, c, g, or t
  misc_feature (3873)..(3873): n is a, c, g, or t
  misc_feature (3875)..(3875): n is a, c, g, or t
  misc_feature (3878)..(3883): n is a, c, g, or t
  misc_feature (3885)..(3885): n is a, c, g, or t
  misc_feature (3887)..(3887): n is a, c, g, or t
  misc_feature (3891)..(3893): n is a, c, g, or t
  misc_feature (3895)..(3895): n is a, c, g, or t
  misc_feature (3899)..(3903): n is a, c, g, or t
  misc_feature (3905)..(3905): n is a, c, g, or t
  misc_feature (3911)..(3912): n is a, c, g, or t
  misc_feature (3915)..(3916): n is a, c, g, or t
  misc_feature (3918)..(3918): n is a, c, g, or t
  misc_feature (3922)..(3925): n is a, c, g, or t
  misc_feature (3927)..(3927): n is a, c, g, or t
  misc_feature (3929)..(3932): n is a, c, g, or t
  misc_feature (3934)..(3938): n is a, c, g, or t
  misc_feature (3945)..(3947): n is a, c, g, or t
  misc_feature (3949)..(3949): n is a, c, g, or t
  misc_feature (3951)..(3951): n is a, c, g, or t
  misc_feature (3954)..(3955): n is a, c, g, or t
  misc_feature (3957)..(3958): n is a, c, g, or t
  misc_feature (3960)..(3961): n is a, c, g, or t
  misc_feature (3963)..(3971): n is a, c, g, or t
  misc_feature (3973)..(3973): n is a, c, g, or t
  misc_feature (3976)..(3977): n is a, c, g, or t
  misc_feature (3980)..(3982): n is a, c, g, or t
  misc_feature (3984)..(3987): n is a, c, g, or t
  misc_feature (3990)..(3992): n is a, c, g, or t
  misc_feature (3995)..(3996): n is a, c, g, or t
cgagcacggttccggccagccccgcgagccgatcgtagacccgacgcgtgaccgcctccgcatacacctccgccatggccgcctggtttgccggccgctccgtgggccgcatcccggcgagccgcttcctttccacgtcgctgcgnatccgcacggcggcgagcggtcccaccaactccgccgccaccgacgacttgccgctgcccgatgcgccgctggtcaccaccatcaccggccgccggccgaccgcgagccgctcagcgaggtcgacataacgcaaggcctcgtcccgcgacgtggcgtccccctgccccgcgcggatcgcggcgatcgacgcccgcacgaccgcccggtaggcctcgtagacgggcatcacggcgatcgactggtgatcggcggcggcctcnacccagctactgagcacctctgccgccaggtcggcgcggccccgtgacttgaggtccattgtcaagaaggccacgtcgttggccacgtcgatccatcgcaggttgtcgctgaactcgatcgcgtcgaatggcgtcatccgaccgtcgtggagcacgatgttggcgaggtgcaggtcgccatggcactcgcgaatgcggcccgctgcctgccgcgcggcgaggagcggagtcgcggcaaggagccggcatcgcagccagtcgtcgaggcggtcggcgcggtccgcggcctgcggcaggtgcgtgcggagggcagcgaggttgactgccactgcctcgcacaccgagtcggccgtgccccatggctccccctcgcgggccaccggcaggcacgcctcgatcgccgcgatcgcctcgcccagtgttcggcagtcagccgcggtcagtcggccggcctcgaaccgggcgtcgagccggtcgccctcgtcgaactgcacgagcttcaccgcccattcgactggttcgccgtcgccgctcacgcggggcgcgtcgccgctgccggtgattggcacggccgccacgtagagctccggcgcaaaccggctgctcacgcggacctcgccctcgcacgaccgccgtcgccgatcaaccgtagagtaatcgacgaaccccagcgacaccggcttcttgagcttgtaggcgaagggccccgtgaggatcacccacgagatgtgcgtctccaccagccgaatgcggcccgtcggatgcgggtacgccgccggatcgagcagccgctcaatgagcacgggcctcggaaacgggggcgtcatcatgagggaagtttacgtcgccggcccctgcccctcgggctcaagtgcgtcgattacctcgatcatcgacgccacatccccagacgacactcgggccgttcgccgcgtggcggtcgccacgcaggtctcgtggagcatcgccggatcgaccgccgcgaggccacggtagcggcgaaccgtcatctcgcccgactcgcggccgcggtcggccaaggcggcgagttccggctccgaaaacgcgatctcgatctctcccgacaccaccacctcgccccacggcggacgcacgacctcgatcctccccgcatcgaggagcggccgcatccagcggtggaagaagaggagcaccaggtatccgcagtggatgccgtcggcgtcggggtcggtgagcacgagcacgcggtcgtaccggagccgccgcgggtcgcacgtcgcctcgaaaccggcgccaagcgccgccgccagcgggccgaagaagggatggctctcgaccttggcccgcgacgcccgggccgcgttgagcggcttgccctgcatcggcagcaccgcctggcagagggggtcgcggacgagggccacagcagatgcggcggagtctccctccaccacgaagagttccgcaccggagccgcggccgtgcgtggcggaatcgtccagtttcgcaggggccccgtagcggtcgcgaaaaaccttcgtcatggcttctccacccaattgttgcaggccgggccgtggttcggcatactggaanagaacacngcgatcaaccactgatcgcccacttttttggaaccgctcctgaccgcgtgaacctcccgtcgactgcctccgtccggaatcccggacgacgcgatgggatgtggtcagcgttcgcaggttccctggtggccatgccgcccgttcctcgctgcccccatccctcgcccgtccctgccggcccgaaggcatcgcggtgttcgcggtcccttcccgaggtcgtgccatgttcgtcgcgattcgccaggtcatccttccgctcgtagccgccatgctggttgccggcagcgcgccggccggcacgttcgtccacttcgacacgaacgtggcctccttcgacgtcgaactctacgacaccgcgatgccgaccacggtcgcgaacttcctctcgtacgtcaacgcgggcagctacacgtcgtcgctcatccatcggagcaccacctacaacccgtctgacatccagatcgtgcaggggggcggctactacctatccggcaaccaacttctctccattcccaccaacgcgccgatcatcctcgaatcaggcagcgtgggaaacatccgcggcacgatcgcgatggcccgcggggccgcgaccaacagcgccacgagccagttctttttcaacgttcagagcaaccccgccctcgacggcaactacgctgtgttcggcaacgtggtcggagcgactgggctcgccgcgctcgacgcgatcggggcggtgccggtgtacgactgcaccgctcaactcggctcggcgttcggcgaaatgccgctgaccgcaccgtcgctcgatgccgctagtgtggtgatggtcaatagcgtggtgcccgtgccggagccatcgccactcgtgcttgccgccgtcggcctggctgcggcggcattcgcccgccgccgcgcgtagctgcctcagtagcacaggttgtcaacctgtgccncccgtagcacaggttnccaacctgtgcctcaccgcaggttaccaacctgcggctacgnttcgctccncgtagcacaggttgtcaacctgtgcctgnnnctcnncannccacntgnngcnatncnnnnccgnggnnannccaggcnncntncanccgtnnnngcnccnngancnccnnnccngncnnccncnnnnacnncnccnnnagcgcnnccnncnncnncngcnnnncnancgncnnnnccncgnncnngnnnnnncncnngccnannntcacanncgnnnncgncgncnnnntnnngncaaannngncnggnnnnncnnacnncgncgnnncgnnnntgnccnncncgannnngancnccncnnnatcccnnttgcnnnancgcnnaccgnncnccncgacgtccncgngcgnnnancgcnngnanntnnnnnncnnggcntcgancnnnngcnncnncnnnanntggcncgnggcgtncnngnnnancnnnnccncnnnnnccgncnccnnntnnannnncnctnncncnncgnngncnngngcntgcncngnnncnncntgnccngcgttgnncagcngnnnnnccntcgncncgnccncgncgtngnncagncngnngcccnngnnnncgntcgccnnnnccnncngngnnngnnnnnccncgttngncncnnngcgncgnnnngncannaantcccgcnnnngcgcngnnnncnngncggncgccgcnnccgnncngnnnncnnnccnncngncgnngcgngcnngnnagnnnncnncnatnncgngcgnncngnngnncnantnngnngnnanccngnncngnnnccngngnannnnngnnntcnngcncncngncnnngncgcgnnnnagtcggcnacnangncnnagnnnnnngncgcngcgnagncgtcgangaggtcgtngnncnnccncncgnnnnnngngncgannngntccnnnnncngcggcnnganngncgcnnnnangnnnncnnnnngccgcgnnngncncgnngnntnnannnnnnnnngnganngcnnntnnnnggnnnggnngggc

SEQ ID NO: 1134 - DNA, 4000 bp, Escherichia coli
  misc_feature (234)..(234): n is a, c, g, or t
  misc_feature (423)..(423): n is a, c, g, or t
  misc_feature (519)..(519): n is a, c, g, or t
  misc_feature (1985)..(1985): n is a, c, g, or t
ggcttaggcgtagactattttgcgaggtcgttgcccggcaagcaggttgaggctaggtcagacgacaatacagcatgtttaatgttgcaggggcctgatgcggaaaagctattaaccaatgaagttttggcgtctcctcctgccctcactcctgctcggcttaaacggttcgaacatggtctattttctattcaaaattctgaagtgatgattgcgcgtaccagctattctggngaggatggatttgaaatttttgccgggcgtgaggacgcaaaaaagatttggaatatttttgccactctgggggccctgccagttggatttgacgcgattgatattgctagaattgaggctggactactattttttggtaaggatatgaccggagtagaaaccccaacggaacttggactcgactttatngtagatttctcaaagcgaaattttcgcggcaaaacgggccttcaaaaaaaatcgcaaaagccgaggtttaagactgttggtttggctcttgatggntttgcccctttgtctggcaaagcgtcggtgtggatgagcggtgtctttgctggtagtgtaagcagtcatgctaccagtgcatggcttggtaagacggttgcgatagcacacattaaatcagatttagccacaaatggacgtgaaattaacgtctttgatgaaggctttttcgcaactgaaggttgcacaggctttgtttgccctcgtaagttctacactaacgtataaaaaaatgttgagattgtcgttttgtatattcaaaacagacgattttagacatttagattagtctaacgacgcaattgcgattgccgcaagtcgcgcagcaggcgggtctgaacgactagtcaaaacgattggcaccgcgccacctgccaccaaccctgctgctacaccgccagcacaccaaacaagagacttaaatagtatgtttcctgagacaatatctggaacaaccagagcgttggcctggccggcaactgggtttgtcatgcctttttcggtggtggctttgggtgaaattgcaagatcaaaagataaaggcccaaaaaaatctgcgttggggtcttgcttacctgctaattgcgcaattttgagcgcttcgacactcgacggaatgtttggtaaaatactctcagtggctgataagattgctatttttggtcgcgcaagaccaagttttcgtgacatttttgccatcaaaagagctgcctcaacacgcgtgtcaatgtctggttgtatatttattgctgcatcacttattaaaagtggtttgcctccattcggcggtagcatgacaaagacatgtacaagccgttggccaactcttattcctgcgtctcgttttacaaggccgcccataaatatatctgtgtgcagattacccttgacaaagcccgccacatcgccggctttgtgtcgagctatagaggcagcaatagcgtcctcttctccttttgtatcaatgatttccagcttgctaagcgaccaatcaataattttggcttcgcgctcaattacttcttgttcgccaactaaaatgggtttgaccagatttaactgatgagatttttgggcagtttctataacagttatgccggtcgcacggacaaaaacaaattcttttggattgttactgcgcgcttttttaaacaatagctcctgactattcaaagaccccttgaataaaaagtcgctgactaaattttcaaactctcgttttggcatcaggaatgtcccacgtggttgtgtcagttctgccgcccgctcaccgcatcgctaattcataaatgtcaaaccgtctccggtaaaactattttcagactatcgcacatagaaacatcaaccaactttaagtcatgaagagatatggttttttggcataatgttaggctttatctatgagcctatttttctgaatgggtagcgtcaagattgacaaaaatgctttttacgcagaataatancacttaaatacagttttagtgtaaatgggagttaacaaatggcgccgagaaaccataaagcctggctgaaatcgcctgaaattgagttcatctcaagtgagtgttacaacaatcacagcatttaccaacaagaaatcgagcaaatttttgcaaaagtatgggtgcctgtttgccacaccagtgaaatgtcgaacaacggtgatttcagagctagtcaaatcgctcatcaaaatgtagttgtcattaaccgcggagatggcgttgaagcgtttttatgtccctcgattgatagaccatccggtaacggtctcgacacagatgggctccagaaactccacagcgaggttaagcacggtggcatgatttgggttactctggatcctaatccgtcgcaaagtgttgaagaatggacttgtggcgctttcgactgtatcgcagatgcgatcgacacagaagagttggaggtttttcactaccacaaggcgataattgacaccaattacaagctatggcacgacactaatagtgaattttaccacgactttatgcattactttaaccgggtgtctggttttaacgatgaatattttgcgcgtaaaaatattccgtttgacaacggtcacgtgaatgtcagcagctttaccgtgaactatgaagagtatgatggtttcgaagatagaggagaactatcattcccaaatcttccacctaatcagtggtatatggttgatctctttccggggtttaactttaatttaagaggtagtgcttacagaagcgatagtgtaactccgctaggcccgaataaagttcttattgagtttagagggtatggtctgaaaagcgactcggatgaagatcgcgcgacccgcatcaagcatcataattcgatatggggtccatttggtcggaacctgcacgaagatttgatcggtgttgcaggtcaagggacgacaatgcgagagggcacagaagctcgtaacattttacatgggcgccatgagaactcaacaattcatgacgaagtggggatgcgtcactattatgaggcatggggcaatttcatgggaatttcctcattggctaacccgctgggcttagcggatgaaagtgtaatagccgccgaatagtaataactcttaatctgaactgaaaaacgggggtctccaacccccgtttttttgactgtattttttggagcaatatgttcatttgcggtcgttcgaggcgttaagatacaggaatttttgcaactcgttgttctcagccagcgagcgaccgacttcttcagcgatttttgttacaggaattactgtgtcggtttttaaccagaataagccaataccttttttgatgattgggtcctttagcaataacgcctttgtgcccgagtgaagccccggcattctggtgtagtgggtcggtataatggtgcagagttccgtaaactgtgtttgaaacatgagatgaagaatcgactccgactcaattttaggtgtaacttttttacctgtagctaagaaagtctcttctgcgatcgagcgctcatacattgacggccttagcagtgccagtggtaaatcacctgcttggttccaactgatttcctccatattctcgaattcaaatgagtcgggtacgagcagactccaggtttcctcaaatattggtagtgactcacaccacggcatgtcagatgactgatccatatatgttatgccgcagtcgattgaaaagttatccaatccggttcgcagttcttcattgcctacaaagcggacatcaactgatactaaaggataggcctttcgtatcctttgcaatataatcggcaaaacgggggacatagtggttatggcccccaggcgaatagttccgctcaggttgtctcgcatttcagcaattgtgtcacgcatggatgtgcaatttgccaatattatgcgtgcccattctgcgacttttttgccttcttcggtaaccccatacaagcgctgtcctcgtccccgtttaaaaag

SEQ ID NO: 1135 - DNA, 4000 bp, Escherichia coli
  misc_feature (2)..(3): n is a, c, g, or t
  misc_feature (5)..(6): n is a, c, g, or t
  misc_feature (8)..(10): n is a, c, g, or t
  misc_feature (13)..(14): n is a, c, g, or t
  misc_feature (16)..(16): n is a, c, g, or t
  misc_feature (22)..(23): n is a, c, g, or t
  misc_feature (29)..(29): n is a, c, g, or t
  misc_feature (31)..(32): n is a, c, g, or t
  misc_feature (35)..(35): n is a, c, g, or t
  misc_feature (37)..(38): n is a, c, g, or t
  misc_feature (41)..(42): n is a, c, g, or t
  misc_feature (44)..(44): n is a, c, g, or t
  misc_feature (46)..(48): n is a, c, g, or t
  misc_feature (50)..(51): n is a, c, g, or t
  misc_feature (58)..(63): n is a, c, g, or t
  misc_feature (70)..(70): n is a, c, g, or t
  misc_feature (72)..(72): n is a, c, g, or t
  misc_feature (74)..(74): n is a, c, g, or t
  misc_feature (76)..(76): n is a, c, g, or t
  misc_feature (78)..(79): n is a, c, g, or t
  misc_feature (83)..(83): n is a, c, g, or t
  misc_feature (92)..(93): n is a, c, g, or t
  misc_feature (96)..(96): n is a, c, g, or t
  misc_feature (100)..(102): n is a, c, g, or t
  misc_feature (104)..(105): n is a, c, g, or t
  misc_feature (107)..(107): n is a, c, g, or t
  misc_feature (114)..(114): n is a, c, g, or t
  misc_feature (117)..(117): n is a, c, g, or t
  misc_feature (119)..(121): n is a, c, g, or t
  misc_feature (124)..(124): n is a, c, g, or t
  misc_feature (128)..(128): n is a, c, g, or t
  misc_feature (131)..(131): n is a, c, g, or t
  misc_feature (133)..(137): n is a, c, g, or t
  misc_feature (142)..(142): n is a, c, g, or t
  misc_feature (145)..(145): n is a, c, g, or t
  misc_feature (147)..(148): n is a, c, g, or t
  misc_feature (150)..(150): n is a, c, g, or t
  misc_feature (152)..(152): n is a, c, g, or t
  misc_feature (155)..(155): n is a, c, g, or t
  misc_feature (161)..(163): n is a, c, g, or t
  misc_feature (165)..(167): n is a, c, g, or t
  misc_feature (170)..(171): n is a, c, g, or t
  misc_feature (173)..(173): n is a, c, g, or t
  misc_feature (177)..(177): n is a, c, g, or t
  misc_feature (181)..(181): n is a, c, g, or t
  misc_feature (185)..(185): n is a, c, g, or t
  misc_feature (190)..(190): n is a, c, g, or t
  misc_feature (195)..(196): n is a, c, g, or t
  misc_feature (201)..(202): n is a, c, g, or t
  misc_feature (206)..(207): n is a, c, g, or t
  misc_feature (209)..(209): n is a, c, g, or t
  misc_feature (215)..(215): n is a, c, g, or t
  misc_feature (217)..(218): n is a, c, g, or t
  misc_feature (226)..(229): n is a, c, g, or t
  misc_feature (231)..(232): n is a, c, g, or t
  misc_feature (234)..(234): n is a, c, g, or t
  misc_feature (236)..(236): n is a, c, g, or t
  misc_feature (241)..(241): n is a, c, g, or t
  misc_feature (247)..(250): n is a, c, g, or t
  misc_feature (252)..(254): n is a, c, g, or t
  misc_feature (258)..(258): n is a, c, g, or t
  misc_feature (262)..(263): n is a, c, g, or t
  misc_feature (266)..(266): n is a, c, g, or t
  misc_feature (268)..(268): n is a, c, g, or t
  misc_feature (270)..(271): n is a, c, g, or t
  misc_feature (273)..(273): n is a, c, g, or t
  misc_feature (276)..(276): n is a, c, g, or t
  misc_feature (278)..(279): n is a, c, g, or t
  misc_feature (281)..(281): n is a, c, g, or t
  misc_feature (283)..(283): n is a, c, g, or t
  misc_feature (286)..(287): n is a, c, g, or t
  misc_feature (290)..(290): n is a, c, g, or t
  misc_feature (293)..(293): n is a, c, g, or t
  misc_feature (295)..(298): n is a, c, g, or t
  misc_feature (301)..(301): n is a, c, g, or t
  misc_feature (303)..(303): n is a, c, g, or t
  misc_feature (305)..(308): n is a, c, g, or t
  misc_feature (310)..(310): n is a, c, g, or t
  misc_feature (312)..(313): n is a, c, g, or t
  misc_feature (315)..(315): n is a, c, g, or t
  misc_feature (320)..(320): n is a, c, g, or t
  misc_feature (322)..(322): n is a, c, g, or t
  misc_feature (326)..(326): n is a, c, g, or t
  misc_feature (329)..(329): n is a, c, g, or t
  misc_feature (333)..(333): n is a, c, g, or t
  misc_feature (335)..(336): n is a, c, g, or t
  misc_feature (338)..(342): n is a, c, g, or t
  misc_feature (345)..(345): n is a, c, g, or t
  misc_feature (347)..(347): n is a, c, g, or t
  misc_feature (354)..(354): n is a, c, g, or t
  misc_feature (359)..(359): n is a, c, g, or t
  misc_feature (361)..(361): n is a, c, g, or t
  misc_feature (363)..(367): n is a, c, g, or t
  misc_feature (369)..(369): n is a, c, g, or t
  misc_feature (376)..(376): n is a, c, g, or t
  misc_feature (378)..(378): n is a, c, g, or t
  misc_feature (382)..(382): n is a, c, g, or t
  misc_feature (391)..(391): n is a, c, g, or t
  misc_feature (393)..(393): n is a, c, g, or t
  misc_feature (395)..(396): n is a, c, g, or t
  misc_feature (398)..(398): n is a, c, g, or t
  misc_feature (400)..(400): n is a, c, g, or t
  misc_feature (402)..(402): n is a, c, g, or t
  misc_feature (404)..(404): n is a, c, g, or t
  misc_feature (406)..(409): n is a, c, g, or t
  misc_feature (413)..(413): n is a, c, g, or t
  misc_feature (416)..(416): n is a, c, g, or t
  misc_feature (419)..(420): n is a, c, g, or t
  misc_feature (423)..(423): n is a, c, g, or t
  misc_feature (425)..(425): n is a, c, g, or t
  misc_feature (431)..(433): n is a, c, g, or t
  misc_feature (436)..(437): n is a, c, g, or t
  misc_feature (440)..(446): n is a, c, g, or t
  misc_feature (450)..(451): n is a, c, g, or t
  misc_feature (453)..(454): n is a, c, g, or t
  misc_feature (457)..(458): n is a, c, g, or t
  misc_feature (461)..(462): n is a, c, g, or t
  misc_feature (464)..(465): n is a, c, g, or t
  misc_feature (468)..(468): n is a, c, g, or t
  misc_feature (470)..(471): n is a, c, g, or t
  misc_feature (473)..(478): n is a, c, g, or t
  misc_feature (485)..(486): n is a, c, g, or t
  misc_feature (488)..(488): n is a, c, g, or t
  misc_feature (490)..(491): n is a, c, g, or t
  misc_feature (494)..(494): n is a, c, g, or t
  misc_feature (496)..(498): n is a, c, g, or t
  misc_feature (500)..(500): n is a, c, g, or t
  misc_feature (503)..(503): n is a, c, g, or t
  misc_feature (508)..(509): n is a, c, g, or t
  misc_feature (513)..(515): n is a, c, g, or t
  misc_feature (519)..(519): n is a, c, g, or t
  misc_feature (521)..(522): n is a, c, g, or t
  misc_feature (527)..(528): n is a, c, g, or t
  misc_feature (533)..(533): n is a, c, g, or t
  misc_feature (535)..(535): n is a, c, g, or t
  misc_feature (537)..(539): n is a, c, g, or t
  misc_feature (541)..(541): n is a, c, g, or t
  misc_feature (546)..(546): n is a, c, g, or t
  misc_feature (548)..(549): n is a, c, g, or t
  misc_feature (553)..(554): n is a, c, g, or t
  misc_feature (591)..(591): n is a, c, g, or t
  misc_feature (725)..(725): n is a, c, g, or t
  misc_feature (731)..(731): n is a, c, g, or t
  misc_feature (786)..(786): n is a, c, g, or t
  misc_feature (821)..(821): n is a, c, g, or t
  misc_feature (836)..(836): n is a, c, g, or t
  misc_feature (848)..(848): n is a, c, g, or t
  misc_feature (863)..(863): n is a, c, g, or t
  misc_feature (884)..(884): n is a, c, g, or t
  misc_feature (893)..(893): n is a, c, g, or t
  misc_feature (926)..(926): n is a, c, g, or t
  misc_feature (1077)..(1077): n is a, c, g, or t
  misc_feature (1079)..(1079): n is a, c, g, or t
  misc_feature (1115)..(1115): n is a, c, g, or t
  misc_feature (1118)..(1118): n is a, c, g, or t
  misc_feature (1187)..(1187): n is a, c, g, or t
  misc_feature (1640)..(1640): n is a, c, g, or t
  misc_feature (1854)..(1854): n is a, c, g, or t
  misc_feature (1991)..(1991): n is a, c, g, or t
  misc_feature (2031)..(2031): n is a, c, g, or t
  misc_feature (2130)..(2130): n is a, c, g, or t
  misc_feature (2193)..(2193): n is a, c, g, or t
  misc_feature (2223)..(2223): n is a, c, g, or t
  misc_feature (2265)..(2265): n is a, c, g, or t
  misc_feature (2914)..(2914): n is a, c, g, or t
  misc_feature (2917)..(2917): n is a, c, g, or t
  misc_feature (2971)..(2971): n is a, c, g, or t
  misc_feature (3082)..(3082): n is a, c, g, or t
  misc_feature (3106)..(3106): n is a, c, g, or t
  misc_feature (3118)..(3118): n is a, c, g, or t
  misc_feature (3247)..(3247): n is a, c, g, or t
  misc_feature (3260)..(3260): n is a, c, g, or t
  misc_feature (3613)..(3613): n is a, c, g, or t
  misc_feature (3622)..(3622): n is a, c, g, or t
  misc_feature (3643)..(3643): n is a, c, g, or t
  misc_feature (3903)..(3903): n is a, c, g, or t
gnntnnannnatnngnatttgnngagggngnngancnngannangnnntnntttttannnnnngccttgncntngncnntganggcgaagcnnagnttgnnnanngngaaaagnagntnnngcntggncgngnnnnngcctnccntnncnangcnaaaacnnngnnnaanntnaaanttanaaanaaaanaaaanntttannaatnnantttaangnnaatgttannnnanntnanttagncaaagnnnntnnntttngccnngcngntnncnttngnnangngannggnaanannnntancnannnncntnncnaaaangnaaanggntcgntnncnnnnnttngntttgacnaagancnannnnncncaacccncnctgnccctggcgntncnntncntntngnnnntganggngannttnanttaaannnagnngannnnnnntttnntnnagnnaanngnnatngnntnnnnnntccaggnnanannccncnnngnctnaaagnnaaannnaaantnnaaatnnttctnancnnnanaaaanannaaanntaaaaataagccctattttagggcttttctcttttanaaatcacattaaatttacccttaataacccaaaaagcaaagtcataatataatccctttaaaatttaaagaagagctatgaaaaaagaaaattccaaactatttttactactatttttgggcgcgctttcagcntttggnccatttgtcacagacctttacctgccagcacttccagccataactgagtggtttngcacaagcgtttcagcaacccagctaacccttacnacctcgatggcaggncttgcgataggncagctaatagttggnccaatcagcgataaatttggncgaaaaacnccacttaccatctcgctcatcatctacacgatnagcacgatttttatattttttgcgcaaaatatccagttttttatctttatgcgcatcatccaagggcttgcaagtgcgggcagtctggttatctcaagagccgttgtgagcgacctttacaagggtcacgagatgactaaattttttagtntnatgatggttgtaaatggtcttgctccgatattttcnccnataggcggcagcttgctacttaaatttaccgactggcgcggcatctttatggcgctaacgatcattggnattttgctatttatcgcaaatttttacttcaaagagagcctaagccctgctaaccgcctaaaagtgcctttgcttcagacctacagcgtctttggcaaaattttaagaaaaaagaaatttatgctatttattgcgatccagacatttacgatggctgcgatgtttgcctatatcgcggcatcttcttttatcttacaagagttttacctgctaagcccagtaagctacagcttttgctttgcggcaaatggcctagccatcgtcataggtgctaggcttgcaagcttgctaaatgaacgaaaagcgctaaaaactgggctttttggcaccttgcttgctagcatttttatagcgtttatgctttgctttaaatttgaagtgatcggcgttatcatcgcatttttcttgcttttgctctttactggctttatcttaccaacggcctcatcactngcgatgaatgagggcagagagtacgctggctcggcctcagcggtgcttggattttgcccatttttcttaggcggcatcatctcgccactagttggtcttggtgacattttttactcgacttcaatagctattttagcttgcagcgtgcttgcctttatctcatttttagggctaaaaagagttgcgtaaaatttatcttgtctcaaacacaaanacggctgatgagagcgttgtaaatttaagcgttagcaagatagagtttttgaaatttgagataaatttaagcgaatttgacgcgcttgtggcaacctccaaaaatgcctttaaggctttaaaatttaatggcatttngcctataaatttaccagtttttgctatcgcaaatagttgngcagcggctgcaagagagtttggttttagtgaaatttacactgggcaaaatgctcatggagatgactttgcaagagaaattttgccacttttaaagggnaaaaaggttctttatctaaaaggcaaagatagcgcttcaaatttcttagaaattttacaaaanggtggcgtaaatataaaggcggtcattgcntatgaaaatgtcttaaatccttgcaaaatggagctaaaaccnccaaaaaatagcattttgatcttcgcatctccgataaatgtgagaaattttctaactaattttggctgggacgagagctatcagacgataagcatcggaaaggtcactgcaaaagagctaaaatttagcacgccacttgttagtcaaagtcaagatataaacgcttgtatcgcacttgccaaaacgttactttaagcaaagaatttatataattttattgcctgagtgaagcgagtcagcattttacggggtccaacacttttttgttagcgaaaaggtatgggtgccttgcgatgtggcttcgtttgagccttaaacagcgagaagttgcaaccttttggtatccatctatttgcaagattggctttgtttatgggccactcttctatgcgacgcccacttgggtttttaaatttacggagataatatgaacattctcataataggaagtggcggccgcgaatacgccattgctctaaaactaaaaagcgaaaaaaatataaatttatactttgcgcctggaaatggtgcgacctcacgccttggtgagaatttaaacataaaagactttcatgagctagcaaattttgccaaaaaaaatagtatcgagctaactatcgtgggacctgaagcgcctcttagcgaaggngtngtagatatctttaaaaaagagggtttgctcatctttggaccaagcaaagcagcngctagacttgaggctagcaaggcctatatgaaggactttttagctagaaataatataaaaactgcaaaatatttaaacacagacgacaaagaaaaagcatttaaatttatngataccctaagcgctccgatggtngtaaaggctganggactttgcgctggaaaaggcgtgatcatcgcaaattccaaagaagaagccaaagaggcagttagcgacatgctaagtggggctagctttggtgatgctggtaaatttgtggtggttgaagagtttttngacggctttgagntaagcttttttgccatttgtgacggcgaaaattttgtaagcttgccagtggcacaagaccacaaacgcctacttgataacgacgagggtccaaatactggcggcatgggcgcttatgctccaagtccgcttgcttcaaaagagcttataaaaagggtcgaagaagaggttgtaaaacctacgttaaaagggatgaaaaacgagggcagtccgttttgtggagtgctttttgtggggctgatgatcgtgaaaaatgagccttatgtgcttgagtttaacgtgagatttggcgatcctgagtgcgaggtcttgatgccattaatcgacggaaatttgagtgaaattttactaaangctgcaaanggcgagctaaagcctatcagnttaaaagatgaatttgctgttggcgtcgtgatgtctagcaaaaattatccttataaaagtagcccaaaggctaaaatttcagttttaaatgatgtaaaagatgcccatatagcttacgcaggcgtgagcaaagagggtgatgaaatttacgcagatgggggcagagtgctagtctgcgtggcgactgcaaagagcataaaagaggcacgtgataaggcctatgagctttgcgaaaatgtcaaatttgacggagcacactntagaaaagatatcgcgtggcaggctctaaaatgagtatgcagatagaagagaagcttcaaaacgaagaaatttcacttgctccttttgctaagagga

SEQ ID NO: 1136 - DNA, 4000 bp, Escherichia coli
  misc_feature (78)..(78): n is a, c, g, or t
  misc_feature (409)..(409): n is a, c, g, or t
  misc_feature (499)..(499): n is a, c, g, or t
  misc_feature (520)..(520): n is a, c, g, or t
  misc_feature (2489)..(2489): n is a, c, g, or t
  misc_feature (3230)..(3230): n is a, c, g, or t
  misc_feature (3238)..(3238): n is a, c, g, or t
  misc_feature (3247)..(3247): n is a, c, g, or t
  misc_feature (3249)..(3255): n is a, c, g, or t
  misc_feature (3259)..(3259): n is a, c, g, or t
  misc_feature (3265)..(3265): n is a, c, g, or t
  misc_feature (3267)..(3269): n is a, c, g, or t
  misc_feature (3271)..(3277): n is a, c, g, or t
  misc_feature (3281)..(3283): n is a, c, g, or t
  misc_feature (3285)..(3287): n is a, c, g, or t
  misc_feature (3292)..(3301): n is a, c, g, or t
  misc_feature (3303)..(3303): n is a, c, g, or t
  misc_feature (3306)..(3306): n is a, c, g, or t
  misc_feature (3309)..(3311): n is a, c, g, or t
  misc_feature (3314)..(3320): n is a, c, g, or t
  misc_feature (3322)..(3322): n is a, c, g, or t
  misc_feature (3324)..(3324): n is a, c, g, or t
  misc_feature (3326)..(3327): n is a, c, g, or t
  misc_feature (3330)..(3330): n is a, c, g, or t
  misc_feature (3337)..(3338): n is a, c, g, or t
  misc_feature (3341)..(3344): n is a, c, g, or t
  misc_feature (3347)..(3347): n is a, c, g, or t
  misc_feature (3349)..(3350): n is a, c, g, or t
  misc_feature (3352)..(3352): n is a, c, g, or t
  misc_feature (3354)..(3356): n is a, c, g, or t
  misc_feature (3358)..(3360): n is a, c, g, or t
  misc_feature (3362)..(3362): n is a, c, g, or t
  misc_feature (3366)..(3366): n is a, c, g, or t
  misc_feature (3368)..(3368): n is a, c, g, or t
  misc_feature (3370)..(3374): n is a, c, g, or t
  misc_feature (3376)..(3377): n is a, c, g, or t
  misc_feature (3379)..(3379): n is a, c, g, or t
  misc_feature (3382)..(3382): n is a, c, g, or t
  misc_feature (3384)..(3384): n is a, c, g, or t
  misc_feature (3387)..(3387): n is a, c, g, or t
  misc_feature (3390)..(3391): n is a, c, g, or t
  misc_feature (3393)..(3393): n is a, c, g, or t
  misc_feature (3395)..(3398): n is a, c, g, or t
  misc_feature (3400)..(3400): n is a, c, g, or t
  misc_feature (3403)..(3404): n is a, c, g, or t
  misc_feature (3406)..(3406): n is a, c, g, or t
  misc_feature (3408)..(3414): n is a, c, g, or t
  misc_feature (3416)..(3416): n is a, c, g, or t
  misc_feature (3418)..(3419): n is a, c, g, or t
  misc_feature (3423)..(3423): n is a, c, g, or t
  misc_feature (3425)..(3426): n is a, c, g, or t
  misc_feature (3429)..(3429): n is a, c, g, or t
  misc_feature (3431)..(3432): n is a, c, g, or t
  misc_feature (3434)..(3434): n is a, c, g, or t
  misc_feature (3437)..(3438): n is a, c, g, or t
  misc_feature (3440)..(3441): n is a, c, g, or t
  misc_feature (3443)..(3444): n is a, c, g, or t
  misc_feature (3446)..(3446): n is a, c, g, or t
  misc_feature (3450)..(3450): n is a, c, g, or t
  misc_feature (3452)..(3453): n is a, c, g, or t
  misc_feature (3456)..(3456): n is a, c, g, or t
  misc_feature (3461)..(3461): n is a, c, g, or t
  misc_feature (3463)..(3463): n is a, c, g, or t
  misc_feature (3465)..(3465): n is a, c, g, or t
  misc_feature (3468)..(3468): n is a, c, g, or t
  misc_feature (3473)..(3473): n is a, c, g, or t
  misc_feature (3477)..(3477): n is a, c, g, or t
  misc_feature (3479)..(3480): n is a, c, g, or t
  misc_feature (3482)..(3484): n is a, c, g, or t
  misc_feature (3487)..(3489): n is a, c, g, or t
  misc_feature (3492)..(3493): n is a, c, g, or t
  misc_feature (3495)..(3495): n is a, c, g, or t
  misc_feature (3498)..(3498): n is a, c, g, or t
  misc_feature (3500)..(3501): n is a, c, g, or t
  misc_feature (3503)..(3503): n is a, c, g, or t
  misc_feature (3510)..(3510): n is a, c, g, or t
  misc_feature (3512)..(3512): n is a, c, g, or t
  misc_feature (3515)..(3516): n is a, c, g, or t
  misc_feature (3518)..(3522): n is a, c, g, or t
  misc_feature (3524)..(3524): n is a, c, g, or t
  misc_feature (3526)..(3527): n is a, c, g, or t
  misc_feature (3533)..(3535): n is a, c, g, or t
  misc_feature (3537)..(3539): n is a, c, g, or t
  misc_feature (3541)..(3541): n is a, c, g, or t
  misc_feature (3543)..(3544): n is a, c, g, or t
  misc_feature (3546)..(3546): n is a, c, g, or t
  misc_feature (3549)..(3550): n is a, c, g, or t
  misc_feature (3554)..(3554): n is a, c, g, or t
  misc_feature (3556)..(3556): n is a, c, g, or t
  misc_feature (3558)..(3558): n is a, c, g, or t
  misc_feature (3560)..(3560): n is a, c, g, or t
  misc_feature (3562)..(3562): n is a, c, g, or t
  misc_feature (3564)..(3564): n is a, c, g, or t
  misc_feature (3568)..(3568): n is a, c, g, or t
  misc_feature (3571)..(3571): n is a, c, g, or t
  misc_feature (3574)..(3577): n is a, c, g, or t
  misc_feature (3580)..(3580): n is a, c, g, or t
  misc_feature (3582)..(3583): n is a, c, g, or t
  misc_feature (3585)..(3586): n is a, c, g, or t
  misc_feature (3589)..(3590): n is a, c, g, or t
  misc_feature (3593)..(3593): n is a, c, g, or t
  misc_feature (3595)..(3595): n is a, c, g, or t
  misc_feature (3597)..(3597): n is a, c, g, or t
  misc_feature (3599)..(3599): n is a, c, g, or t
  misc_feature (3601)..(3601): n is a, c, g, or t
  misc_feature (3603)..(3605): n is a, c, g, or t
  misc_feature (3607)..(3610): n is a, c, g, or t
  misc_feature (3612)..(3612): n is a, c, g, or t
  misc_feature (3614)..(3614): n is a, c, g, or t
  misc_feature (3618)..(3618): n is a, c, g, or t
  misc_feature (3620)..(3621): n is a, c, g, or t
  misc_feature (3624)..(3628): n is a, c, g, or t
  misc_feature (3633)..(3640): n is a, c, g, or t
  misc_feature (3642)..(3642): n is a, c, g, or t
  misc_feature (3644)..(3648): n is a, c, g, or t
  misc_feature (3651)..(3651): n is a, c, g, or t
  misc_feature (3653)..(3658): n is a, c, g, or t
  misc_feature (3660)..(3660): n is a, c, g, or t
  misc_feature (3662)..(3664): n is a, c, g, or t
  misc_feature (3666)..(3667): n is a, c, g, or t
  misc_feature (3671)..(3671): n is a, c, g, or t
  misc_feature (3674)..(3674): n is a, c, g, or t
  misc_feature (3677)..(3680): n is a, c, g, or t
  misc_feature (3682)..(3686): n is a, c, g, or t
  misc_feature (3688)..(3688): n is a, c, g, or t
  misc_feature (3690)..(3692): n is a, c, g, or t
  misc_feature (3694)..(3694): n is a, c, g, or t
  misc_feature (3702)..(3702): n is a, c, g, or t
  misc_feature (3704)..(3704): n is a, c, g, or t
  misc_feature (3706)..(3709): n is a, c, g, or t
  misc_feature (3712)..(3713): n is a, c, g, or t
  misc_feature (3725)..(3727): n is a, c, g, or t
  misc_feature (3734)..(3734): n is a, c, g, or t
  misc_feature (3740)..(3740): n is a, c, g, or t
  misc_feature (3745)..(3747): n is a, c, g, or t
  misc_feature (3749)..(3751): n is a, c, g, or t
  misc_feature (3756)..(3757): n is a, c, g, or t
  misc_feature (3759)..(3761): n is a, c, g, or t
  misc_feature (3768)..(3768): n is a, c, g, or t
  misc_feature (3773)..(3773): n is a, c, g, or t
  misc_feature (3778)..(3779): n is a, c, g, or t
  misc_feature (3781)..(3781): n is a, c, g, or t
  misc_feature (3785)..(3786): n is a, c, g, or t
  misc_feature (3789)..(3792): n is a, c, g, or t
  misc_feature (3796)..(3796): n is a, c, g, or t
  misc_feature (3799)..(3800): n is a, c, g, or t
  misc_feature (3804)..(3805): n is a, c, g, or t
  misc_feature (3807)..(3808): n is a, c, g, or t
  misc_feature (3812)..(3812): n is a, c, g, or t
  misc_feature (3816)..(3816): n is a, c, g, or t
  misc_feature (3819)..(3823): n is a, c, g, or t
  misc_feature (3826)..(3826): n is a, c, g, or t
  misc_feature (3829)..(3831): n is a, c, g, or t
  misc_feature (3833)..(3834): n is a, c, g, or t
  misc_feature (3836)..(3839): n is a, c, g, or t
  misc_feature (3843)..(3846): n is a, c, g, or t
  misc_feature (3850)..(3851): n is a, c, g, or t
  misc_feature (3853)..(3853): n is a, c, g, or t
  misc_feature (3857)..(3859): n is a, c, g, or t
  misc_feature (3863)..(3863): n is a, c, g, or t
  misc_feature (3866)..(3866): n is a, c, g, or t
  misc_feature (3871)..(3873): n is a, c, g, or t
  misc_feature (3875)..(3879): n is a, c, g, or t
  misc_feature (3883)..(3883): n is a, c, g, or t
  misc_feature (3889)..(3889): n is a, c, g, or t
  misc_feature (3898)..(3898): n is a, c, g, or t
  misc_feature (3901)..(3901): n is a, c, g, or t
  misc_feature (3908)..(3912): n is a, c, g, or t
  misc_feature (3915)..(3915): n is a, c, g, or t
  misc_feature (3917)..(3918): n is a, c, g, or t
  misc_feature (3920)..(3920): n is a, c, g, or t
  misc_feature (3922)..(3923): n is a, c, g, or t
  misc_feature (3926)..(3927): n is a, c, g, or t
  misc_feature (3932)..(3932): n is a, c, g, or t
  misc_feature (3940)..(3941): n is a, c, g, or t
  misc_feature (3944)..(3944): n is a, c, g, or t
  misc_feature (3946)..(3946): n is a, c, g, or t
  misc_feature (3956)..(3956): n is a, c, g, or t
  misc_feature (3961)..(3965): n is a, c, g, or t
  misc_feature (3974)..(3974): n is a, c, g, or t
  misc_feature (3978)..(3979): n is a, c, g, or t
  misc_feature (3983)..(3984): n is a, c, g, or t
  misc_feature (3988)..(3988): n is a, c, g, or t
  misc_feature (3990)..(3990): n is a, c, g, or t
  misc_feature (3996)..(3996): n is a, c, g, or t
  misc_feature (3999)..(3999): n is a, c, g, or t
tccttacatgaccgggtttgccggttagttagaactcgctcggtctatagttttacaccatatcggctcgctgctgtngttcagcagggagaaataatcacatcacaatgaggcgccaaggaacgttgagcgagcgaatcgccgacttaagtcggcggtagcctttggccaaagagtaacccactgcagcttggcgatgacacgtcgaattcattcgacttgtacggtttaaactactgccttaacggccgtggttgtcagttgctttgggaccttgatagagatcaggaggaagacggtggctaacaaatgggacgagcggaagaaagcaaaagaagatgagtatttcgttaagcaagagcgggagttgctggccaagctcaaggctaaacaggaaggcgaggctaangtctccgcacagaaagcctgttatatgaaatgcccgaagtgcggcgagcctttgaaagaacgtaaatttcagaagatcctcatcgaccantgcaccggctgtaacggcatntggctcgatgcgggcgaaatggagcaggtcgccgggcgagacaatgagagttggttagccaggttttggatgaagaatggctagccggatagatttcgcgcgtgatgccggtggttggcgttttaggtggctctgggcgaccaccgggggtcgcccctactatttttgcacaactagatcgtcatttgacgcataatttcataataaggaggtcaagatggggaagctaggcttattcttgttcgctggtttgttgggtctcctttcaagcgtaggaagcttcgactcacgatcttggttgacgccttcacaagcgctcgcgcaggccgcgcgtgattcggacgaaggtaagaagatcgtcccttacgttccgacgcctcaagaagtagtcgagaggatgttagagctcgccggcgtgaaaaagggcgacgtggtttatgatcttggctccggcgacggcagaattgtcgtcaccgccgcgaagaaatatggcgtcaaggccatcggttttgaaattgatccggagcgcatcaaagaatctcacgagaacatcaaaaaggccggcgtcggtaacctagtggagattcgccagcaggacatcagaacggtggatttgtctcaggcttcggtcttgaccatgtatctgctgccggaagtgaatctgatgattcggcccaatatctggaaacagatgaagccgggctcccgcgtggtttcgcacgatttcgacatgggggattggaagccgctcaagactgaaagtatcaaagactcatcgagctgggaccacacgctctatttatggcatgtggaggcgaataagaaatagagatgggtttccgggagtctgaccacaataggaagtgaccaaagcatgaacgcgctgatcgccgttgttttcggggccattacggtctacttgacttacacgcgctatgcgcggcgaatagaccgcgatgtcattcagtccgatcccaaacgggcgacgccggcgaccctttatatggacggcgtggatttcatgccgaccaaccgcaacattcttttcggctaccacttcaaatcgattgcggcggccggcccgattgtcggcgcgatcgtcgcggcgacgttgtggggttggttgccggcgatgatttggctcatcgtgggcgttgccttcatgggttgggtcagcgattacagcgccatcgttctgtcggtacggaacgaaggacatagcctttcggcggtggcgcaccgtctgatatcgccaagaacccggaccatcctctttctcttcatctttttttaccttttattagtcgcgggcgcctttgttggaatcatggcaacggttatggaaacccagccacggacgtacatgggaatgatcttgctcgtaatcatggggctactcctgggacagatgctttatcgatggcgcgttggtttggtgccggcaacgatgataaccgtcgggattaccctggttgcaatcatgaccggacacgcgagcgagccaatcttcaaaggcttgaacgatggcttgaattctttaaccggcggcgcgccgctggtcacttacttcgatccgacgcttgcgggcttcaaaggggcggaggcgaagatcatgccgactctccttttctgggcgctggcgatcagtattttttgctatgccggctctgtgctgccgatctggcggatggcccagcccgtggtctacgtcggattttggattacggcattggctatggtcctggggctgagcggcgcggccatcgggacattcacgaagccagaggtggcttatttttccattcccgccttcaaaggctggaacccgcagatgggtcctgcgggcgtgatgcctctgtggccgatgcttttcgtaacgatcgcgtgcggcgcgatttccggttggcacgcgctcttcggctcggtcggcacggcgcggcagatcgagaacgaagccgacatgcttccngtcggcgcaggttcgatgctcgccgagtttctgcttggaatgttggccctgttggcgatttcgataggggcaaaggggaatccggtggcggccttcgccagtggccttggcggtttcatcagcgtctggggttttccaccggattacgccgtatcgcttgcgttcgccgccttcatcgtgattgtcctggtcgtcacgcagctcttatttcgtgtcatgcgcgtaacgttaaccgaatggttaggggagatcatcccgccgctgcgtaatcagcacgtcgcatctcttgtttccatcggcatggctatcctgctggtcatgacgggcacgtggatctatctctggcagcttttcggcgcggctaatcaactcatggcggccctttctctgctcttggtgactgtgtggctcgtatccgtgggcaagcattggctgtttgccggaataccaatgatcttcatgtacctaaccacggtcgcgtcgatcttggtcacggcatacaatctctatttcaacgtttatctgccgaatctcgatgccggcagactactcccgacaatcggctcgggactgatggttttagtggctgtcctgcttgtgttcgcgtctgttttcatcggtatcgacgggtttcgtgctttcttcaaatatttgggcaaaccggcgccttccgcgcgacccgcgccagcggaaggttagccgccgccgggtaagtgcgaggggcattcacgcgaggaaagncgatgcangggtggcangnnnnnnnagantttttntnnngnnnnnnnggcnnncnnnttttnnnnnnnnnncncgnaannnaannnnnnncngnanngcnttttttnnccnnnncantnngngnnntnnnangggngncnnnnntnncnccngngtnttnncntnnnntnttnncntnnnnnnntncnnaganannggncnngnaanngnnanncncccncnnaanagaantntnggnaaaanaggngnntnnnttnnncanngnttnanngngcgcccncnccnntnnnnngntnnagaggnnntnnncnanngnggnnaaanancnancnanaaanggnggnnnnttncnngnnttnnaananantntntnnngnnnntncncccncnngannnnncgccnnnnnnnncncnnnnnggncnnnnnngngnnncnntttnttntcnnnncnnnnngngnnntntttggggngncnnnnttnncccccttttttnnnctccccntttttnccttnnngnnnccccnnannnccccccnggaangcccnntntttnncgnnnngggnatnncccnnannctcngggnaannnnnaantcnnntnncnnnngggnnnntttnngngggnnncccnaangggcnnnannnnntttngggggnaaggggggntcnggaaaannnnnctntnngngnnccnngcccntttggttnnccnanaaaggaaaanggggnnnnnttttttccngggnncccnngggngncctttnggna

SEQ ID NO: 1137 - DNA, 4000 bp, Escherichia coli
  misc_feature (370)..(370): n is a, c, g, or t
  misc_feature (2864)..(2864): n is a, c, g, or t
  misc_feature (2873)..(2875): n is a, c, g, or t
  misc_feature (2880)..(2882): n is a, c, g, or t
  misc_feature (2884)..(2885): n is a, c, g, or t
  misc_feature (2888)..(2893): n is a, c, g, or t
  misc_feature (2897)..(2899): n is a, c, g, or t
  misc_feature (2901)..(2901): n is a, c, g, or t
  misc_feature (2906)..(2909): n is a, c, g, or t
  misc_feature (2912)..(2912): n is a, c, g, or t
  misc_feature (2914)..(2918): n is a, c, g, or t
  misc_feature (2921)..(2921): n is a, c, g, or t
  misc_feature (2923)..(2924): n is a, c, g, or t
  misc_feature (2929)..(2931): n is a, c, g, or t
  misc_feature (2938)..(2939): n is a, c, g, or t
  misc_feature (2941)..(2945): n is a, c, g, or t
  misc_feature (2947)..(2947): n is a, c, g, or t
  misc_feature (2952)..(2952): n is a, c, g, or t
  misc_feature (2955)..(2964): n is a, c, g, or t
  misc_feature (2966)..(2968): n is a, c, g, or t
  misc_feature (2970)..(2970): n is a, c, g, or t
  misc_feature (2973)..(2973): n is a, c, g, or t
  misc_feature (2976)..(2976): n is a, c, g, or t
  misc_feature (2979)..(2981): n is a, c, g, or t
  misc_feature (2986)..(2986): n is a, c, g, or t
  misc_feature (2988)..(2989): n is a, c, g, or t
  misc_feature (2991)..(2991): n is a, c, g, or t
  misc_feature (2993)..(2993): n is a, c, g, or t
  misc_feature (2995)..(2996): n is a, c, g, or t
  misc_feature (2999)..(2999): n is a, c, g, or t
  misc_feature (3001)..(3002): n is a, c, g, or t
  misc_feature (3005)..(3005): n is a, c, g, or t
  misc_feature (3008)..(3012): n is a, c, g, or t
  misc_feature (3016)..(3018): n is a, c, g, or t
  misc_feature (3020)..(3020): n is a, c, g, or t
  misc_feature (3022)..(3024): n is a, c, g, or t
  misc_feature (3026)..(3027): n is a, c, g, or t
  misc_feature (3029)..(3029): n is a, c, g, or t
  misc_feature (3031)..(3031): n is a, c, g, or t
  misc_feature (3033)..(3035): n is a, c, g, or t
  misc_feature (3037)..(3038): n is a, c, g, or t
  misc_feature (3040)..(3040): n is a, c, g, or t
  misc_feature (3042)..(3042): n is a, c, g, or t
  misc_feature (3044)..(3044): n is a, c, g, or t
  misc_feature (3046)..(3050): n is a, c, g, or t
  misc_feature (3052)..(3053): n is a, c, g, or t
  misc_feature (3055)..(3055): n is a, c, g, or t
  misc_feature (3057)..(3057): n is a, c, g, or t
  misc_feature (3059)..(3064): n is a, c, g, or t
  misc_feature (3066)..(3071): n is a, c, g, or t
  misc_feature (3073)..(3078): n is a, c, g, or t
  misc_feature (3080)..(3080): n is a, c, g, or t
  misc_feature (3082)..(3083): n is a, c, g, or t
  misc_feature (3085)..(3087): n is a, c, g, or t
  misc_feature (3090)..(3098): n is a, c, g, or t
  misc_feature (3102)..(3111): n is a, c, g, or t
  misc_feature (3113)..(3117): n is a, c, g, or t
  misc_feature (3119)..(3124): n is a, c, g, or t
  misc_feature (3126)..(3131): n is a, c, g, or t
  misc_feature (3134)..(3138): n is a, c, g, or t
  misc_feature (3142)..(3144): n is a, c, g, or t
  misc_feature (3146)..(3156): n is a, c, g, or t
  misc_feature (3158)..(3172): n is a, c, g, or t
  misc_feature (3174)..(3174): n is a, c, g, or t
  misc_feature (3176)..(3178): n is a, c, g, or t
  misc_feature (3181)..(3183): n is a, c, g, or t
  misc_feature (3185)..(3185): n is a, c, g, or t
  misc_feature (3187)..(3187): n is a, c, g, or t
  misc_feature (3189)..(3189): n is a, c, g, or t
  misc_feature (3193)..(3194): n is a, c, g, or t
  misc_feature (3197)..(3197): n is a, c, g, or t
  misc_feature (3199)..(3199): n is a, c, g, or t
  misc_feature (3201)..(3202): n is a, c, g, or t
  misc_feature (3204)..(3204): n is a, c, g, or t
  misc_feature (3209)..(3209): n is a, c, g, or t
  misc_feature (3214)..(3222): n is a, c, g, or t
  misc_feature (3224)..(3228): n is a, c, g, or t
  misc_feature (3230)..(3231): n is a, c, g, or t
  misc_feature (3238)..(3238): n is a, c, g, or t
  misc_feature (3240)..(3245): n is a, c, g, or t
  misc_feature (3247)..(3248): n is a, c, g, or t
  misc_feature (3250)..(3256): n is a, c, g, or t
  misc_feature (3258)..(3261): n is a, c, g, or t
  misc_feature (3263)..(3264): n is a, c, g, or t
  misc_feature (3266)..(3272): n is a, c, g, or t
  misc_feature (3274)..(3276): n is a, c, g, or t
  misc_feature (3278)..(3278): n is a, c, g, or t
  misc_feature (3280)..(3281): n is a, c, g, or t
  misc_feature (3283)..(3283): n is a, c, g, or t
  misc_feature (3285)..(3285): n is a, c, g, or t
  misc_feature (3287)..(3287): n is a, c, g, or t
  misc_feature (3289)..(3292): n is a, c, g, or t
  misc_feature (3294)..(3294): n is a, c, g, or t
  misc_feature (3296)..(3297): n is a, c, g, or t
  misc_feature (3299)..(3299): n is a, c, g, or t
  misc_feature (3301)..(3302): n is a, c, g, or t
  misc_feature (3304)..(3306): n is a, c, g, or t
  misc_feature (3310)..(3312): n is a, c, g, or t
  misc_feature (3315)..(3315): n is a, c, g, or t
  misc_feature (3317)..(3320): n is a, c, g, or t
  misc_feature (3322)..(3322): n is a, c, g, or t
  misc_feature (3330)..(3335): n is a, c, g, or t
  misc_feature (3337)..(3337): n is a, c, g, or t
  misc_feature (3340)..(3342): n is a, c, g, or t
  misc_feature (3344)..(3344): n is a, c, g, or t
  misc_feature (3347)..(3347): n is a, c, g, or t
  misc_feature (3350)..(3350): n is a, c, g, or t
  misc_feature (3354)..(3354): n is a, c, g, or t
  misc_feature (3356)..(3358): n is a, c, g, or t
  misc_feature (3360)..(3360): n is a, c, g, or t
  misc_feature (3362)..(3362): n is a, c, g, or t
  misc_feature (3365)..(3365): n is a, c, g, or t
  misc_feature (3367)..(3367): n is a, c, g, or t
  misc_feature (3373)..(3374): n is a, c, g, or t
  misc_feature (3377)..(3384): n is a, c, g, or t
  misc_feature (3386)..(3389): n is a, c, g, or t
  misc_feature (3392)..(3392): n is a, c, g, or t
  misc_feature (3395)..(3395): n is a, c, g, or t
  misc_feature (3400)..(3400): n is a, c, g, or t
  misc_feature (3402)..(3403): n is a, c, g, or t
  misc_feature (3408)..(3408): n is a, c, g, or t
  misc_feature (3410)..(3410): n is a, c, g, or t
  misc_feature (3415)..(3416): n is a, c, g, or t
  misc_feature (3422)..(3423): n is a, c, g, or t
  misc_feature (3427)..(3429): n is a, c, g, or t
  misc_feature (3432)..(3432): n is a, c, g, or t
  misc_feature (3434)..(3436): n is a, c, g, or t
  misc_feature (3438)..(3438): n is a, c, g, or t
  misc_feature (3444)..(3444): n is a, c, g, or t
  misc_feature (3447)..(3449): n is a, c, g, or t
  misc_feature (3451)..(3452): n is a, c, g, or t
  misc_feature (3454)..(3455): n is a, c, g, or t
  misc_feature (3459)..(3459): n is a, c, g, or t
  misc_feature (3464)..(3466): n is a, c, g, or t
  misc_feature (3469)..(3470): n is a, c, g, or t
  misc_feature (3472)..(3472): n is a, c, g, or t
  misc_feature (3474)..(3474): n is a, c, g, or t
  misc_feature (3476)..(3476): n is a, c, g, or t
  misc_feature (3480)..(3481): n is a, c, g, or t
  misc_feature (3483)..(3488): n is a, c, g, or t
  misc_feature (3492)..(3496): n is a, c, g, or t
  misc_feature (3498)..(3498): n is a, c, g, or t
  misc_feature (3500)..(3511): n is a, c, g, or t
  misc_feature (3513)..(3536): n is a, c, g, or t
  misc_feature (3538)..(3538): n is a, c, g, or t
  misc_feature (3544)..(3544): n is a, c, g, or t
  misc_feature (3549)..(3549): n is a, c, g, or t
  misc_feature (3557)..(3557): n is a, c, g, or t
  misc_feature (3570)..(3571): n is a, c, g, or t
  misc_feature (3573)..(3575): n is a, c, g, or t
  misc_feature (3577)..(3577): n is a, c, g, or t
  misc_feature (3582)..(3582): n is a, c, g, or t
  misc_feature (3584)..(3584): n is a, c, g, or t
  misc_feature (3586)..(3599): n is a, c, g, or t
  misc_feature (3601)..(3607): n is a, c, g, or t
  misc_feature (3610)..(3612): n is a, c, g, or t
  misc_feature (3615)..(3619): n is a, c, g, or t
  misc_feature (3621)..(3622): n is a, c, g, or t
  misc_feature (3624)..(3624): n is a, c, g, or t
  misc_feature (3626)..(3629): n is a, c, g, or t
  misc_feature (3631)..(3632): n is a, c, g, or t
  misc_feature (3635)..(3637): n is a, c, g, or t
  misc_feature (3639)..(3640): n is a, c, g, or t
  misc_feature (3642)..(3642): n is a, c, g, or t
  misc_feature (3644)..(3645): n is a, c, g, or t
  misc_feature (3650)..(3650): n is a, c, g, or t
  misc_feature (3652)..(3652): n is a, c, g, or t
  misc_feature (3655)..(3656): n is a, c, g, or t
  misc_feature (3658)..(3661): n is a, c, g, or t
  misc_feature (3663)..(3663): n is a, c, g, or t
  misc_feature (3665)..(3665): n is a, c, g, or t
  misc_feature (3668)..(3674): n is a, c, g, or t
  misc_feature (3976)..(4000): n is a, c, g, or t
ttgctggtcggcgatgcggcccgtatccgtccgttattagccaaaacgcaacatctcaaagatgctgaaatactgcatactgatgtggcggttgcggccgaggatacggcgtcgcaggcggtgcgtcgggggcgcgatagctcgatgtggattgctatcgcccaggtcgccgagaaaaacgctgacgccgttgtatcggctggcaacaccggtgcgctgatggcgatgtcaaaattgcagttacgcacgatgccgggggtcacgcggcctgccattgccgggtttttcccgaccgagcaaaagcgcatgtgcatgcttgatcttggcgcgaatctcgaatgtgacgaagacaatctggtgcagtttgcgntgatgggacaggcattttatgcgtcgctggttggcaagcataacccatcggtggcgctgctcaatgtcggggctgaagagcaaaaggggcatgaatatttgcgtctggctgcacaagaactggcagatccggagctgggggtcaattatatcggctttgtcgagggctctgatctggtcaaaggtggcgttgacattgttgtcaccgatggattttcgggcaatatcgcattgaaaacagccgaaggtgtggccgggttatttgcaactttgctgcgacgcagcttcaaagcctcactctcggcaaagcttggttatttgctggcgcaaggcgcgttaaagaatttcagaacaaagatggatccgcgtcgctacaacggcgcggtttttctggggctgaacggaattgcggtaaaatcgcatggcggcacagatgccgttggttttgccaatgccattgatgtcgcgatgaatttagtggggcacggatttattcctgatgtgagtgctgcgatcgaaaaagccgaccggattcgggcggaacggaagagtgtagatgagtaaacaaacggtattgatgacatctgtgggcgcctatctgccagccaatgttgtgacaaatgaagatttatccgcctatgtcgatacaagcgatgagtggattcaacgccgtacgggcataacccaaaggcattttgtggcggatggcgagaccacagctgatttggccagtcacgcggcaaatcaggcgctggccaatgcggcgatgcagccacaggacattgatctgatcattgtcgccacgacaacgccggataacacatttccatcaaccgccacaaaagttcagcatcaaattggcgcgacgggtgccattgcctttgatgtacaggctgtttgtgccggttttatctatgctgttgatgtcgctgaggcgatgttgcgtggcgggcgcgggcgtcgggcgctggttattggcgccgaaagcttttcaaaattgctggattggcaggatcgtaccacatgcgtgttatttggtgatggcgctggcgcggtgattctggaaattaccgatgaggccagcgattggggcattcgttcgtcggtgctgcatgcggatggggcgcatcgcgatattctatatgtcgatggtggcccatccagtacaaatgatgtcgggcatgtgcggatggaaggtaaagaagtgttccggcatgctgtggaaaaactggcggcggtgatggatgaagcattggccgcggctgatatgcagccacaagacattgactggctggtgccgcatcaggccaatatccgcatcattgatgcgatgcagaaaaaaatgcagttgcctagcgaaaaagtcatccgcaccgttgcggcgcatgcgaatacatcggcggcctcgattccgctggcattagccaccgcggttggggacgggcgtgtgcaaaatggcgatctattggcaatggaggcgattggcggcgggcttgtctggggcgcggcgctggtcaaatttgggcgcccatcctgacattattttcaagcaataagaagaattgtggcaataatgcgactacagccttgtatttttgttctaaatgtttttatgattaaagggtggccgcgcgtgcatcagcacctttttgaagtggataaggcaaattatggctaaaactgtgacccgagcagacctgactgagtcagtctatcgcagcattgggctgtccagaaacgaatcgtctgatcttgtcgagtccgttcttgaagaaatctgcgcctgtctggaagctggcgaagatgtcaagctgtcgtcttttggcacgttttctgtgcaatcaaagcgccagcgagtcggacgtaacccgaaaaccggggttgaggcggtcatcacgccacgccgggtgctgtcgtttcgcccgtcgcatatcctgaaagatcgcgttgacaacgcctgatgactgataaagccagcgacgcctttagaaccatttccgaagtatcgaccgagcttgatgtcccgccgcatgtgttacgattctgggagagcaaattcaccagtttgcgcccgctaaagcgcagcggtggtcgacgctattatcgcccggatgatgtggcgatgatcattaaaatccgagatttgctctataaagagggctttaccatcaaaggcgcacaacggtttttaaaatcgaaagaggccggggcgccgtcggacataaacccggctgcggcggatcacggaacaacgccggatctgctggccgtgcaggcgctattgcaaacggcacgcaaacgtctgtctgacgtcaaacaacagcttggcagctaggcagccgccgcgcgcataaagatgtctgtatcgaaaagccgattgcatgcgaccagggctgcggctataatcgcggcggccggagcgtagcgcagcctggtagcgcactatactgggggtgtaggggtcgtgggttcaaatcccgccgctccgaccaatnttttcaatnnnttaannnannatnnnnnnagcnnntngaacnnnntgngnnnnnttntnngtcannnttgtctnnannnnntntccanttnnnnnnnnnntnnngncantgncgnnngcgancnntntnannttngnnccntgnnnnnaagnnngngnnntnnanantnnngnngntnancnnnnncnntntncnnnnnngnnnnnntnnnnnngntnnannnttnnnnnnnnngccnnnnnnnnnngnnnnngnnnnnngnnnnnntgnnnnntttnnnannnnnnnnnnnannnnnnnnnnnnnnntnannntannngnantngccnnatntntnngnatttntctgnnnnnnnnntnnnnngnnaagcggnannnnnncnnannnnnnnannnngnngnnnnnnnannngncnncnangngnnnntnannancnnannngtannngcngnnnntntatttgcnnnnnnantcnnncnctntgntgtnannntngnggncntttttnnaannnnnnnnannnnctngcnacttntnngaacncntttanngctatnnccgnnngcngnnnanaaatgngannngnntnngaantttannnaanngntntntatnntnnnnnnaaannnnnanannnnnnnnnnnnannnnnnnnnnnnnnnnnnnnnnnnanattatngcgtntttacatngcattcgaatgtnntnnncnccccncnannnnnnnnnnnnnngnnnnnnntgnnnatnnnnncnncncnnnngnnctnnngnngngnnttttntnttnncnnnncncncannnnnnnagcgtaaaatgcaaagaagccgtaggggagaggtttctttgcacccagtaattcacgacgctatctaattgaatttctgaaacacgcaaaattgtggcaaattcaacaaagttgataccttaatccctgttaatgaatttttgagggcaagacatggctggcactctgattgcgatagcttctggaccagcgattttatgcttatacttaacctacaaagctcgtatgcctgaagcattttcccattgggtgttcatatcgaatggttttttttattatctattagtcttagtaacgtttgnnnnnnnnnnnnnnnnnnnnnnnnn

SEQ ID NO: 1138 - DNA, 4000 bp, Escherichia coli
  misc_feature (2)..(5): n is a, c, g, or t
  misc_feature (8)..(10): n is a, c, g, or t
  misc_feature (13)..(16): n is a, c, g, or t
  misc_feature (19)..(20): n is a, c, g, or t
  misc_feature (23)..(27): n is a, c, g, or t
  misc_feature (31)..(36): n is a, c, g, or t
  misc_feature (38)..(39): n is a, c, g, or t
  misc_feature (42)..(42): n is a, c, g, or t
  misc_feature (44)..(44): n is a, c, g, or t
  misc_feature (48)..(48): n is a, c, g, or t
  misc_feature (50)..(52): n is a, c, g, or t
  misc_feature (55)..(56): n is a, c, g, or t
  misc_feature (58)..(58): n is a, c, g, or t
  misc_feature (60)..(61): n is a, c, g, or t
  misc_feature (64)..(64): n is a, c, g, or t
  misc_feature (67)..(67): n is a, c, g, or t
  misc_feature (69)..(70): n is a, c, g, or t
  misc_feature (72)..(72): n is a, c, g, or t
  misc_feature (75)..(78): n is a, c, g, or t
  misc_feature (82)..(82): n is a, c, g, or t
  misc_feature (85)..(86): n is a, c, g, or t
  misc_feature (91)..(92): n is a, c, g, or t
  misc_feature (94)..(95): n is a, c, g, or t
  misc_feature (97)..(98): n is a, c, g, or t
  misc_feature (105)..(106): n is a, c, g, or t
  misc_feature (108)..(108): n is a, c, g, or t
  misc_feature (110)..(111): n is a, c, g, or t
  misc_feature (113)..(113): n is a, c, g, or t
  misc_feature (115)..(119): n is a, c, g, or t
  misc_feature (121)..(123): n is a, c, g, or t
  misc_feature (125)..(132): n is a, c, g, or t
  misc_feature (134)..(135): n is a, c, g, or t
  misc_feature (137)..(142): n is a, c, g, or t
  misc_feature (144)..(144): n is a, c, g, or t
  misc_feature (146)..(151): n is a, c, g, or t
  misc_feature (154)..(155): n is a, c, g, or t
  misc_feature (157)..(158): n is a, c, g, or t
  misc_feature (160)..(160): n is a, c, g, or t
  misc_feature (165)..(165): n is a, c, g, or t
  misc_feature (167)..(169): n is a, c, g, or t
  misc_feature (171)..(173): n is a, c, g, or t
  misc_feature (175)..(179): n is a, c, g, or t
  misc_feature (182)..(185): n is a, c, g, or t
  misc_feature (187)..(190): n is a, c, g, or t
  misc_feature (192)..(197): n is a, c, g, or t
  misc_feature (199)..(199): n is a, c, g, or t
  misc_feature (201)..(201): n is a, c, g, or t
  misc_feature (204)..(205): n is a, c, g, or t
  misc_feature (207)..(207): n is a, c, g, or t
  misc_feature (209)..(209): n is a, c, g, or t
  misc_feature (212)..(222): n is a, c, g, or t
  misc_feature (224)..(227): n is a, c, g, or t
  misc_feature (229)..(230): n is a, c, g, or t
  misc_feature (233)..(234): n is a, c, g, or t
  misc_feature (237)..(237): n is a, c, g, or t
  misc_feature (240)..(241): n is a, c, g, or t
  misc_feature (243)..(246): n is a, c, g, or t
  misc_feature (248)..(249): n is a, c, g, or t
  misc_feature (252)..(252): n is a, c, g, or t
  misc_feature (255)..(255): n is a, c, g, or t
  misc_feature (257)..(257): n is a, c, g, or t
  misc_feature (259)..(260): n is a, c, g, or t
  misc_feature (264)..(264): n is a, c, g, or t
  misc_feature (268)..(269): n is a, c, g, or t
  misc_feature (273)..(276): n is a, c, g, or t
  misc_feature (279)..(280): n is a, c, g, or t
  misc_feature (282)..(282): n is a, c, g, or t
  misc_feature (285)..(285): n is a, c, g, or t
  misc_feature (287)..(290): n is a, c, g, or t
  misc_feature (292)..(292): n is a, c, g, or t
  misc_feature (294)..(294): n is a, c, g, or t
  misc_feature (297)..(297): n is a, c, g, or t
  misc_feature (299)..(301): n is a, c, g, or t
  misc_feature (303)..(303): n is a, c, g, or t
  misc_feature (305)..(306): n is a, c, g, or t
  misc_feature (308)..(308): n is a, c, g, or t
  misc_feature (311)..(311): n is a, c, g, or t
  misc_feature (313)..(314): n is a, c, g, or t
  misc_feature (318)..(320): n is a, c, g, or t
  misc_feature (322)..(322): n is a, c, g, or t
  misc_feature (324)..(328): n is a, c, g, or t
  misc_feature (330)..(331): n is a, c, g, or t
  misc_feature (335)..(336): n is a, c, g, or t
  misc_feature (339)..(342): n is a, c, g, or t
  misc_feature (344)..(346): n is a, c, g, or t
  misc_feature (349)..(352): n is a, c, g, or t
  misc_feature (354)..(361): n is a, c, g, or t
  misc_feature (363)..(365): n is a, c, g, or t
  misc_feature (367)..(367): n is a, c, g, or t
  misc_feature (371)..(372): n is a, c, g, or t
  misc_feature (375)..(381): n is a, c, g, or t
  misc_feature (385)..(385): n is a, c, g, or t
  misc_feature (389)..(392): n is a, c, g, or t
  misc_feature (395)..(396): n is a, c, g, or t
  misc_feature (398)..(398): n is a, c, g, or t
  misc_feature (402)..(403): n is a, c, g, or t
  misc_feature (405)..(405): n is a, c, g, or t
  misc_feature (407)..(409): n is a, c, g, or t
  misc_feature (414)..(415): n is a, c, g, or t
  misc_feature (419)..(423): n is a, c, g, or t
  misc_feature (425)..(425): n is a, c, g, or t
  misc_feature (427)..(430): n is a, c, g, or t
  misc_feature (438)..(438): n is a, c, g, or t
  misc_feature (440)..(440): n is a, c, g, or t
  misc_feature (442)..(443): n is a, c, g, or t
  misc_feature (445)..(447): n is a, c, g, or t
  misc_feature (449)..(449): n is a, c, g, or t
  misc_feature (452)..(453): n is a, c, g, or t
  misc_feature (456)..(456): n is a, c, g, or t
  misc_feature (458)..(459): n is a, c, g, or t
  misc_feature (461)..(461): n is a, c, g, or t
  misc_feature (463)..(463): n is a, c, g, or t
  misc_feature (468)..(468): n is a, c, g, or t
  misc_feature (470)..(471): n is a, c, g, or t
  misc_feature (473)..(476): n is a, c, g, or t
  misc_feature (478)..(478): n is a, c, g, or t
  misc_feature (481)..(481): n is a, c, g, or t
  misc_feature (484)..(484): n is a, c, g, or t
  misc_feature (487)..(489): n is a, c, g, or t
  misc_feature (500)..(500): n is a, c, g, or t
  misc_feature (504)..(506): n is a, c, g, or t
  misc_feature (509)..(509): n is a, c, g, or t
  misc_feature (517)..(517): n is a, c, g, or t
  misc_feature (519)..(521): n is a, c, g, or t
  misc_feature (526)..(526): n is a, c, g, or t
  misc_feature (528)..(528): n is a, c, g, or t
  misc_feature (530)..(531): n is a, c, g, or t
  misc_feature (534)..(534): n is a, c, g, or t
  misc_feature (538)..(538): n is a, c, g, or t
  misc_feature (544)..(544): n is a, c, g, or t
  misc_feature (547)..(547): n is a, c, g, or t
  misc_feature (549)..(549): n is a, c, g, or t
  misc_feature (553)..(553): n is a, c, g, or t
  misc_feature (556)..(557): n is a, c, g, or t
  misc_feature (559)..(559): n is a, c, g, or t
  misc_feature (566)..(566): n is a, c, g, or t
  misc_feature (569)..(569): n is a, c, g, or t
  misc_feature (572)..(572): n is a, c, g, or t
  misc_feature (574)..(575): n is a, c, g, or t
  misc_feature (580)..(581): n is a, c, g, or t
  misc_feature (585)..(586): n is a, c, g, or t
  misc_feature (590)..(590): n is a, c, g, or t
  misc_feature (592)..(594): n is a, c, g, or t
  misc_feature (597)..(597): n is a, c, g, or t
  misc_feature (599)..(599): n is a, c, g, or t
  misc_feature (601)..(601): n is a, c, g, or t
  misc_feature (603)..(605): n is a, c, g, or t
  misc_feature (608)..(608): n is a, c, g, or t
  misc_feature (610)..(610): n is a, c, g, or t
  misc_feature (614)..(615): n is a, c, g, or t
  misc_feature (619)..(620): n is a, c, g, or t
  misc_feature (622)..(623): n is a, c, g, or t
  misc_feature (625)..(625): n is a, c, g, or t
  misc_feature (627)..(627): n is a, c, g, or t
  misc_feature (631)..(632): n is a, c, g, or t
  misc_feature (634)..(635): n is a, c, g, or t
  misc_feature (639)..(639): n is a, c, g, or t
  misc_feature (642)..(642): n is a, c, g, or t
  misc_feature (647)..(647): n is a, c, g, or t
  misc_feature (649)..(650): n is a, c, g, or t
  misc_feature (654)..(657): n is a, c, g, or t
  misc_feature (659)..(660): n is a, c, g, or t
  misc_feature (662)..(662): n is a, c, g, or t
  misc_feature (667)..(667): n is a, c, g, or t
  misc_feature (679)..(680): n is a, c, g, or t
  misc_feature (682)..(683): n is a, c, g, or t
  misc_feature (689)..(690): n is a, c, g, or t
  misc_feature (692)..(692): n is a, c, g, or t
  misc_feature (698)..(698): n is a, c, g, or t
  misc_feature (700)..(701): n is a, c, g, or t
  misc_feature (704)..(705): n is a, c, g, or t
  misc_feature (709)..(713): n is a, c, g, or t
  misc_feature (718)..(718): n is a, c, g, or t
  misc_feature (720)..(720): n is a, c, g, or t
  misc_feature (722)..(722): n is a, c, g, or t
  misc_feature (724)..(724): n is a, c, g, or t
  misc_feature (726)..(727): n is a, c, g, or t
  misc_feature (729)..(729): n is a, c, g, or t
  misc_feature (733)..(734): n is a, c, g, or t
  misc_feature (738)..(738): n is a, c, g, or t
  misc_feature (744)..(744): n is a, c, g, or t
  misc_feature (747)..(750): n is a, c, g, or t
  misc_feature (752)..(752): n is a, c, g, or t
  misc_feature (754)..(754): n is a, c, g, or t
  misc_feature (761)..(762): n is a, c, g, or t
  misc_feature (765)..(765): n is a, c, g, or t
  misc_feature (768)..(768): n is a, c, g, or t
  misc_feature (774)..(774): n is a, c, g, or t
  misc_feature (777)..(777): n is a, c, g, or t
  misc_feature (781)..(781): n is a, c, g, or t
  misc_feature (789)..(790): n is a, c, g, or t
  misc_feature (792)..(792): n is a, c, g, or t
  misc_feature (796)..(796): n is a, c, g, or t
  misc_feature (798)..(798): n is a, c, g, or t
  misc_feature (801)..(801): n is a, c, g, or t
  misc_feature (803)..(803): n is a, c, g, or t
  misc_feature (809)..(809): n is a, c, g, or t
  misc_feature (815)..(815): n is a, c, g, or t
  misc_feature (826)..(826): n is a, c, g, or t
  misc_feature (828)..(828): n is a, c, g, or t
  misc_feature (831)..(832): n is a, c, g, or t
  misc_feature (834)..(834): n is a, c, g, or t
  misc_feature (845)..(845): n is a, c, g, or t
  misc_feature (848)..(848): n is a, c, g, or t
  misc_feature (851)..(857): n is a, c, g, or t
  misc_feature (862)..(862): n is a, c, g, or t
  misc_feature (864)..(864): n is a, c, g, or t
  misc_feature (866)..(867): n is a, c, g, or t
  misc_feature (869)..(869): n is a, c, g, or t
  misc_feature (873)..(873): n is a, c, g, or t
  misc_feature (880)..(880): n is a, c, g, or t
  misc_feature (884)..(884): n is a, c, g, or t
  misc_feature (888)..(888): n is a, c, g, or t
  misc_feature (892)..(892): n is a, c, g, or t
  misc_feature (894)..(894): n is a, c, g, or t
  misc_feature (897)..(899): n is a, c, g, or t
  misc_feature (901)..(901): n is a, c, g, or t
  misc_feature (907)..(907): n is a, c, g, or t
  misc_feature (910)..(911): n is a, c, g, or t
  misc_feature (915)..(915): n is a, c, g, or t
  misc_feature (926)..(926): n is a, c, g, or t
  misc_feature (929)..(929): n is a, c, g, or t
  misc_feature (1160)..(1160): n is a, c, g, or t
  misc_feature (1682)..(1682): n is a, c, g, or t
  misc_feature (1697)..(1697): n is a, c, g, or t
  misc_feature (1722)..(1722): n is a, c, g, or t
  misc_feature (1870)..(1870): n is a, c, g, or t
  misc_feature (1879)..(1879): n is a, c, g, or t
  misc_feature (1882)..(1882): n is a, c, g, or t
  misc_feature (1938)..(1938): n is a, c, g, or t
  misc_feature (1950)..(1950): n is a, c, g, or t
  misc_feature (1988)..(1988): n is a, c, g, or t
  misc_feature (1993)..(1993): n is a, c, g, or t
  misc_feature (2003)..(2004): n is a, c, g, or t
  misc_feature (2007)..(2007): n is a, c, g, or t
  misc_feature (2009)..(2009): n is a, c, g, or t
  misc_feature (2011)..(2011): n is a, c, g, or t
  misc_feature (2076)..(2076): n is a, c, g, or t
  misc_feature (2682)..(2682): n is a, c, g, or t
  misc_feature (2938)..(2938): n is a, c, g, or t
  misc_feature (2940)..(2941): n is a, c, g, or t
  misc_feature (2973)..(2973): n is a, c, g, or t
  misc_feature (3111)..(3111): n is a, c, g, or t
  misc_feature (3118)..(3118): n is a, c, g, or t
  misc_feature (3601)..(3601): n is a, c, g, or t
  misc_feature (3715)..(3715): n is a, c, g, or t
  misc_feature (3720)..(3720): n is a, c, g, or t
  misc_feature (3726)..(3726): n is a, c, g, or t
  misc_feature (3728)..(3728): n is a, c, g, or t
  misc_feature (3868)..(3868): n is a, c, g, or t
  misc_feature (3879)..(3879): n is a, c, g, or t
  misc_feature (3891)..(3891): n is a, c, g, or t
  misc_feature (3894)..(3894): n is a, c, g, or t
  misc_feature (3898)..(3898): n is a, c, g, or t
  misc_feature (3921)..(3921): n is a, c, g, or t
  misc_feature (3948)..(3948): n is a, c, g, or t
  misc_feature (3955)..(3955): n is a, c, g, or t
gnnnnccnnnagnnnncgnnggnnnnnaaannnnnngnnggntnggangnnnttnncngnnggntcncnncnttnnnngggnaanngttcnncnncnnccccgcnnangnncnannnnngnnncnnnnnnnngnncnnnnnncngnnnnnncgnngnngnaaaantnnnannngnnnnnggnnnngnnnnannnnnnancnacnncnanaannnnnnnnnnnannnntnnccnnccnggnngnnnncnnccnccncncnngggngggnntttnnnnccnncnaangnnnngngnccnannncnanntnccngnncccnnnangnnnnnannaaannccnnnnannnccnnnnannnnnnnngnnncngggnnaannnnnnncccnggcnnnnttnnancccnnangnnncccgnncccnnnnncncnnnnaaaaaccngnanntnnncnctnnccngnnancnggcgnanntnnnnanaanttntannnggtggcgggcncccnnnatnttggcaancnnnccgcncncnntgngctntcgagngtncncacnganntncgttttnatnttngnncgctnntcgnnaaanannnctngnanannnccnangagnnccgnncnnancncgtnncnncccncancgcgntnnaacnnnncnngnttctnatcacccacggnncnnacacanngngcgaancnnccnnatannnnnccgancncncngnncngggnncaanggttgnggnnnngncnggtgccnngcngcnggcggncanggcncattcggnngngggntncancntggggnctgcgntttccgcgctnanccnncngaaaccgggcnttnacnnnnnnntgagngncnnantttncccggcncacnccgngcgnanggnnngngcccgnggnntttncgagggataanctntgaaatttttgctgcgttctgcaagctcttggtgacgcttcagtaaacagggcgtaaatctcagcgttatctcagtttcatctcgtaccgtagtattgagtgctttctcgatggcgcctccggcagtgcttcacaacgccagcggcagacagggtacctatgagcgaacaatataacccgggtttttgggatcaggcttgttccacgccgccacccgtgcggcgcctgtancttgtccgcatgcttttcctcgtggtgcctgcactgacgctggtgtattttttcgaggctatcgggcttgaccctatcggcgcggttcccctcatgtacctgtctctgcacggctggtttgcggtcgcgtatgcgcgcaataaatctatggggctcgtcatggtgggaaacctgctcagcgccttggcggcatccgtcatcaccggatttttcgcctatattttggtttttattcacgggccaagaacactatggaaactcctggggggctcgtaccccattctgaccatttggattatggcctccttcgtgatcgagattttatgctccctcatattcgtcttcctgatcttccgcaggttcccctcccgtgccgaacgtgaagctcaagagactcgcgaactgtcacaagaatcttccctgtctgaagaccaggcagtcaacgaccacacgctgactaagaccgaagcacagagcacccaccgctcagactcggatataccataatgagttcctgagctnatccgttccccaacntgccatgattgcagccgttactccntgcaagcgtggtagtgtatgacataacccaacgttggtgtagcgaggcacccgcgcgccgggctacacaaaaattaccggtaacgaggatgtacatatgagcacagaccccatgaaaaacgatgattcttcccgtcagcctgaggaanctagaactncgncgcaggaatcttcggcaacgtcgcatgtagacgatcattcgggggacagcaccgcncataaaaccganggaaccggcggcgcatcgcagcacgaacatagcgggcncaccncaaagtcggnnccntnanccgaggataaacaaaaccccaacaactccggcaacacccagaaccaacagactcctccgtcagcnccagggtatgtcgggttacaaccgggctatcctgcgccgagtccatcgacgcctccaaatccctatgcgaatccgcatgtcgtacccggatattcgggatatgcagtgccgagcccaaccgcatacccgtacactgcatatccggcaaacccgcacgatgagattgtccgcaaacgttcgctgatgtacctgctgcgcctgtgtattgtgggtgctcttattgcgatcggtattgttgcgacgactttcaaccttatcggtgcgatcatcgaacttagcgactgcggaaccggcagctactcatggagtgaatactcgcagcgagtatgccgtgaggataacacctcagcaatcacgggggcgtcgattttccttgtcattttaatcgcgtacccgatatgtcatatttttgggctgcttgccgttaggaaaaatcagcaccacgtgagggtgcttgtcattaacattattggcattgtgctttcgtctttggggattgtgcttgctggtttaatgctcttgggcggtatagccatgataacggcgtttggatcctcgggattacttgccattcttatcatattcctcgtggctggggcagtaccngtggcagagcttattttctcgattattttcgtccggcatgcctcgtggatgaaccataaggactacttcacgaaacccggtgtataaccactgcggggtgccacaccgtgccccattcgagtgctcctggcgtgaaaggtaaaatgtggctcacgagccggtagaaaacgtatctggcaataattctgatatacagtcgatgggtcggggtgcggaacaccatgtggcgcatccagccttgtcggcgggttatccngnncagggtcagcctggtgtgcccgcttatgcagnaccccagaacccctatactgtcgggtctgcagcgtacggtatgcctggtaccttcgggtactctggtgcattatcaacgggtcctgataactccgaaatcagaaaatatgcatcgatatatctggtgcgtctaggtantgtaggngcgcttcttgccctgtatgcgatgggtattatttcaggtattaatgacacgtttgattcgtgcagaggggcgttgaatcaggatgaatgccttgcacgtgaacgtatagtcgttgcacctgggtatattttagtaatatttatcgcggcctttatgatctgcaatatttttggctggttagccgttaaaaataaccgccattatctgatggtgcgcgttatcaacattattgggattgtactttcagccttgggaactatgggaggagccctagttttactcatagcagttggaagtatggcgacctggggacataacgggggtagaggggcattagtcgccctcctggcgacagttgcacctgcggttgatttagctttctcgatcgtatttgttgtgtatgcatcgcgcatgaaacgaggtatatattccccgaagaatacctaccaaccgtgatagggtatgcgtagataaaaaactcangcggcttcgggaatttatacgtcggaaaatccgtataaatccttaggattaggatatatggggaggaggaaactgctgtggatcacgaatctcgcgtgcatgatgccgatgcgnttccntctgcncncatgaacgccgaagatgcttcgcctcgggacgaagccccgccggccggtcaggatgcggtgcccacccgctacacggcaccgattcgccacgcggttccggcagcgccgcccgcatacgcccttgagcatgcacgacagnattcggggganccggaaccagcnccncagncgccgcagcccaagaaacagggngcggttcgtcaggcgcttcgggcagcnacgaaancgaaaactgccgagcctcaggcacctcaggatgcgcctgccccac

SEQ ID NO: 1139 - DNA, 4000 bp, Escherichia coli
  misc_feature (1921)..(1921): n is a, c, g, or t
  misc_feature (1926)..(1927): n is a, c, g, or t
  misc_feature (1929)..(1930): n is a, c, g, or t
  misc_feature (1938)..(1938): n is a, c, g, or t
  misc_feature (1959)..(1960): n is a, c, g, or t
  misc_feature (1965)..(1965): n is a, c, g, or t
  misc_feature (1968)..(1969): n is a, c, g, or t
  misc_feature (1972)..(1972): n is a, c, g, or t
  misc_feature (1980)..(1981): n is a, c, g, or t
  misc_feature (1992)..(1993): n is a, c, g, or t
  misc_feature (1995)..(1995): n is a, c, g, or t
  misc_feature (2207)..(2207): n is a, c, g, or t
  misc_feature (2480)..(2480): n is a, c, g, or t
  misc_feature (2500)..(2500): n is a, c, g, or t
  misc_feature (2562)..(2562): n is a, c, g, or t
  misc_feature (3039)..(3039): n is a, c, g, or t
  misc_feature (3041)..(3041): n is a, c, g, or t
  misc_feature (3044)..(3044): n is a, c, g, or t
  misc_feature (3046)..(3054): n is a, c, g, or t
  misc_feature (3058)..(3064): n is a, c, g, or t
  misc_feature (3066)..(3066): n is a, c, g, or t
  misc_feature (3068)..(3070): n is a, c, g, or t
  misc_feature (3073)..(3073): n is a, c, g, or t
  misc_feature (3075)..(3077): n is a, c, g, or t
  misc_feature (3080)..(3090): n is a, c, g, or t
  misc_feature (3093)..(3099): n is a, c, g, or t
  misc_feature (3101)..(3106): n is a, c, g, or t
  misc_feature (3109)..(3115): n is a, c, g, or t
  misc_feature (3118)..(3119): n is a, c, g, or t
  misc_feature (3122)..(3125): n is a, c, g, or t
  misc_feature (3127)..(3130): n is a, c, g, or t
  misc_feature (3132)..(3134): n is a, c, g, or t
  misc_feature (3136)..(3141): n is a, c, g, or t
  misc_feature (3144)..(3146): n is a, c, g, or t
  misc_feature (3150)..(3155): n is a, c, g, or t
  misc_feature (3159)..(3164): n is a, c, g, or t
  misc_feature (3167)..(3167): n is a, c, g, or t
  misc_feature (3169)..(3172): n is a, c, g, or t
  misc_feature (3174)..(3177): n is a, c, g, or t
  misc_feature (3179)..(3180): n is a, c, g, or t
  misc_feature (3184)..(3186): n is a, c, g, or t
  misc_feature (3189)..(3189): n is a, c, g, or t
  misc_feature (3191)..(3191): n is a, c, g, or t
  misc_feature (3193)..(3193): n is a, c, g, or t
  misc_feature (3195)..(3198): n is a, c, g, or t
  misc_feature (3200)..(3205): n is a, c, g, or t
  misc_feature (3207)..(3207): n is a, c, g, or t
  misc_feature (3211)..(3214): n is a, c, g, or t
  misc_feature (3216)..(3220): n is a, c, g, or t
  misc_feature (3222)..(3224): n is a, c, g, or t
  misc_feature (3229)..(3231): n is a, c, g, or t
  misc_feature (3233)..(3234): n is a, c, g, or t
  misc_feature (3236)..(3236): n is a, c, g, or t
  misc_feature (3238)..(3241): n is a, c, g, or t
  misc_feature (3243)..(3245): n is a, c, g, or t
  misc_feature (3247)..(3253): n is a, c, g, or t
  misc_feature (3256)..(3257): n is a, c, g, or t
  misc_feature (3260)..(3261): n is a, c, g, or t
  misc_feature (3264)..(3265): n is a, c, g, or t
  misc_feature (3268)..(3274): n is a, c, g, or t
  misc_feature (3276)..(3277): n is a, c, g, or t
  misc_feature (3279)..(3283): n is a, c, g, or t
  misc_feature (3285)..(3285): n is a, c, g, or t
  misc_feature (3287)..(3295): n is a, c, g, or t
  misc_feature (3297)..(3297): n is a, c, g, or t
  misc_feature (3299)..(3301): n is a, c, g, or t
  misc_feature (3304)..(3317): n is a, c, g, or t
  misc_feature (3319)..(3320): n is a, c, g, or t
  misc_feature (3322)..(3323): n is a, c, g, or t
  misc_feature (3325)..(3325): n is a, c, g, or t
  misc_feature (3327)..(3329): n is a, c, g, or t
  misc_feature (3331)..(3331): n is a, c, g, or t
  misc_feature (3333)..(3342): n is a, c, g, or t
  misc_feature (3344)..(3345): n is a, c, g, or t
  misc_feature (3348)..(3353): n is a, c, g, or t
  misc_feature (3357)..(3358): n is a, c, g, or t
  misc_feature (3360)..(3360): n is a, c, g, or t
  misc_feature (3362)..(3363): n is a, c, g, or t
  misc_feature (3365)..(3366): n is a, c, g, or t
  misc_feature (3368)..(3369): n is a, c, g, or t
  misc_feature (3372)..(3372): n is a, c, g, or t
  misc_feature (3374)..(3374): n is a, c, g, or t
  misc_feature (3376)..(3377): n is a, c, g, or t
  misc_feature (3379)..(3382): n is a, c, g, or t
  misc_feature (3386)..(3389): n is a, c, g, or t
  misc_feature (3391)..(3392): n is a, c, g, or t
  misc_feature (3394)..(3396): n is a, c, g, or t
  misc_feature (3398)..(3398): n is a, c, g, or t
  misc_feature (3400)..(3405): n is a, c, g, or t
  misc_feature (3408)..(3409): n is a, c, g, or t
  misc_feature (3411)..(3412): n is a, c, g, or t
  misc_feature (3414)..(3416): n is a, c, g, or t
  misc_feature (3418)..(3418): n is a, c, g, or t
  misc_feature (3421)..(3421): n is a, c, g, or t
  misc_feature (3423)..(3423): n is a, c, g, or t
  misc_feature (3426)..(3431): n is a, c, g, or t
  misc_feature (3433)..(3436): n is a, c, g, or t
  misc_feature (3438)..(3440): n is a, c, g, or t
  misc_feature (3442)..(3444): n is a, c, g, or t
  misc_feature (3446)..(3450): n is a, c, g, or t
  misc_feature (3452)..(3453): n is a, c, g, or t
  misc_feature (3456)..(3457): n is a, c, g, or t
  misc_feature (3459)..(3469): n is a, c, g, or t
  misc_feature (3471)..(3472): n is a, c, g, or t
  misc_feature (3474)..(3479): n is a, c, g, or t
  misc_feature (3481)..(3488): n is a, c, g, or t
  misc_feature (3490)..(3495): n is a, c, g, or t
  misc_feature (3498)..(3501): n is a, c, g, or t
  misc_feature (3504)..(3504): n is a, c, g, or t
  misc_feature (3506)..(3507): n is a, c, g, or t
  misc_feature (3509)..(3510): n is a, c, g, or t
  misc_feature (3512)..(3513): n is a, c, g, or t
  misc_feature (3515)..(3518): n is a, c, g, or t
  misc_feature (3520)..(3525): n is a, c, g, or t
  misc_feature (3527)..(3528): n is a, c, g, or t
  misc_feature (3530)..(3538): n is a, c, g, or t
  misc_feature (3540)..(3540): n is a, c, g, or t
  misc_feature (3542)..(3545): n is a, c, g, or t
  misc_feature (3548)..(3548): n is a, c, g, or t
  misc_feature (3551)..(3565): n is a, c, g, or t
  misc_feature (3567)..(3570): n is a, c, g, or t
  misc_feature (3573)..(3574): n is a, c, g, or t
  misc_feature (3577)..(3577): n is a, c, g, or t
  misc_feature (3579)..(3580): n is a, c, g, or t
  misc_feature (3582)..(3583): n is a, c, g, or t
  misc_feature (3585)..(3589): n is a, c, g, or t
  misc_feature (3591)..(3591): n is a, c, g, or t
  misc_feature (3596)..(3598): n is a, c, g, or t
  misc_feature (3600)..(3600): n is a, c, g, or t
  misc_feature (3602)..(3604): n is a, c, g, or t
  misc_feature (3607)..(3610): n is a, c, g, or t
  misc_feature (3612)..(3613): n is a, c, g, or t
  misc_feature (3615)..(3631): n is a, c, g, or t
  misc_feature (3633)..(3633): n is a, c, g, or t
  misc_feature (3637)..(3641): n is a, c, g, or t
  misc_feature (3643)..(3644): n is a, c, g, or t
  misc_feature (3646)..(3654): n is a, c, g, or t
  misc_feature (3656)..(3657): n is a, c, g, or t
  misc_feature (3659)..(3660): n is a, c, g, or t
  misc_feature (3662)..(3665): n is a, c, g, or t
  misc_feature (3667)..(3667): n is a, c, g, or t
  misc_feature (3669)..(3669): n is a, c, g, or t
  misc_feature (3671)..(3672): n is a, c, g, or t
  misc_feature (3674)..(3676): n is a, c, g, or t
  misc_feature (3680)..(3682): n is a, c, g, or t
  misc_feature (3685)..(3687): n is a, c, g, or t
  misc_feature (3693)..(3693): n is a, c, g, or t
  misc_feature (3695)..(3695): n is a, c, g, or t
  misc_feature (3697)..(3697): n is a, c, g, or t
  misc_feature (3699)..(3702): n is a, c, g, or t
  misc_feature (3704)..(3713): n is a, c, g, or t
  misc_feature (3715)..(3715): n is a, c, g, or t
  misc_feature (3717)..(3718): n is a, c, g, or t
  misc_feature (3722)..(3722): n is a, c, g, or t
  misc_feature (3724)..(3730): n is a, c, g, or t
  misc_feature (3732)..(3732): n is a, c, g, or t
  misc_feature (3736)..(3736): n is a, c, g, or t
  misc_feature (3738)..(3740): n is a, c, g, or t
  misc_feature (3742)..(3742): n is a, c, g, or t
  misc_feature (3746)..(3748): n is a, c, g, or t
  misc_feature (3750)..(3750): n is a, c, g, or t
  misc_feature (3752)..(3753): n is a, c, g, or t
  misc_feature (3757)..(3757): n is a, c, g, or t
  misc_feature (3759)..(3759): n is a, c, g, or t
  misc_feature (3761)..(3761): n is a, c, g, or t
  misc_feature (3763)..(3763): n is a, c, g, or t
  misc_feature (3767)..(3767): n is a, c, g, or t
  misc_feature (3770)..(3770): n is a, c, g, or t
  misc_feature (3773)..(3773): n is a, c, g, or t
  misc_feature (3775)..(3775): n is a, c, g, or t
  misc_feature (3777)..(3779): n is a, c, g, or t
  misc_feature (3782)..(3783): n is a, c, g, or t
  misc_feature (3785)..(3787): n is a, c, g, or t
  misc_feature (3789)..(3789): n is a, c, g, or t
  misc_feature (3793)..(3793): n is a, c, g, or t
  misc_feature (3795)..(3795): n is a, c, g, or t
  misc_feature (3797)..(3800): n is a, c, g, or t
  misc_feature (3802)..(3803): n is a, c, g, or t
  misc_feature (3805)..(3805): n is a, c, g, or t
  misc_feature (3807)..(3808): n is a, c, g, or t
  misc_feature (3817)..(3818): n is a, c, g, or t
  misc_feature (3821)..(3821): n is a, c, g, or t
  misc_feature (3827)..(3827): n is a, c, g, or t
  misc_feature (3831)..(3833): n is a, c, g, or t
  misc_feature (3835)..(3837): n is a, c, g, or t
  misc_feature (3839)..(3839): n is a, c, g, or t
  misc_feature (3842)..(3842): n is a, c, g, or t
  misc_feature (3846)..(3847): n is a, c, g, or t
  misc_feature (3849)..(3850): n is a, c, g, or t
  misc_feature (3852)..(3852): n is a, c, g, or t
  misc_feature (3854)..(3855): n is a, c, g, or t
  misc_feature (3859)..(3860): n is a, c, g, or t
  misc_feature (3864)..(3866): n is a, c, g, or t
  misc_feature (3869)..(3872): n is a, c, g, or t
  misc_feature (3874)..(3875): n is a, c, g, or t
  misc_feature (3877)..(3877): n is a, c, g, or t
  misc_feature (3880)..(3880): n is a, c, g, or t
  misc_feature (3882)..(3883): n is a, c, g, or t
  misc_feature (3885)..(3885): n is a, c, g, or t
  misc_feature (3888)..(3890): n is a, c, g, or t
  misc_feature (3895)..(3895): n is a, c, g, or t
  misc_feature (3900)..(3902): n is a, c, g, or t
  misc_feature (3905)..(3907): n is a, c, g, or t
  misc_feature (3912)..(3912): n is a, c, g, or t
  misc_feature (3914)..(3914): n is a, c, g, or t
  misc_feature (3917)..(3918): n is a, c, g, or t
  misc_feature (3920)..(3921): n is a, c, g, or t
  misc_feature (3923)..(3924): n is a, c, g, or t
  misc_feature (3926)..(3926): n is a, c, g, or t
  misc_feature (3940)..(3940): n is a, c, g, or t
  misc_feature (3948)..(3948): n is a, c, g, or t
  misc_feature (3952)..(3952): n is a, c, g, or t
  misc_feature (3957)..(3957): n is a, c, g, or t
  misc_feature (3959)..(3960): n is a, c, g, or t
  misc_feature (3964)..(3964): n is a, c, g, or t
  misc_feature (3966)..(3966): n is a, c, g, or t
  misc_feature (3971)..(3971): n is a, c, g, or t
  misc_feature (3973)..(3973): n is a, c, g, or t
  misc_feature (3980)..(3980): n is a, c, g, or t
  misc_feature (3982)..(3982): n is a, c, g, or t
  misc_feature (3985)..(3986): n is a, c, g, or t
  misc_feature (3993)..(3993): n is a, c, g, or t
  misc_feature (3996)..(3996): n is a, c, g, or t
gtatagagggaaatatcctgatgatatgttgaaggactttttcgagtattggactgaatgcggaggacggaaaatgcgctttgagaaggaacgtacatttgaagtttccaaacgtttagtcagatggtctaataatgattttaacaagtatgggaaacaacttaattcaagtcaacagcaatctcccggcaaccgaaaagaaagcgttgaaagacttgctgaccttgcaagcggagtattacaagggattgcacgtaagttcgattaaagaagctgttctcaacactcctaacctaccactctccgttataagaaaagaaatcacattggctggcgcaagagccatactggtaattgcgattaacgagcttgtgtcttttttcaatgttggaaaaacgatgaatgatgttcaagtggcacttaccgctgatctaataatagacagattctattatctcaaattggaggaaatcaaattgtgtttccgtaatgctatggcttccggtaagatttacgatagactggacggtaatatcattctcggctggttaaatgaatacgatgcacagcgtgatgaaattgtttcttctctttcaattaatgaagcccatgaacaaaataataacagcactggaatgttctacggagaatatatcaaacatctaactgaaagatcggaaaatggagatgaagaggccaaagaattattggaatcccatcaatcattcatacaaaggatgaaatcaaatgataaagaagccgctttcaaaaaatggaaagaagaatattatggaagaactaagagacaaactacttgactgggcgaaacaatttgaaacacctgattttataaaagatgatcctatattttttccacataagtacaatgataaaaaggacatagaaatcagtgcctttcttacttcatggatagctttcgggaatcgcaaactgataatgcagcaagcagaaattttggataatctaatgggtaattctccttatgccttcattatgaacaaagtatgggaacaatacaaagaaaatacaaataccttctaccgtatgttcacctaccatgacttcttctgcatttgccagcggttgtacaacatatatcaggaatgggatgatttggaagtattttatgagggttacaacaatgttatccgtgaaatacaaacagattttggtggcgtaaaaggtattccaaaattggagcgtgattctccatgcaagcgtatttgtctgtttctacggtgggtagtacgaaaatcgccggtggatttaggtatttggaatattattcacccgacagaattatacataccattggatgcacatgttgcaaaaatggcacaccagcttgggataacaacacgcaaaacagaggactggaaaatggttcaacaagtaaccaattacatgaaaacaattttcccggatgatccgtgccggggagattttgcattattcggatatagtattaacaataaataatttacattatgtcagaacttaaaatcacacaagaaaaggtaacagccgcttttagtgaagcaaacgactgtcctaaagcaattagtattctaacagccctattcggaaagcaaaagccggattatacagattatcacaatattaaaacctacgaagatgcttgtgaagcaataggtgtaaaacctattgttcgcctacttgttgaggatgaagacggacacaaagaagaagtggctgatattgcacacctcgcctacatcaaactatgcacaattgctcgtgcattgaacaacgatcctgattttccacgatttactaaagatgaataccgttatacgccgtggttttatctttataatcagaaagaaattgatgaaatggacgaagaggatcgtaatcagctggttctttggggcggtantgcgnntnncggtgcgnattgcggcctcgcttatgcgnnctcgnatnncgnttggtcgnnctcgtatgcgnntntcggctctcgccttgctgtaaaatcaagtgaaatcgcaatttactttggagaacaattcaaagaattgtggaaagactttctgattggaaaaaagtaatcacactggggaggccgcatcaaagcggccttttccataccttttaaatctatgactccaaaagaatttttcgacaaagtggtggaaatgcgccgttgccaaaaagaatatttnaaaaataagagacagatagatttacgaataagtaaacaaattgagcgtgaagtagatgaagaaattgaacgtgttcaaaaaatccttcacgacaaacagaatccgcaactcttttagactatggttaatatgaaaatccttgacctgccattaaaagcaaaatggtatgaaatgatcgaatccggaaataagaaagaagaatacagagagatcaagaaatactggatcggaagattagcaaaatgtggaggtcgcaattcctatgaaaagacnggtttctattgtaagaaagntatttgtttttcttgtattacacgtggaaacggctttcaccccaaagaatacactcatgttngcttccgttttggctacaccaaacggacaatgctttttgaacttgaatctataaccatcggagttggtaacaccaattggggagcaccggataacgaatgtgtatttatacttaaactgggaaaatgtatcaaaaaaaatgaaagtaaggactcaacagaatttcaaccgaaaaactcgtgaaacagtattcggtatcagcatcatgcctgacggtggcagaagatattgtaaatacccaataggccaccaagaatacaaagactatacccaagcacaccaagctatgaaagatgtacaaaagatattggataatggaggccgattagtgtattctcccaaaggtagtgccgggattaataaaaatgaatatgtaaaaattgaaatgacataaaaatgaaaatattagtaagtttttcaggtggtaaggattcacaagcatgtttgatccaagccttcaaacaatatgggggggggnanttnannnnnnnnntttnnnnnnncngnnnggnannnccnnnnnnnnnnnaannnnnnnannnnnnttnnnnnnnaannggnnnnannnntnnnannnnnnaannnaaannnnnntttnnnnnnttngnnnntnnnnannaaannnttncntncnnnnannnnnngntttnnnncnnnnnannnaaaannnanncnannnntnnntnnnnnnnttnnttnnaannaannnnnnntnntnnnnnangnnnnnnnnncngnnnaannnnnnnnnnnnnngnnanngnannngnannnnnnnnnntnnaannnnnntttnnancnnannannaangnannannnnaaannnncnnannnangnnnnnnaannanngnnntnccnanttnnnnnntnnnntnnnannncnnnnntnnaanngnnnnnnnnnnnanntnnnnnntnnnnnnnngnnnnnnggnnnnaancnnanncnntnnnntnnnnnngnntnnnnnnnnntngnnnnttnccnnnnnnnnnnnnnnngnnnnaannaantnnanntnnnnncnaaaannnancnnnaannnngnnannnnnnnnnnnnnnnnnanaaannnnngnnannnnnnnnntnncnncnnnnanananncnnnaaannntcnnnaaaaanananannnncnnnnnnnnnngnanntttngnnnnnnntnaaanannntncccnnnanannttcnancngnaaantgnatntncnnncannannntntttnangnnnnanncnannaaataaaannatnatgaanaaannncnnntnatntttnnanncntnntttnnttannnggnnnnanngnacnannanttnnnaaaangaacnnnttnnnaaaananttnnannanncngattcaatgtttantcaaaaanattnattananngaananattanangaaaagncngcnnaatatgnagnaggg

SEQ ID NO: 1140 - DNA, 4000 bp, Escherichia coli
  misc_feature (4)..(4): n is a, c, g, or t
  misc_feature (55)..(55): n is a, c, g, or t
  misc_feature (100)..(100): n is a, c, g, or t
  misc_feature (329)..(329): n is a, c, g, or t
  misc_feature (459)..(459): n is a, c, g, or t
  misc_feature (624)..(624): n is a, c, g, or t
  misc_feature (1189)..(1189): n is a, c, g, or t
  misc_feature (1237)..(1237): n is a, c, g, or t
  misc_feature (1492)..(1492): n is a, c, g, or t
  misc_feature (1988)..(1988): n is a, c, g, or t
  misc_feature (2900)..(2900): n is a, c, g, or t
  misc_feature (2945)..(2945): n is a, c, g, or t
  misc_feature (2948)..(2948): n is a, c, g, or t
  misc_feature (2984)..(2984): n is a, c, g, or t
  misc_feature (3056)..(3056): n is a, c, g, or t
  misc_feature (3243)..(3243): n is a, c, g, or t
  misc_feature (3272)..(3272): n is a, c, g, or t
tganctgaaatttaaaaatatagactctattgacctgaccacccgttcggatatnaagcttatgtatgacggcaggcttgaaataaagcttggaagctcngtggatatggaatacaagcttacatatcttaaggcggtaattgacaagagcattactgacgattacgagggtacgcttatttacaatggtgctgacagcggcatttcggctattccgaaatcgcaggacgagtcgtcaaaacctgacgacacaagctctgcaaagccagatgacagcagcagtgcggtatcggctgatactaatattgatgacggcaacacatgggacngtgataactcatggtcaggggacgatagccaaggctacagcgacgataccaacgcatgggacggcaatgatgatgctgacaatgcaggcacagatcagtggacaaacgagaacggaaacaccgactgggnatatgataacggcggcgatcagggctataccgacaatggatatgctgacaacggctatgtggacgatcagacgaacacagattggtaggggtcaggataactaattgtatagtatacacaaatgaaactgaaaaatcagtcgttttattgataattaataaaaantttataatggtttcatttaagttctttactttttgacaaaagtatgataatatattattgtatctatttatgtgcatattcggcacataggcttttttgcattttatttttgatttgataaattgatatgtaaaaatacggagaagtatgaaaattcgcttttaggaggagttctattatgggttacgagtatgttgaagagccagtcgtaggcgcaaagatcaaggtaatcggtgtcggtggcggcggtggaaacgcacttaactgtatcgcacaggccggtatcgagggaaatgttgaatatatcgctgttaatactgatatccaggcactgcataagtcagctgcacacacacagatccagataggtgagaagcttactcacggtctgggcgcaggtgcaaagcctgagatcggcgaggcttccgctcaggaaagcaaggacgagatcgagaacgctatcaaggacgctgatatggtattcatcacagcaggtatgggcggtggaacaggtactggtgctgcacctgtagttgctgagatcgcacagtcacttgacaagctnactatcgcagttgttacaaagcctttcaaatttgagggcgctaagaanatggagagagcagaaaagggtatcgaggctcttatcaagcacgttgacgctcttatcgttatccctaaccagaaccttatcacaaacgagatgcgcctcactatgaagcagtcttatgctatcgctgatgaagttcttaagacagacgttatcgctatcgctgagatcattacaagacatgatgagatcaacgttgacttcgctgacgttactactattcttaagggtgcaggcagagcgcatattgctatcggncacggcgagggcaaggataaggtacaggatatcatcaatcaggtcatttcttccgaccttcttgaaacttctatcaagggtgcgagaagacttatcgtaaacgttacaatgagcgaggatctccttatcagtgatatggacgagcttactgctgctatagcagacgctgctgacgataacgttgagatcatttttggtaacggtacaaatcctgataccaaggacgctatggacgttactgttatcgctgctgactttgttgacagagatgacgttcctgaggctgctgcaccaaaggctgcgacaacatatactgcaaattttactcagaaggctgacgacgcaaaggctgacgctgaagcgatgcacaaggctggcgttaaggctgctgataatccaaattattacgacgatatcttcaatatcttcaagaacaagtaataatgctttcaaaggcggatcggcgtttacgctgtccgccttgtttgaaccaaantcggaaaacgtttacataattaaagagattttcgtattctcagaaaattatcatgatattgaaaatttttcgcaaaagcacttgaaatcttacggaaaatttgatataattattctgtgataaatatgattttaagacattttgtataaatttcagttgctattttgtatggaataatgaaatttttgaaaacggcttaaatcagttgaaaaataacgtggtttattgtataatagagataatcactaatgtggagggattgaaatggctagtaatggttatttaagaacggttagagtcggcggatttgataagcaggacgttcttgcttatgtagacgaccttacttctaaaatttatactcttgaggctcaggtcaatgaccagaacgaaactatcgaacgtcttgagaagcagggcggcgctcagaagcaggacttcgagggcaagaaggaacttgagaaaaaggtagaagaggctaaaaacaagatagccgagcttatggctaatactgatacaatgaaggttcgtatcgctgactatgagcagcaggtaactgaaaaggacgctgagcttgaaaagcagaagcaggagatcgaggatcttaaagagaagctcgaaactgctgaggctaatgccggcacagccactcctgcattcgatcttggaagcgtgttcatggaagctcagaacacagctaataaggtcgttcaggaagctaagaaggcagctaagcagatggaagatgaagctaagcagcttcaggatcaggttcttgctgacgcaaacgcacaggcacagaagcttgttacaaatgctcagacagaggctgatactacacttcagacagctaagtcaagcgctgctgcaatgacggctgccgctaagcaggaggctgaagctgttacaagngctgcaaacaagcaggctgccgaggtaacttctaaggctaacgcngangcagaggctgttacatctaaggctaacgcagaagcngctgacgtaacatcaaaggcaaatgctgaggctgcaaaggtagtaagcgacgctaagaacgaagctaagaanatcagagcacagtctgctgatctgagagagtctgttaagacacaattcacaagtctgagcgaaactgttcagcagctcgttacatcacttaacgatctgtatggcaatagtatcggtgctgtaaacactgcaagagatcttattgacgatggtctttctcttgtaagcgatgatgacgctgaataanagtttgtcatgtcggaaataagaaaggtncgttccgaggagcttaaagcggtgagcggagagcttaaatgcggtgacaagatattgctttcgggcgttgtgtacactgcaagggacgctgcacataaaagattcaatgctttgcttgacgagggaaaggagcttcctatccctttgaaagacgctgttatctactatgccggacctactcctgcacctgagggaaagcctatcggttcatgcggaccgaccacttcaggaagaatggacaggtttgcaccgaggttgcttgatcttggattgggcggaatgatcggcaagggcgagagatcacaagaggtaagggacgccgtgataagaaatggtgcggtctatctctgtgctataggcggtgcgggcgcacttgcctgcaactgcataaagtcttgtgaggtagtggcttttgaggagctgggctgtgaatctgtgaaaaaactttacgttgaggattttcctcttgttgtggctgacgattgccacggaggggatattttcagcgatggcagagcaaaatactgccgtgtataacatcaaagttgcgtaaattgcggtcagccgtgtatttcgacacggctgactttttgtttgttgaaaatcacaagaatacattcttaaaactgtggtatgttacaaatattttcacagggacggcggatttcgtcaattctcttgacttttatggtctaaaatggtattataacattacgcagtggcgtcag

SEQ ID NO: 1141 - DNA, 4000 bp, Escherichia coli
  misc_feature (1)..(742): n is a, c, g, or t
  misc_feature (879)..(879): n is a, c, g, or t
  misc_feature (882)..(882): n is a, c, g, or t
  misc_feature (896)..(896): n is a, c, g, or t
  misc_feature (929)..(929): n is a, c, g, or t
  misc_feature (1022)..(1022): n is a, c, g, or t
  misc_feature (1069)..(1069): n is a, c, g, or t
  misc_feature (1141)..(1141): n is a, c, g, or t
  misc_feature (1162)..(1162): n is a, c, g, or t
  misc_feature (1169)..(1169): n is a, c, g, or t
  misc_feature (1174)..(1174): n is a, c, g, or t
  misc_feature (1332)..(1332): n is a, c, g, or t
  misc_feature (1350)..(1350): n is a, c, g, or t
  misc_feature (1509)..(1509): n is a, c, g, or t
  misc_feature (1635)..(1635): n is a, c, g, or t
  misc_feature (1739)..(1739): n is a, c, g, or t
  misc_feature (1987)..(1988): n is a, c, g, or t
  misc_feature (2064)..(2064): n is a, c, g, or t
  misc_feature (2393)..(2393): n is a, c, g, or t
  misc_feature (2398)..(2398): n is a, c, g, or t
  misc_feature (2496)..(2496): n is a, c, g, or t
  misc_feature (3001)..(3001): n is a, c, g, or t
  misc_feature (3011)..(3011): n is a, c, g, or t
  misc_feature (3073)..(3073): n is a, c, g, or t
  misc_feature (3076)..(3076): n is a, c, g, or t
  misc_feature (3797)..(3797): n is a, c, g, or t
  misc_feature (3821)..(3821): n is a, c, g, or t
  misc_feature (3824)..(3824): n is a, c, g, or t
nnnnnnnnnnnnnnnnnnnnnnnnnnnnnnnnnnnnnnnnnnnnnnnnnnnnnnnnnnnnnnnnnnnnnnnnnnnnnnnnnnnnnnnnnnnnnnnnnnnnnnnnnnnnnnnnnnnnnnnnnnnnnnnnnnnnnnnnnnnnnnnnnnnnnnnnnnnnnnnnnnnnnnnnnnnnnnnnnnnnnnnnnnnnnnnnnnnnnnnnnnnnnnnnnnnnnnnnnnnnnnnnnnnnnnnnnnnnnnnnnnnnnnnnnnnnnnnnnnnnnnnnnnnnnnnnnnnnnnnnnnnnnnnnnnnnnnnnnnnnnnnnnnnnnnnnnnnnnnnnnnnnnnnnnnnnnnnnnnnnnnnnnnnnnnnnnnnnnnnnnnnnnnnnnnnnnnnnnnnnnnnnnnnnnnnnnnnnnnnnnnnnnnnnnnnnnnnnnnnnnnnnnnnnnnnnnnnnnnnnnnnnnnnnnnnnnnnnnnnnnnnnnnnnnnnnnnnnnnnnnnnnnnnnnnnnnnnnnnnnnnnnnnnnnnnnnnnnnnnnnnnnnnnnnnnnnnnnnnnnnnnnnnnnnnnnnnnnnnnnnnnnnnnnnnnnnnnnnnnnnnnnnnnnnnnnnnnnnnnnnnnnnnnnnnnnnnnnnnnnnnnnnnnnnnnnnnnnnnnnnnnnnnnnnnnnnnnnnnnnnnnnnnnnnnnnnnnnnnnnnnnnnnnnnnnnnnnnnnnnnnnnnnnnnnnnnnnnnnnnnnnnnnnnnnnnnnnnnnnnnntaaaattgccatctcataggctgtcaggctttcgcccaagtggcgccgcatcgcgggccaatcgccccgcaatgcccggttgggcgcggcaaaaatagcctcagccaggggggccaacacgccctgcgcctttgggnggngaaagtgaaacgcnccctcgggcaggtgcacatcggccagcagcccncgccccggttctgccaccgccctttgccagcgcgtcaccaaccaacaatgaaacccatccctggccggcgcgctgggcgccgcttgcggtggngtatcggcctgcgcctgcagccacatgccccaggccagcggcaccgnctggcccgcaaaccgcaacgccaaggcaacttcggccagcaaatcggcgtcttgcgccaaaaacgccaccgngcccgcaaaatgcaggctttncagcgcngcctnctgcagattgacctgcttgcgcccataatctgattggtaaaacaccaaatgcgtcagcgcgtaggcggcgttttggttgggcatcgcaaactggctgctttgccccataaaccccgccaaccgctgccccagcgccgggtcggggcggcccaacccanggcgcgcaaacagcgccnctgcctcggcgcgctgttggtcggacagctcgaccaaatcgaggcgctgatcggcacaccattgcgccagcaccaaacccacgcggccgggcatgcccagatcctctagatcaagggccatagacaggaaaaagcggtaatattgggggaaatcccccncctgctgcgccaagctggcatagattgggtgatacagcgccaaaacatcagggggcaggctggcgccagtggcgcggagcacgcacaggaattcggcattttctttcagccacatcacatcgcccntcggcctgcgctgctgcaacagcgcgcaggccagccgggccatggccccggcttttggcgcggggctggggcggcgaaaggccagaacctgtgccacgatccgnggcttagctgtcgaggcctgcgatataggcacccaccccctgccccagcagcatgtcgctgcccgtctgcgggcccagccctgcgatatagctgccggtggcgtggcctgcgaccatctgcgccggggcgtgctggggcgaaactgtgggggtggcctgtggcgtggccagttcggcggtgtgcttcaaaactgcagtcatgtcgggttctcctttgtggtgagtaaacaaaagtgaaaacacctttnngctgtatgtcaacacacttattcccgccctagatgtttttggccctacagggggccatcggcttgcctgcgccggnccatgggggatagatggacgaaagaggagaggcagatgaaaatcgcgacgtttaacatcaacggtgtcaaagcccgcattcaaacgctgtgcgattggctggatgaaaccaagcccgatatcgccattttgcaagagatcaaatctgtcgacgaggcctttccccgcgagctgatcgaagaccgcggctatatcgtggaaacccacgggcagaaaagctttaatggcgtggcgcttttgtcgcgttacccgctggaagatgtcagccgcggcctgcccggcgacgacagcgacgaacaggcccgctatatcgaggccacggtggtgggnaaaancgcgctgcgcatttgcgggctgtatctgcccaatggcaacccggtcgaactggaccacgcaggccagcccgtggcgggcggcaaatatgcctataaantggcatggatggcgcggctgcaggcccgcgcacaggcgcttttggcgcaggaaattccgtttttaatggcgggcgattacaacatcatcccgcaagccgaagacgccaagcgccccgaggcatggaccgaagatgcgctgtatcggcaaaccagccgcgaggcgtttcgcaaaatcttggcccttggcctaaccgaggcgtttcgcgcccgggtgcaggggccggggcattattcgttttgggattatcaggccggggcgtggaaccgcgacgatggcatccgcatcgatcactttctgcttagcccacaatgtgccgacatgatgatagattgtcatatccagcgtgacatgcgcgggcgcgaaaaaccatccgatcacgtgcccgtctggctggaactggataattaagcgcaaggcccgcgcgcttggcgcgggctgctgaaacttaggcgcttaggcggtctttcaccgccgggccaacggcaccgaaatccatttgaccngtgtatttgnctttaagcgcggccatcactttgcccatatcgcggatgctttgtgcaccgatttcggcaacngcngcatcgatggccttgtccacctcggcctgcgacagctggcgcggcaggaattcttcgataatcacaatctcggcgcgctcgcgttcggccagatcaaggcgcccaccctcttcgtaggcgcgcgcgctttcttggcgctgcttggccatcttgcccaaaatcgccaagatctcgctatcgggcacaccctcgtcattgccatcgctgcgcgcatcaatatcgcggtctttgatcgcggcatttatcagccgaagggtcgacaagcgttcgggctgcttgtctttcatggcttgtttgagggcgctgttcacccgatctcgcatgtccattgctggctccgttttcccgttcggtcctgaatgcgtgtagataggcattaaaggcggcgctgacaacaggcgttgcacccttgacctgtggggcgtggggccataggtacacgccaatttggccgcccagaggaatccccatgtcgcaaacatctgccccccgcccaaccgcgtgccttgcgcttgctgatggcacagtgttttacggccgcggatttggcgccacaggcacgaccgaggcggaattgtgtttcaacaccgccatgaccggctatcaagaaatcatgacagacccctcttatgccgggcaggttgtcacctttaccttcccgcatgtgggcaatgtgggtgtgaaccccgatgacgatgaaaccgccgatcccgtggccgcnggcatggtggtcaaatgggacccnacngaccccagcaactggcgcgcggccgaacatctgtcgccttggttgcatcggcgcgggcgcattgcgattggtggcatcgacacccgccgccttacccgggccatccgccagcagggtgcgccgcatgtggcgctgtgccataaccccgagggcagcttcgacatcgaggcgctggt

SEQ ID NO: 1142 - DNA, 4000 bp, Escherichia coli
  misc_feature (802)..(802): n is a, c, g, or t
  misc_feature (1991)..(1991): n is a, c, g, or t
  misc_feature (3723)..(3723): n is a, c, g, or t
aaggtgcccgtgtattccggcgtgctcatctatatgtgcctggcttcgctgggtttgccagggctggccggcttcgtcggtgagttcttctgcctactcggcagtttcgccatcttcaagctgctgacgtgcatttccgtgctcggcgtcgtcctgtgcgcggcgtacttcctgtggatgatccagcgaatgctgttcggcccgttcaacgagcggtatgtcgacctgaccgacatgaacggagccgagatcttctgcctggtgcccctgatggcgctgacgctcttcatcggcgtctacccggcctttgtgttgggcccgatcaacatcgcgatgcagaacgtgctgaagctgatgggcggataggccccggaggtcctatcggtccaacccggccgacccatctcactcaccggagccatttcccttgggcggaaccgtcttctacttgatgcccgaaatcgtcctcgccctcttgggcgtggggctgatcgtgctcgacaccttcaccagccgcgagcgcaagaactggctcggctggctcgcctttctgggcctattcctggcgtttgagttggcggcctgcgccactgccgtctggtcgttgggcccgcaaggcgggtcggtccacgcgagcgtgctgcctcgttgggcggcccagacggtcaccttcgatcccttcgccggctacttcaagctcctcgtcatcgccgctgccgggctgaccgtcctgctctcgctccactttgtgcacaagcacgttcgcaccggggttggcgagttctacgcattcatcgtattnggcacgctgggcatgacgctgatggtgtccagcaccgacctgattctgctctaccttgccatcgagttcacctcgatctccagctacgtactggcaggctacctccgccgcacgccgcagagcgccgaagcgggcatcaagtacttcctgctgggtgcggtcagctctgccaccatgctatacggcatgtcgctgatatacgggttctccggcagcacgcacattggcgagatcgcccagaaggtgcaagcgggaaacgggactgccccgatcgtcgtgctgggcgtcggtctgatgctggccggctttgggttcaagatcgccgcggcaccgttccacatgtggtgccccgacgtgttcgaaggcgcgcccacaccggtggcagcgctgttgtcggtcggcccgaaggccgccggcatggccgtgctgatccgggtgttccacgtgttctttggaccgcaggaagtggagtggagcctggtcattgccgtcatcgcgacggcgaccatgaccatcggcaacgtagtcgcgctggtgcagaccaacatcaagcggatgctgggctactcgaccatcgcccaggttggctacatgctcgtcggcgtcgccgccacggggccggaggagtggcggattcccggggtgctgctctacctcctgacctacctgttcatgaacctgggcgccttcgcggtcgttatcaccgtctcgaacgcgatcgagtcggacgagattgccgactactcgggtctgttccgccgggcgccggttgcgtgcctggcattcctggttttcgccctgtcgctggcagggctaccgccgatgtccggcttcgtggccaagttcatgatcttcggagcagcgattcactcgggactgctgtggctggccctggtcggcatcgccaacagcgtcatctccgtgtactactacttcaacgtggtccggctgatgttcttcgccaaagcagccggcgtcgaagagccgctgccggagccgggcaccctccgcctcgtgacggttctgacggcagccgccacgatcctgatcggcgtctacccgcagcccttcatcgacctggcccgtgggtcgctgcagatgctggcgccgttctgagcacagcaccgccctccctgtagcgtagccccttgtgggcgttactgagttggcactgcagacgcccacaagnggctacgctacgagggaggtgaataggagccctctcccatgcccgaaaccaccttcgtcatgctcaagcccgacgccgtccagcgtcggctcgtcggcgaggttctctcccgactcgaggcgaaaggactgactctcgttggcctgaagctcatgcagcttccgcaagcacttgtggaagagcactaccgcgaccacaagggcaagcacttctacgagcccctgctccgcttcgtcacctccggtcctgtcgtagtcatggctgtgcgcggcttcaacgccattcagcgcgtgcgcgacctgatgggcgccaccagccccgcccaagcgcttcccggcaccatccgcggcgacttcgccctgagcaaccaaaagaacctgatccacggctccgacagccccgagagtgcccagcgagaactcggtctcttcttcgctccaggcgagatcctggagtacacccgctgcgaggcggagtggctgacaggagaaggcgaggcgtagccgccacgtaccgaggtcgccctcggtctccgcccgcagttgcccttcccccgttgtccgcaagtctccctgtccccaagtcccctcgtcccaccttcccccggaggcagcccatgcagaaagtcagcgagaaagacggcaagtaccgtggcggcgactggggcgtcaagtacatgctgcgcggcccgaagctggattggggcgtcctcctgctcaagcccggtcagcagatgggtggacacggtcaccgcgaggtcgaggagacgttctacttcgtcgagggcagcggcaagatcgtcgtcgacggcgtcgcccatgccgccgaagctggagatgcctttcggtgcgagccaccggagatccacgacctgctcaacgacggcgacgcagactgcaagatcgtcttcctcaagacgccctacctgcccgacgacaagatcgacgcgtgaccggagccggtgctcactgcggattcgtcggagcgccggccggctggcgcagccgttccagtgccgctcgcgcctcgtccgcccggacgccttcgggctcgactgcgaggaatcgctcgaaacaaggggcggcagcccctgccggctgcatcgcggccagtgtccacgccagtctatggagcgagtcggcgtgcttggggtcgagcgccagcgcggcgtagaatgagagcttcgcccgctccaggtcgccggtctgtttgtagaccagtccgagccgacagaagtcttccggcgttcgttgcggggcaaccggccggctggcggcggccgcccgccacggcagcacagccggctcctggaacggcccgtcgctcagcgcccggacggcgctctcgtcaaggtactccagcgggaacaggcacacaccgccgaacccgaactcgcgcgccgaggcgacatgctccaccaatcgctggggggagcccctcagcttgtacgccggcaggccggagaacagactgccatactcctgcgggcgcagggccagcagctctgccgcggcgcgggtgcggaacgcttcttcgtccactacgtacatcatcggacacaggaagtccaccagtcctgcccgcagccaggccgcaccgtcccggaacacgtggaactgatcaacttcttgcgttccggccgccgccgacaccttggtgcccggtcgcttggcccggacggcgtcgctgagttccttcgccaactgagtcacctgttgccgccgccaggcantccactcacggtacccggggcggtcgcgacagtcctggagctgtgcgagggtcggccggctctgcggcgcaaacgcaatcgggtccatgcccgactccgccttgaatgcagccctgcacgccgcgcaatagcagaaccgggcatcgtcgggatagcgaatgtagtccaattgcaccccgtccacaccggcgtagaggcagtcggtcaccagttgcacgaagtactggcgaacctcaggatgcgtgggacagagccagtctgaggaggtcttccccgc

SEQ ID NO: 1143 - DNA, 4000 bp, Escherichia coli
  misc_feature (1300)..(1300): n is a, c, g, or t
  misc_feature (1998)..(1999): n is a, c, g, or t
  misc_feature (2006)..(2006): n is a, c, g, or t
  misc_feature (3104)..(3104): n is a, c, g, or t
  misc_feature (3145)..(3145): n is a, c, g, or t
  misc_feature (3147)..(3147): n is a, c, g, or t
  misc_feature (3151)..(3151): n is a, c, g, or t
  misc_feature (3153)..(3153): n is a, c, g, or t
  misc_feature (3155)..(3155): n is a, c, g, or t
  misc_feature (3157)..(3157): n is a, c, g, or t
  misc_feature (3169)..(3169): n is a, c, g, or t
  misc_feature (3171)..(3171): n is a, c, g, or t
  misc_feature (3173)..(3183): n is a, c, g, or t
  misc_feature (3185)..(3186): n is a, c, g, or t
  misc_feature (3188)..(3189): n is a, c, g, or t
  misc_feature (3192)..(3192): n is a, c, g, or t
  misc_feature (3194)..(3196): n is a, c, g, or t
  misc_feature (3198)..(3201): n is a, c, g, or t
  misc_feature (3203)..(3208): n is a, c, g, or t
  misc_feature (3210)..(3211): n is a, c, g, or t
  misc_feature (3213)..(3223): n is a, c, g, or t
  misc_feature (3225)..(3229): n is a, c, g, or t
  misc_feature (3231)..(3232): n is a, c, g, or t
  misc_feature (3234)..(3235): n is a, c, g, or t
  misc_feature (3237)..(3241): n is a, c, g, or t
  misc_feature (3244)..(3246): n is a, c, g, or t
  misc_feature (3249)..(3253): n is a, c, g, or t
  misc_feature (3256)..(3259): n is a, c, g, or t
  misc_feature (3261)..(3262): n is a, c, g, or t
  misc_feature (3264)..(3268): n is a, c, g, or t
  misc_feature (3270)..(3271): n is a, c, g, or t
  misc_feature (3276)..(3281): n is a, c, g, or t
  misc_feature (3286)..(3287): n is a, c, g, or t
  misc_feature (3289)..(3289): n is a, c, g, or t
  misc_feature (3295)..(3296): n is a, c, g, or t
  misc_feature (3300)..(3303): n is a, c, g, or t
  misc_feature (3305)..(3310): n is a, c, g, or t
  misc_feature (3312)..(3318): n is a, c, g, or t
  misc_feature (3320)..(3322): n is a, c, g, or t
  misc_feature (3325)..(3325): n is a, c, g, or t
  misc_feature (3327)..(3328): n is a, c, g, or t
  misc_feature (3330)..(3334): n is a, c, g, or t
  misc_feature (3336)..(3336): n is a, c, g, or t
  misc_feature (3338)..(3342): n is a, c, g, or t
  misc_feature (3345)..(3346): n is a, c, g, or t
  misc_feature (3350)..(3350): n is a, c, g, or t
  misc_feature (3352)..(3365): n is a, c, g, or t
  misc_feature (3368)..(3372): n is a, c, g, or t
  misc_feature (3374)..(3374): n is a, c, g, or t
  misc_feature (3377)..(3379): n is a, c, g, or t
  misc_feature (3383)..(3383): n is a, c, g, or t
  misc_feature (3385)..(3388): n is a, c, g, or t
  misc_feature (3391)..(3392): n is a, c, g, or t
  misc_feature (3394)..(3395): n is a, c, g, or t
  misc_feature (3399)..(3403): n is a, c, g, or t
  misc_feature (3405)..(3406): n is a, c, g, or t
  misc_feature (3409)..(3411): n is a, c, g, or t
  misc_feature (3414)..(3416): n is a, c, g, or t
  misc_feature (3419)..(3420): n is a, c, g, or t
  misc_feature (3423)..(3427): n is a, c, g, or t
  misc_feature (3430)..(3434): n is a, c, g, or t
  misc_feature (3436)..(3437): n is a, c, g, or t
  misc_feature (3439)..(3441): n is a, c, g, or t
  misc_feature (3443)..(3444): n is a, c, g, or t
  misc_feature (3446)..(3446): n is a, c, g, or t
  misc_feature (3449)..(3449): n is a, c, g, or t
  misc_feature (3451)..(3452): n is a, c, g, or t
  misc_feature (3454)..(3455): n is a, c, g, or t
  misc_feature (3457)..(3457): n is a, c, g, or t
  misc_feature (3459)..(3460): n is a, c, g, or t
  misc_feature (3462)..(3462): n is a, c, g, or t
  misc_feature (3467)..(3469): n is a, c, g, or t
  misc_feature (3471)..(3472): n is a, c, g, or t
  misc_feature (3475)..(3477): n is a, c, g, or t
  misc_feature (3479)..(3480): n is a, c, g, or t
  misc_feature (3483)..(3483): n is a, c, g, or t
  misc_feature (3486)..(3487): n is a, c, g, or t
  misc_feature (3490)..(3490): n is a, c, g, or t
  misc_feature (3492)..(3499): n is a, c, g, or t
  misc_feature (3501)..(3504): n is a, c, g, or t
  misc_feature (3507)..(3509): n is a, c, g, or t
  misc_feature (3511)..(3513): n is a, c, g, or t
  misc_feature (3515)..(3518): n is a, c, g, or t
  misc_feature (3522)..(3524): n is a, c, g, or t
  misc_feature (3530)..(3530): n is a, c, g, or t
  misc_feature (3533)..(3533): n is a, c, g, or t
  misc_feature (3535)..(3536): n is a, c, g, or t
  misc_feature (3539)..(3539): n is a, c, g, or t
  misc_feature (3542)..(3542): n is a, c, g, or t
  misc_feature (3544)..(3544): n is a, c, g, or t
  misc_feature (3546)..(3546): n is a, c, g, or t
  misc_feature (3551)..(3552): n is a, c, g, or t
  misc_feature (3555)..(3556): n is a, c, g, or t
  misc_feature (3559)..(3560): n is a, c, g, or t
  misc_feature (3568)..(3571): n is a, c, g, or t
  misc_feature (3574)..(3574): n is a, c, g, or t
  misc_feature (3576)..(3577): n is a, c, g, or t
  misc_feature (3579)..(3579): n is a, c, g, or t
  misc_feature (3581)..(3583): n is a, c, g, or t
  misc_feature (3585)..(3588): n is a, c, g, or t
  misc_feature (3591)..(3596): n is a, c, g, or t
  misc_feature (3599)..(3599): n is a, c, g, or t
  misc_feature (3601)..(3602): n is a, c, g, or t
  misc_feature (3606)..(3608): n is a, c, g, or t
  misc_feature (3611)..(3611): n is a, c, g, or t
  misc_feature (3614)..(3614): n is a, c, g, or t
  misc_feature (3619)..(3620): n is a, c, g, or t
  misc_feature (3622)..(3623): n is a, c, g, or t
  misc_feature (3626)..(3626): n is a, c, g, or t
  misc_feature (3628)..(3628): n is a, c, g, or t
  misc_feature (3630)..(3630): n is a, c, g, or t
  misc_feature (3635)..(3635): n is a, c, g, or t
  misc_feature (3639)..(3640): n is a, c, g, or t
  misc_feature (3643)..(3644): n is a, c, g, or t
  misc_feature (3648)..(3648): n is a, c, g, or t
  misc_feature (3652)..(3655): n is a, c, g, or t
  misc_feature (3657)..(3658): n is a, c, g, or t
  misc_feature (3661)..(3663): n is a, c, g, or t
  misc_feature (3668)..(3672): n is a, c, g, or t
  misc_feature (3675)..(3677): n is a, c, g, or t
  misc_feature (3680)..(3680): n is a, c, g, or t
  misc_feature (3683)..(3685): n is a, c, g, or t
  misc_feature (3690)..(3692): n is a, c, g, or t
  misc_feature (3697)..(3698): n is a, c, g, or t
  misc_feature (3700)..(3701): n is a, c, g, or t
  misc_feature (3703)..(3704): n is a, c, g, or t
  misc_feature (3710)..(3710): n is a, c, g, or t
  misc_feature (3712)..(3712): n is a, c, g, or t
  misc_feature (3714)..(3714): n is a, c, g, or t
  misc_feature (3719)..(3721): n is a, c, g, or t
  misc_feature (3723)..(3724): n is a, c, g, or t
  misc_feature (3726)..(3726): n is a, c, g, or t
  misc_feature (3728)..(3728): n is a, c, g, or t
  misc_feature (3731)..(3733): n is a, c, g, or t
  misc_feature (3738)..(3739): n is a, c, g, or t
  misc_feature (3741)..(3743): n is a, c, g, or t
  misc_feature (3745)..(3748): n is a, c, g, or t
  misc_feature (3753)..(3754): n is a, c, g, or t
  misc_feature (3756)..(3756): n is a, c, g, or t
  misc_feature (3758)..(3759): n is a, c, g, or t
  misc_feature (3763)..(3764): n is a, c, g, or t
  misc_feature (3767)..(3767): n is a, c, g, or t
  misc_feature (3782)..(3782): n is a, c, g, or t
  misc_feature (3784)..(3784): n is a, c, g, or t
  misc_feature (3787)..(3788): n is a, c, g, or t
  misc_feature (3815)..(3815): n is a, c, g, or t
  misc_feature (3826)..(3826): n is a, c, g, or t
  misc_feature (3831)..(3831): n is a, c, g, or t
  misc_feature (3847)..(3847): n is a, c, g, or t
  misc_feature (3863)..(3863): n is a, c, g, or t
  misc_feature (3866)..(3866): n is a, c, g, or t
  misc_feature (3871)..(3872): n is a, c, g, or t
  misc_feature (3880)..(3880): n is a, c, g, or t
  misc_feature (3907)..(3908): n is a, c, g, or t
  misc_feature (3911)..(3912): n is a, c, g, or t
  misc_feature (3915)..(3915): n is a, c, g, or t
  misc_feature (3921)..(3921): n is a, c, g, or t
  misc_feature (3924)..(3924): n is a, c, g, or t
  misc_feature (3929)..(3929): n is a, c, g, or t
  misc_feature (3931)..(3932): n is a, c, g, or t
  misc_feature (3935)..(3935): n is a, c, g, or t
  misc_feature (3943)..(3944): n is a, c, g, or t
  misc_feature (3948)..(3948): n is a, c, g, or t
  misc_feature (3981)..(3981): n is a, c, g, or t
  misc_feature (3983)..(3984): n is a, c, g, or t
  misc_feature (3986)..(3986): n is a, c, g, or t
tcctcaccaggaagaagagtggaagaagcctttcgtaccgatggcattggtgtgtttcattttcaacacgtggagagatcacttcgaggatgaaaaatatgtgttcgatcacgattccaaattcgcgtacgtgttgcaattatactgccattcgatggcgtttgaaaacccgggcgcgcgagacgtgtgtcgcaagcacatcgagttggcgtttaaatttcctctggttaaaaaattcgcgtttcaaacgagaactttcgcggacaactttttgcaatcgttcagcaattggtgcaagtcagtcgacgcgagcgatcttaatagttccagagaggaggagatggagaaacaaatctcattcatgatgcgcgtgctgtcaaacgtaccggaaggatcaaagaacgcggggcccgaaagaccgggattttcaccgattcgcgagactctgatactgtcgatgcgcagatatctggaatacttggcgaaagatttaggggatttgaacgaaggattgatcgagtgcatgagggttttcaaagaccaccctgagctgatcccggggtacggtgtcaaccaattacatccgaaacactggaaaaagttccaaatgctcttcgagcgtatcatcgagcgtttggagtgcgtcgcgagacttctaacgcgatgtcgcggaattctcgattcgagagatttcatgttcgaacctggactgatggaccagctcgccgaaatcatcgcgtacatcggcaagcacttccacttgaaacccggcagagaaggcacggaaaatccatttggagtatttgtcaaacatttggcctctgaacttgattttcaacaagatgttaacggagtattatgcgttgacccgggaaggtttctgaatccagtggttgagattctctgtcgaatgacggaaagtcctttacctgaggaagaagagagacatgattattacgatctctacagtggatgtgacttcttaaacgttcgcaacctttttacaagggtgcacggggaggatgaagtcgacggtccgatccgagatcacggagatgataggcaacatttcaaatgcaaagtccgaggtgaatttttggacgcgctcgtgagacacgtgacgagaaaagatgtccagaacctttcgttttacttcaatggcgaatctctcaatttcggagggcattccaatttatttaagggcgttttcttctatatgtcgccgtcttggtttatggataaagacgtgctctccgaaggtacaataaccgaagcaacggtgcatccagaagacgtcatnaaggacggagcacaacaaaaaggatattacataaaaatgcatctcaactctgtccgatgcgaaaatcgcatcctccacgcggcggctgtgaaagcgttgcacatgaaattgaacgatttagaagctttagatggcaacaaaaacatcctcccggaaatgctcgatccaatcacgcactccatcatgctcgacccagtttttgtgggcaaaacggagaagacatcttgcgacttctcgacgctttccaggcactttcaaaaatccggcaagcgaaccgatccgttcaccggtttgcccgtcgtcggcgagattcgcaggaacgcgaagctgaaagaacgcataaaaaaactcttacagaaggaaaacgcgatgtcgatgataggcgacgtggatgtggacgtttttacccccgacgatgcgatgtcggttgagtgggcacgggtgaatgaagatagaaatacattcaacgcagatgatgatgttcgctcgattggggattggcgcaaaaattggcgcttaggaaattacgagtagtctggtacttcgttgatgatctctgtgatgttgttgtgtttttgttgttgcaaaagaataatggtaagtagtttactgttgcttgcactcctccttcgctttcgggtccaatcctttgatcttctccccgttttcgtcttcgtcgtcgtcgtcttcttcgtcgnngtcgtcntcttcttcgtcggagtcaccgtcgatggattcgccgtactcggcgtcttcctcgccttcttcctcgtcctcgtcttcgtcgtcttccaagtgcaaacctaagaaatgatccaccgcgtttggaaccaacgcggtggcgatcaaactcccgatcgcgtaatcgttctccatttgctcttgcaaatcctcgacctcttcttcggtcatgttttcttgttcgtcctcgtccgggacttccggcgggtaaaaaaacgtaaagaaggattcgcacggttccgttttcgtgattggtttctggttcttcgccccaggtttcggtttcttcctcaacacttttacggtcaagttcttccctggtttccaatcgatgtcgtcgcacacgatgtaattcaacaccgcgtcttcgctgtcgtcttccatgtggtatcgcttctcgatcgtttggttggtaaaaaacgcattctctttgaagtaaaatcgcaaataaaacccaaccatttcgtcgccatcttcgtcttcgccttccaatttccccgtttgcacgtccaccaaagcgctcaaacacgcctcgtctctctccgaaatctcctcggccaaatcttcgatgttcttcatcgcgactaaccaaaaatccggcacgccgctcggactcgcgtcgtccttcggcaacgcctcgatttccttcttcaaatcctcgtcgcaatccgagtactctttctcacccgtgacgatttctttcctcgagttatataacggcgcgtataacttctcgtatttctcttccaattgccttcgctcctcggaatacttctcgaacaactcgtctcgttcggtttgtaagacttgcaaagagaataatctcgcacgaattttcgggtgcaattcctccacgtacccgctcgataaaccaaccaaaccgtccagtttcgcttgcaacgcgccgatcagacccccgtcgccgtggagttgcgataaagctttcacgatctcttgtttgtccaccgattcgcctccttctttcttgttcgctaagcgcatcttttccaacgctttttcgatttctttttgctgctgattttgctgctgctcttttgaaganccagaagacatttttcaaaaagcgttctctctctctctctntntctntntntntgtgtgtgtgtntntnnnnnnnnnnnannannaanannngnnnnannnnnngnnannnnnnnnnnntnnnnntnntnntnnnnntgnnntannnnngannnntnngnnnnntnntcttnnnnnnttttnnanaatttnnaaannnnannnnnntnnnnnnntnnnatntnngnnnnntnannnnnagnntgtntnnnnnnnnnnnnnntgnnnnntntannnttgngnnnncanntnntatnnnnnannatnnnatnnngtnnaannnnnctnnnnnanntnnnanncntangnntnntntnncntgtgnnnanncannngnnctntcnnatnannnnnnnnannnnaannntnnncnnnnacannncattcntangnnttntcntncntgtgnntanncanntgtttttnnnnatnannanannnannnnacnnnnnntcncnnacannncantcntacgnntnntcntncntgtgnatanncanntgtntttnnnnannatnnnagtgnnnnnaannnttntcnnncacannncattnntnngnnttttcntncntgtgnnnanncntntgnnntttcnnannntnnnntcgannananntctnntcncacacatcgcattcntncgnnctctctttcgtgtgaatacgcatgtgnctttggaaacnaccanattcacgaaaacgctnctcacacacatcgcanttntacgnnctctcgtncgtgtgaatacgcatatgtctcgccannttnnatngtgttncanacacntnntcncaaacatnncacncgtgttgccctctctttctcttccctcctttcntnntngtcgtcttgtcttt

SEQ ID NO: 1144 - DNA, 4000 bp, Escherichia coli
  misc_feature (1954)..(1954): n is a, c, g, or t
  misc_feature (1987)..(1987): n is a, c, g, or t
  misc_feature (3332)..(3332): n is a, c, g, or t
  misc_feature (3334)..(3334): n is a, c, g, or t
  misc_feature (3352)..(3352): n is a, c, g, or t
agtggtagtgatggtgcaaattcaataagtttgtcatttggaacgacgattacggtgtctgcgtgttctcttaatttcttaagtccaccatctgcatttgtacggcgagcttcaccttctgcactaaatggtgttgttacaatagcaacagttaatgcatttttgctagcaatttcagctacaactggggccgaacctgttcctgttccaccacccattcctgccgtaatgaaaaccatatcttggtctttaactatattttcaatttcttcttcatcttcacgagcagatttttctccttgttgaggaacacttccggcaccacggccaccacatgtatctttaccaattagaagttttgttgtggctttactactttgaaggtcctgagcatctgtattaagtgcaactaactctgcaccttcaataccttcatctgctatacggtttatcgtattacatccaccgccaccgcaaccaatgacactaacacgagtacgaagcgattttgcaattctatcaatttcttcatcagacattcctttgtcacctgatgattcttcacgtatttcattctctaattcttcatctacctccatattttgttcatctgattcttcatcttgttcgattgcatcttctacaattgattccatgtttgtcttattttgtttacatagtaattatacttacgcctttttcggtagtttggattgaaaatatatacatgattatgtatattttgaatatttttggaaaaatctcttatatttttaagaaaaaatccaaaggtttaagtacataactctattactaagatattgaacacaaaacatgtttgacatagcacaaaatttacttgttcgagatgtcgatatgagggtctttggagtacttatggtggcgattctagtcaatgaaattggcagcgcgtacgagattattggaatcatggctgtaggtattacatgggctttcttgaccacaccagattcaaaagaaattattaattctgctgctctaaaattcgaagagaaaatgacacccctcaaagaatctgagaaatggaatctttacggacggcctctcacatatctttcatttgtgcttttcatcatgtttcttgctcttgcgtaaattcttgcgatttttcttgtaatttataacgtcgtcatctaaattttcgtataaaatttagtactatcttatagttataatcataaaactattttaataaatatatctctgtgtaaattttagaataaaaaatcaaatgaaccaaaattaaaaattttctatattagattaaatacgaaaatttgatgatatcacaatttcgtcatagatacgttacttgtttctgttacaggattttttgaaatttcatatgatacatctgcattttcaatcatatcatttttgtgactcacaacaattacttgaggtacatcccaactttttattgtatcaataacaccctgtagattcgaaacgtgatttgtatctaagaatgttgttggttcatcaagtataaatggtggtaatttatcagcattaccatttctttcaacaagtaatctatatacaccagcacgaattgctagactaacaattgtttcttcaccaccagataactcttgaggtttgattttaaccccatcccccgtaattagatttatcgaataattttcatcaatatctaatcgctggtatacctgactatggtacacagatttgaatacttcatttgcatacttgtttaataacccaatattttcttgacgaagttgtgtctttacgtttttgtacgtggcgattacactctcagattcaacctctttatttgccgcatcaacttttttctcttcaagttcacgacatctatcttctatggatttaatctgttttaatatctgttttatctcagctaattcatctcgtatatcatctaatntattctccttttttgtcttaagattatctaatntatctagtttatccttatgttcattaatctctttctcaagtttttgtttatccttatgttcattaatctctttctcaagttcgttctttttttgttcagcatctaaccgttggtttcgtgtctctttctttaatgctttgttctgttcaatttttgaacgtaggttattaatttcttgattaagttcatctacagacgagaacatatcttttatatcttttaactcatcaacatctgatttgtattcatctaatttatcttgtttattcttaattttattgttaacgcggtcttttttagtattatttttaactattccatctttttcttcttggatagatagttttgtttcttcgatatctgttttaatctgagagagttgattctgtttatcttccaaacgctgttcaatttgacttaccgtatcttcaatccgttttcgttcggaattcaaatcaataattgaatcaatatattgattagctgaatcgaataagtcttgttgcttactcatagcatctgatttttctttcatatcatttcgttcagatgtaatttcatctaagtgttcttttatatcttcacttactatattatgttctgtatcacaaattgtacatacatttgaatcaactaattcttgatacattttccattctgattgtgtttcaccaacagatatgtatacatcttttgaacgttctaatagattttcacgaccttcagggatatgggtatcacggagttcttttgcgcttgcatttttaggtaggtcaatattatcacaaatatcatctaatttttcttcgtaattttcaatatctgtatttatttcttctagtttttcttcagattcttgcttttcattctgtatatctttaattaagttttctaatgactgtttttcggatattttatttgatttctgtttttcaagtgtttcaattgattccttgtgttgattaatcgtattttcaatagtttttaattctcctgtttggagtgaagatatttctgtattcagagaattatatttttctctaacagattctagtttattttgtataatatcttcatcagcatcaatatctaattcatcacacttttcttcaatagaattaagtaaagcatcacgttctatagatattgcgtctttttcttgttcagcattcttttgtttctgctgccaatcttcttgtttttgttttaactcattatattctgaccgggcttcagataatttattagatagcttttcatatgattctaattcatcttctatgttgcttttttctttttcttttttactgatactatcttcaactttttctttatcttgaatttntnttttcttttttgatttcnattctgataaattagattctaacgtagacttatcatcatacgaattcaattgtcgctctttttcttcaagaaggtcaccaaactttcttacttgagaacctatctctcttcttgcttcatgcattctttcaatataatcatctaacttacttaatccaagtaatccatcgatgatttcttttcgtttttcatcatttgcatcaaccatgcgcgtgatatcgccttgttgaacgtaaacactatttacaaatgattctggacccaaaccaattatctcttgtacggctgaatctacagctttaacaccttcaacaggttcatttattgaatcgcctgttaatgtgcatgaggtagttgaaccacgacgttcaccatcttctttctcactaacagaaatgacccaatcaacagtgtaattatcatcacccacactaaatgtaagtgaaatttttccagaattctctgtcctacgaacaagtgaatctagtgtaaggtctgtatcaatatagtcaagaacattactaagatataatccgccaaatatactaccgagtaatgaacttttaccagaaccgttatccccatgtatgagcatgagtccatcatcaaagtctactgtctctttaccatagcttctaatattttcga

SEQ ID NO: 1145 - DNA, 4000 bp, Escherichia coli
  misc_feature (771)..(771): n is a, c, g, or t
  misc_feature (1940)..(1940): n is a, c, g, or t
  misc_feature (1991)..(1991): n is a, c, g, or t
gggcggtggcggccatcgcttcgccgccggcttcagttccgacgacaccgtcgacacggtcgtggggcggatcgagcacaagcttccgattgcgcgctgaccggccgttcatggccacgcacggcgtgatcgtcgtcgacaagcccgccggctggacgtcgcacgacgtcgtggcgaagatccgcaagatctatcgccagaggcgggtcgggcacgccgggacgctcgatcccgacgcgaccggggtgctcctcgtcgggctgggacgcgcgacgcggctgttgcgtttcctccaggacaccggcaagggataccgcgccacaatcgtgttcggcgtgtcgaccacgaccctcgacgcgtcgggggaggtcgtcgaccggcgaccgatgccgatcgaccaggcggacatcgaggcggtcgtgccggcgttcctcggtgagatcgagcaactcccgccgatggtgtcggcggtgaaggtcggcggacggcgactccacgagctggcgcggcgaggcgaggaggtcgagcgcgcaccccgccgcgtccacgtcgaccgcatcgatgtcgaagccttcgagcccggtccgtacccggctgccactgtcctggtcgagtgcagcagcggcacgtacgtgcggtcgttggccgcggacatcggcgggcgcctcggaggtgtcgcgcacctcggtgagctccgccgcttgcatatcggctcgttcacgctcgacgaggcccgtactctcgccgacatcgaagcggaccccgacaagnccgtgctgccacccgtcgcggccatgcgcgacctcgagcaggtcagtatcgacgccgagcaggcccgcgcagtcgcgcacggtgtcacgttcccggccgcggtgttcgccggcgcgaacgccgggcccggtccgttcgcggtcgtcgggcccgacggcgagctgctcgccgtgtacgagcgccgccgcgccgcggtgaaaccggcggtggtcctcgcgccggtcgaggcgacctgaccggtgcgcatcgtcaccggcagcgacgaggcggccctcgccacggtgcagaccgacggcgcagtcgtcacgatcggcgcgtacgacggcgtgcacctcggccaccaggccgtgttgcgcctcgtgcgcgagctcgcggacgcccgggggttcgaggcggggctggtcaccttcgaccgccaccccgcggaggtggtccgccctgagtccgcgccacgcctgctgacgacgctcgagcagcggctcgagctcctcgacgcgacgggcgacctcgatctgtgctgggtgctcaccttcgatgaggcgcgcagcaaggaaccggcggaggacttcgtgcgcgaggtgctcgtcgacgggatcggggctcgattggtcgtcgtgggagccgatttccacttcggccaccgccgcgggggcaacgtgccgttgctcgagcgcatgggcgcagagctcggtttcgaggtgctcggcctcggcctggtcgccgtcgagggagacgcgacagcggtgccgtactcgtcgaccaggatccgcgagctcctgggcaaaggcgacgtcgccgaagcggcgcgcctcctgggccggccgcacgaagtcaggggagtcgtggagcgaggcgaccagcgcggcgccgagcatctcggcatgccgaccgccaacctcaccgtccccgaacgcatctgcctgcccgccgacggcgtgtacgcggggaccttcgtcaccgaggacgaggtcgagcgtcccgcggcgatctcggtcgggacccgtccgaccttctacgaggacggcgacgtcctggtcgaggcgtacgtgctcgacttcgacggcgacctctacgggcagcgggtgaaggtgcgtttccgggagtgggtccgtggccaagagcggttcgactccaccgaggcgctcgtcgagcagatgaacgccgacgtngaagcgacccgccgcatcctggccgtctgaagcgccgtggtaacctgagantgcgtcggcaatgtgctggcgcgctcccacatcagcacgaagaccgaagctgctgcatgcccgacaccacggccacgatcgccgagcaccgcctccacgagaccgacaccggctcgccggaggtgcaggtggcgctgctcaccgagcggatcaaccacctcacggagcacttgaaggtccacgcaaaggaccatcactcgcgccggggactgctcgtgctcgtcggccgccggcgccggttgctcgactacctccggcgtaacgacgtcgagcggtaccgagcgctcatcgcgaagctcggcctccgccgctagcgcgggacacgaaggacgaagaagacgagcaagggcagtcggttgtcagtcgccaccgcccgggcccgacccggaccgtgaccactgagaaccggatgccctctccaatagcgcatcaggagagaggttccatgcctgccacacaggcggatggcgcgattcgcgtcgagggcgtcgtcaacgacgccggcaaggccatgtcgttcgagacggggcgtctggccgccatggccgacggcgccgccgtcgtcaagatcggcgacaccaccgtgctcaccacggtcgtcaccgacaagccgcgggaaggaatcgacttcttcccgctgacggtggacgtcgaagagcgcatgtacgccgcgggcaagatcccggggtcgttcttccgccgggagggacgtcccggagagcaggcgatcctcacctgccggctcacggaccggcccctacggccgtcgttccccgaggggttccgcaacgaggtgcaggtcatctcgacgatcctcggcgccgacctcgagaacccgcacgacatcgcgtcgatcaacggcgcgtcggcggcgttgacggtctcgggcatcccgttcaacggcccgatcggcgccgtgcggttggctcaccaccacggcgagtggatcgcgcacccgacgtaccaggagggtgacgagtcgacgttcgagctcgtcgtcgccggcaggcggaccgatgccggcgagatcgcgatcatgatggtcgaggccggcggcaccgaagcgaccagcgagctgtacgagcacggcgcgccgaagatcaccgaagagctcatcgccgacggcctcgaggcgtcgaagcgctggatcggcgcgtcgatcgacctgcagctcgagctgcgcaaggccttcgaggaagcgcgcggcccgatcgagacgatctcgtacgaggtccacagggactacgacgacgacgtctacgcggcggtcgaggaggccgcccgcggcgacgtcgaagaggcgatgaagatcgccgacaagacggctcgcgaggagcgcacgcacgaactcgaggcccaggtggtcgagaagctcgcgggcacgcccgagtcgcccgggaagttcgtcgatcgcgccggtcagatcaaaaaggcgttccggtcgctgcagaaggacgtcgtgcgcaagcgcatcgtcaacgagggcgcgcgcatcgacgggcgcggcccttccgacattcgtccgctctcggccgaggtcggcgtgatctccaccgcgcacggctccgggttgttccaacggggcgagacgcaggtgctgagcgtcgcgacgctcgccatgccccgcatggagcagatgctcgacaccatcggcgtcgacgagcgtaagcgctacatgcaccactacaacttcccgccgttctcgacgggagaggtcggacgggtcggatcgccgaagcggcgtgagatcggtcacggtgcgctcgccgagcgggcgctcatccccgttctgccgagccaggagcagtggccatacacgatgcgggtcgtctccgacgtcctgtcgtcgaacggctcgacgtcgatggcatccgtctgcgggtcgacgctgtcgctgatggacgccggcgtgccgatcaagggctccgtcgccggcatcgccatgggcctcgtgtacgcggacggcaagtacacgactctgaccgacatcctcggcgccgaggacgcgt

SEQ ID NO: 1146 - DNA, 4000 bp, Escherichia coli
  misc_feature (871)..(871): n is a, c, g, or t
  misc_feature (895)..(895): n is a, c, g, or t
  misc_feature (925)..(925): n is a, c, g, or t
  misc_feature (1635)..(1635): n is a, c, g, or t
  misc_feature (2259)..(2259): n is a, c, g, or t
  misc_feature (2905)..(2905): n is a, c, g, or t
  misc_feature (3265)..(3265): n is a, c, g, or t
tgattttgatatcaattttagtttctaaagattgtttttcaaaattattattcaaagattggtaaacaggattattctttacaccgcaggacgttgttaaaaataatattgataatactaataaaattctaatcatttaaactctttttgatatttttttatcattttattaacattaaacggtgatgttccgccataagatttttttgaattcaccgaattctttagatcaaacatttttagaacatctctttctacgcttttttcaactttttttatcgttaaaaaatctaactcatcaagtgtttgattatttttttcagcaatatttacaagagttgcagattttttatgagcatctctaaaagacattccttttttaactaaataatcagcaaagtctgttgcggtagtaaaacctaattttgcagcggcaagcattttagctttatttggcttcatcccttctaccaattcggcagcaagctgaatatttaataaaagagtatcgtatgagtcaaatacactttctttatcttcttgcatgtctttaaagtaggcaaggggtaagcctttcatagtagtcaacatcgaagacagttgtccaaatattcttccagttttgcctctaattaattctgcagaatctggattctttttttgaggcatgattgaagatcccgttaacaaactgtcttcaagagtgattaaatttacaagatctgaattccaaataataatttcttcagctagtcttgaaagatgcattgagcacaaagaggctataaataagaattcaatagcaaaatctctatcagaaactgaatcaatagagttgtcagtaggttttttaaatccaagtttttttgangtaaaatttctatcaatattatangaagtcccagcaagagctgcagatcctaangggttttcattaatattttctaagaaatttttaattctttttttatctcttttgaacatttctacatacgccaataaataatgagaaaacagcaccggctgtgcatttttaaggtgcgtaaatccaggcatgattacatcaatattttttttagctttatttaaaaaacttttgatgagtagagttaaatttttatcaataatgtttgtagatttttttacccaaagtttaaaatctgttaccacctgatcatttcttgatcttgctgtatgaagaaatccagcgtgatctcctataatttcaaataatcttttttcgatatttaggtgaatatcttcatgctcttttttaaattcaaatttattattttgtatttctattttaatcttttttaatccaaaaatgatttttttagcagtttcacttttaataattttctgttttgatagcatttcacaatgagcaatagatgcatcaatatcttcattgaatagtcttttatctatatcaatcgaagaattaattgattgtaaaagtttagatgtaggttttttaactcttgtaccccacactttatttttattttctttagtcatatttttaataatatataaaactaaactatgttttttttacgtaattcttttaaatatttagtttatttaactagtttattattatttattactaatcactctttatcacaaccnattaaagatcttcccttcaagaacatagttgtgcatgaggttccaaaagaaattattggtgaagaatttctagatttctctggtaaaaaattaaaatttaataaatttgatcatcaaataaatctaattaatttttggtctacctggtgtgtgccttgcaaagaagaaatgccttcaattgataaattagttgatgttatgggcaaagataaagtaaaaatatttgcaattgatcttgaaaaaataaataagaaaaaaactgataaattttttactgatttaaaaattaagaatttttctacttattatgatccagactacgttttggctaacaaaattggattaagaggcctgccaacaactttaattgtgaaccgcaatgggaaagaaatagcaagagttataggatctatcgattttgctgatgaaaaatttattagttggttaaggaatctttaaatctattttttatgaaaataaaatagagtcattaaaataactatagcgacaaattgagcaacaactcttaactgcattagcttgtttccttttcttttgtcatcaatattgctgccaaggaaaaatgattttaatccacgtataagaattacggtaacaacaatnaatgcaactattgcaataatacgacttaaatctgacattaagaaataattatcataaaataatataaattatataaaataaaatattaatgaaattaattgaagaaaatatatttttaaaggcaacttctttgccacaaactgctaccaaggcaaattatttaacagtgttttgtcatggatatggtgcggatggaaaagatttaattaatattggaaattattggcaaagatttttgccagatttttattttacctcacctaatgcaccaaatatttgctcagtaaacccaggaggatttgaatggtttgatctaatgagtcatgacgttaaaaaaattaatttagaactgcaaaactcaatattaaaattaacagattttattaatgcgaaactcaaagaattaaatttagactattcaaagttgtttttagtaggctttagtcaaggaacgatgatgtcattacattatgcgctaacaaattctaataaagttgcaggagtagttggttattcaggaaagatttatgatcccgttcttttagagcagaatattaaatctaaaccaccgatttttttaatgcacggagatgatgacagtgttgttccgttagaagaaatgatggaggcaaaaaattttttactncaaaataaatttaatttaaaaactaaaatttttaaaggttgtggccattctattccagtcgaaggattaagtttaggtctagaatttattaacatcaataaaaaataaatgtttttgattacaaataaaattgatatattaattatatattaaatgattattacagaatctaattcagtccctttggataagtgtccagctcttgtattgaacgccgactatagacctttgagttattaccctttatccttatggtgttggcaagatgttgtccgtgatgtttttttagatagagtgacaatagtttcagaatatgatcgggaaattagaagtccttctttttctatgagattaccaagngtaatatcattaaagaaatacataaaaccttcggagtttcctaattttacaagatttaatgtttttttaagagatagattttcttgtcagtattgtggggataataaaaatttaacttttgatcatgtaattccaagatctagaggggggattacttgttgggagaatgtggtgtctgcttgttgtacatgtaacgtaagaaaaggcggcaaacttccccaagtcagtgggatgattccaaaaacaaaaccatctcgaccaacagtggaagagttacatgataatggaaaattttttccaccaaattttttacatcagagctggttagattatttatattgggacgttaagcttgaaagctaatatttttttgaaatagctatagctaatttagaagtattttttattacgatgtctaaaatagaatataaaccatcattgttagcgcctaaactttcagcagtatttttatgctcaagctcctcttctctaaatttaataaatttttcttttagttctttttcttctttataatctttagataaaatatctatctgctccccataatgaccaccaataacctcttcaacagctgacgtacataaagctgtagcttttttcccaagtaatgccgtaccaaaaccaagagctgtaccaagtacatcccacaaaggaagtaaagctgtaggtctaactttcctttcaataatttgattttcaaaaaactttaaatgt

SEQ ID NO: 1147 - DNA, 4000 bp, Escherichia coli
  misc_feature (1483)..(1483): n is a, c, g, or t
  misc_feature (1503)..(1503): n is a, c, g, or t
  misc_feature (1509)..(1509): n is a, c, g, or t
  misc_feature (1986)..(1986): n is a, c, g, or t
tttatttgattttgatgaaaataataaaaaagaatatttttataaattaaatgaacgctttttattctaagttatattaaagtttatccaattatattttttttgatggatttttattcaatcaaaaaactcttaatactttttttttaaaaaaaagaaaaattattaaaattattatttatttattattgatattaaatatgtaattatttatttaatattaaatatatatttacttagttagttagttatttatttagttatttatttatttatttattatatattatatataatatattataaaaattttttatttaaaaattagaaatttaaaattttcaatttttttaaaattttaaccctttaaaattttataaaaatattaaaaatatttatattttatttgaaatttgaaatttgaaattaaaataaaattaagaaaagaaatgagtgacagtacaaaaaatttatcaaaagctaaattaaagaaaaaggcttccagacttcaaaaaaaagaaaaaagtaaattacaactaaaaaaagaagaaaataaacatcttcttgaacatatatatcatcttggaaaacaaacatgtgtatcccaagccatattaaatattattaaaacggcatgtttagagcatatttcaaacgattcgttcgaaactatattacaaaaaattaaaactcacttttataatagagaatatgatgctatatttagtgaaccaaaataccttccaatatataccactgcctatgccccatctagagcattagcttattatgaattatttacttcacatactgaacttaagaatatattagctactcccaacgcttatatttattgcatgggttctggggctggaagtgaagttgtcggtttaacttgtgctaatttagcttcttctaccgatgaaagtcagggtttagaaattcattgtcaagattatgctgactataatgaagttcaagcaagtttagtaaaaactatgcaaaaacaatggaatattcaggagagtagaattaaatattcaacttcagttgctgatgtattaaaaaatgataaaatagatggtatgaccgttgacgaacatatttcaaaagcaactcttgtcacagcaatgtttcttatgaacgaattatttacaatgtcaaaaaaggaaacagttcagctcattactagattagtaaaaaatttaccaaaaggttcctactttttattagtggattccgctggttctttctcaaatttagatgttaataatagtgaaggaaatactaaaaaaacaattatgatttatcaacttatcgatatgattaaaagttttgatatattaattaaagatgatgcagtatggtacagattaccaaatgaaaaagttcaaccccttcattatccaacaaaattaaataatatgagatatttcttaagattataccaaaaattataattttctataaaaaaaaaaatcanaaaaaaaaatcataaaaaanaataanaataaataaattactccatgagaaaaaaaataaaaaaaaaaaaacaattaagaaatatttaataatattacaattacatatttataaattttttttataaaatattgaattgatataccaagtaaaaagatatgaatgttttttttttatttaatttttaaaattataccaatgcaattaataaataataaaaatattatttttaaaacaaaacaaaaaaaatttttttttttaatatttataaataaaattatttctaaattatttttaaaagtcactttcttaagaaattattaaaaaataaaaataaaaataaatgataaataaataatgacaaataaataatgataaataaataaatgactaattaattaattaattaattaatagttatgtatttttaataaaatacaaaaatatataaatataaatatttatatttatatatatatatttatatttatatattgttaaaanaaatataaaaaaaaaaaaaaaaataagataataatttaattatttatagaatttgttaaaaatatatccatatttttatattttatttttagtttttaatcgagaagcctcggtaggtttggtataggatggtgctgatttaattataccttttgatctaacttttttcttgggttttaatgttgtttttttcattgtatttcgaactaattttaaattaataataaaattaaaataataataataataataataatatataaatatgaattattttaataataatatatgaatataaattattataataataaaattttaatattttttttaaaatatatattatatatattatgtatcgttttttattaatatatatatattacctttatgttttaatggatcaagagttttcgatctttgagaaattctttttttcaaattctctatcatattttgtatatttttcatttcttcatcttcttgtaatgtatttataacatattcttcatcattttcgtttaaaatttcattttcactttcttgttcttcctcattacattcttgattatggtcattgaaattttcttcctcatatcggatttcaatatattcttcattttcatgcttttttgaattaatataataaagatcttcttcttcttcttcttcttcttcaccttctggaatgtaagatatcggaataaaatctttcatatctacgatttctttattttttttattttctatatcaggttttgatttcttttcatttatatttaatttcttttcagtatgatttatattattattactactgctttttctatctttttcaatttcatgattacttctactttttgaaagaatacctgaactatttcttttaatcttaagattatgattaacattacttcttcctatactattggaaattgaagcattactcacttttttagcgttagatttggaattagattctaatgacattttgttattattaaaatgagtatcttttggatttaaatttttccatttatattcggtggttacatgatgcttcaccccatctttgatattagttttttcattctctttgttttcttcattattattatttttattattattatggtttttatgaatacttttactactaatcttattgttattactatcatttttattattgtttatattattattattaatattattaatattattatttaaaattttgttattatttatattattaataataatattattattatcatctatatcattattagaattatttgttttattattattagtagtagtaatatcaatattattaatattatcaaaattattattattattattattattattattattattattattattgatattattaatattattaatattattattattattatatgccaaatagttattagcatatagatctcttaaactactagttttatttttgctatttttatatgttataatagacgaatttatattatcataataataattatttgaaatattaatgttgtttttattttcattaatattattattgttaatatcattattattatcatcattattattattattattattattttcattattataattaatattgctatttatattttctgaattcatattgtcattgttattattacaatatatattcaattcagggttaagtttattaatttcttttgaaagggttagattattattatctaattttttatgattgggtataaataatgtatctttttgacgagtaaacttatcattttgtttactgtttgatgtattttttgaatctttttccattaaattatttgattctatattatgaagtatttcatttaatatattttctttatattcttttaatttcggatttaatatttcgttaaatttactttctgttatataattagaattgctaaaagtattgttgatagaaacagcaatttttcgtatcatt

SEQ ID NO: 1148 - DNA, 4000 bp, Escherichia coli
  misc_feature (116)..(116): n is a, c, g, or t
  misc_feature (499)..(499): n is a, c, g, or t
  misc_feature (789)..(789): n is a, c, g, or t
  misc_feature (1163)..(1163): n is a, c, g, or t
  misc_feature (1568)..(1568): n is a, c, g, or t
  misc_feature (2529)..(2529): n is a, c, g, or t
  misc_feature (2838)..(2838): n is a, c, g, or t
  misc_feature (2862)..(2862): n is a, c, g, or t
  misc_feature (3516)..(3516): n is a, c, g, or t
  misc_feature (3564)..(3564): n is a, c, g, or t
  misc_feature (3933)..(3933): n is a, c, g, or t
cagcgcacggtgtgaccctgacggctgcgaatacggtggtatggtgggggccaaccagttcactagaaacgtacgcacaggctaacgctcgggtacacagatcaggtcaagaccanaagtgtaccgtggttcagttgcaaggatcgtccatagaaaaacgtgtttatgcaatgctggacaataaaatcaatatccatacaaaaatgattgatttatacaatgatatacttgcgtaggacagccaagtatattatattcaacagttcggcaagttaaggagatgtaaatgggcagcgaaacggctatacctttagacaagttggtcaagacctatataaaaatacgggatcgacggtctgaattgaaggcggaattcgacaaagaggacagcattcttgtagaacaattggacgcggtgaagggcgctctgttggaacactgcaaagaacatgacgttagcagcgtcaagacttcagaaggtctattctatcggacggtnaaacaaacgtattggactagcgactgggatcaaatgcacaagtttattcttgagcacggagaacctgcactgttggacaagcgcctaaaccagaagaacatgagagaatttcttgagtcgaatcctgacttgttgccgaaaggtcttaactcaaactccacatacactatatccgttagaaggaagtaaccatgacacccgcattagtttcaattagagaagtcgctcaacactttatggtatctgaacgcttgatccgtaactggatgaagcaagggcgtataccgaanaatacttacatccatatagggcagacctacaggtacgacttgaatgccgtatcgcaagcactacttagtgacttgaacgaagatgcacctgacacaacatgggatgaagtaagtccagaagatgatcgggtcgaagtccctgacttggatacagacgaagattattaatggaaactaacgttaaaagaattggtattaaggacaagaagtttggtggtatacccaccgagggtctagattctatcgagtgcatcatcattggcgttgcttatacgtctaggatgtattataaaaatgagtacgaccccgataaaatagttgcaccgacttgttggtctaacgataccgaataccctgctttagacgtaccaganacccaacggcagtctggacgttgcttagattgtgttcaaaatattagaggttctgggaaaggctctgggcgcgcatgtcgttttgtgcagcgtttggcagtcgttttaaaggatgatctggaaacagtttatcagttacaactacccccgacttctatatttggggacgcggtaaaaggggaaatgcccctacgtgcttatgcacggtaccttgaggcgcgtgagacgcctttcatcgctgtcatatcgaagatttatttcgacgaaggtagcgatacaccaaaactcttcttcagaccgatacgtccgttagaagagcaggagctagagactgtcaaagagatgcaggatcacgaagatactattaacgcaatgactaaaattgttgcgccggtagaagatcgnagtgtttccccattcgatgaggttgacggttttaaattaaatgactaaatgtttggagaaacatatatgaactaccttataaaaggtgttgaagtactatacccacgtatcaataagacctaccgttttgataatacggagaacagaagtgtgccgtgtgacccattcgacgacggtgcttcttactcgatgcagtttaagatggacgataaacaggctaaagaattgatgggcgctatggcggctgcatacgctgagaagcgtgaggctaaatggcctgagaagatccccatgcctttcaagaagactgatgacggtatgtttattggtaaagccacgttgaaaggggcgtacggtaaagatgctaccagcaagcctaagcaatatgacgcagggaacaaggagttagatgaagattttgccttgactaccggcagtgttggtaacattgcggtcgttcttttcccatacaacatgcgagaagcaggggtatcactacggttacgagcagtgcaagtcaccaagtacgtaccgctacaagcgtcatccccgtttgatgcagtggaaggcttcaccgttggcggagaggtaagtccttttgcagacgttacccagtctgccccggtgacagccgacgaagttgatgtagtagaagttgatgtagaagatgtcgaagaacctgtaaaagagccgaagaaagtggcgaaggtgaagtcggcagcaccgaaagaagcggcagatttgagtgcacttgttgatggatgggacgactagtcctaattactttgggtatcttcgagaagaagcccattcctaaaacaatacccacggctagactagtcgaagagggcgtaataatgcccctgccgtggtgtcgctcggatctacgcttatggatacaacaacatttttaaaggaggttctatcgagcagtgggctatattgtatttttgcgtccaanagttccaaagataaaagaagccaacagttttatggttccatagaccaattagtcagtgccgccaaagacctagatgataacgactacgatgtttattttgctttagctacgttcaacgaaggtaagtcgcgtaaagtcgataacgtaaaacatcttaagtccttcttcctagatcttgattgcggcccatccaaagaattcgcttctcagcaagaagccatgcaagcactaaagcagttttgtaagacttattcgttaccacgtcccaccatcattaactctggtaggggtgtgcatgtgtactggccnctcaaagaggcagtgtgcctagangactggctacctgtagcagaacgcctcaaggctctttgcgcccgaagtaatttccctgccgaccctgcggttacatcggatgctgcacgggtcttgcgtgtaccccaaacacacaactacaagcctgacactcctgtagcagtgggctttatagggccaacggtttcggcgttagttgacttcgacaagttctcagacctcgttggtggagacttgataccagttcctaacaaaagaatagaagcccctagtgcgacgatgctcgctgcgctgggaaaccaagagtataagttcaagcacatcttacagaaatcaaacgaaggcgcagggtgcgtccagatctataacgccctaaagaaccagaacggcgtctcagaacctatatggcgtgggatgctatcgattcttaaagcgtgcagtgatggtagtcgggagaaggcacacaagatatccagtgggtacgaaggttataaccccgaagaaacggatgctaagtgggataacttgacggctgataaacggtacacctgtaacaagtttgaggaagagaaccctgaagcatgtttggcttgccctaatcggggtaagttacgtagcccattgcacgttgggaagacgctacgagaagctaccgaagaagataacgtagtacangtccctgccttagacctacccaatgcacctgttaacacgtacgtaatnccgaaatacccgttcccatacgtgcgtggtgcaagtggtggtgtgtacgtacgcaacaagaacgcagacggggacatagaagagaagcagatttaccacaacgatgtctatgtggtgcagcgcatagtagatgtggaaataggggaagcggtggtaatgcgcttgcacctaccgaaagacggtgttagggagtttacagtacccctgacagcggtaacgtcaaaagaggagtttcgcaaacagatgtcaatgcggggtgttgcaatacccaacatagatgacttgatgcggtacgtaacagtatggattaacgaactacaggcaaccgaaatggcagataaagcacatagacagtttggatggacagangatacagcatccacttttattctgggcaaccagaaaatacgtaaagacacgattgaattcaacccac

SEQ ID NO: 1149 - DNA, 4000 bp, Escherichia coli
  misc_feature (1077)..(1077): n is a, c, g, or t
  misc_feature (1976)..(1976): n is a, c, g, or t
  misc_feature (1980)..(1980): n is a, c, g, or t
  misc_feature (1989)..(1989): n is a, c, g, or t
  misc_feature (2877)..(2877): n is a, c, g, or t
  misc_feature (2895)..(2895): n is a, c, g, or t
  misc_feature (2898)..(2898): n is a, c, g, or t
  misc_feature (2900)..(2901): n is a, c, g, or t
  misc_feature (2904)..(2906): n is a, c, g, or t
  misc_feature (2951)..(2951): n is a, c, g, or t
  misc_feature (3143)..(3144): n is a, c, g, or t
  misc_feature (3146)..(3147): n is a, c, g, or t
  misc_feature (3149)..(3152): n is a, c, g, or t
  misc_feature (3154)..(3154): n is a, c, g, or t
  misc_feature (3157)..(3158): n is a, c, g, or t
  misc_feature (3161)..(3162): n is a, c, g, or t
  misc_feature (3166)..(3167): n is a, c, g, or t
  misc_feature (3169)..(3171): n is a, c, g, or t
  misc_feature (3173)..(3177): n is a, c, g, or t
  misc_feature (3181)..(3181): n is a, c, g, or t
  misc_feature (3183)..(3183): n is a, c, g, or t
  misc_feature (3185)..(3188): n is a, c, g, or t
  misc_feature (3190)..(3191): n is a, c, g, or t
  misc_feature (3193)..(3200): n is a, c, g, or t
  misc_feature (3202)..(3202): n is a, c, g, or t
  misc_feature (3205)..(3205): n is a, c, g, or t
  misc_feature (3207)..(3217): n is a, c, g, or t
  misc_feature (3219)..(3219): n is a, c, g, or t
  misc_feature (3221)..(3225): n is a, c, g, or t
  misc_feature (3227)..(3229): n is a, c, g, or t
  misc_feature (3231)..(3233): n is a, c, g, or t
  misc_feature (3235)..(3238): n is a, c, g, or t
  misc_feature (3240)..(3245): n is a, c, g, or t
  misc_feature (3247)..(3256): n is a, c, g, or t
  misc_feature (3258)..(3258): n is a, c, g, or t
  misc_feature (3260)..(3265): n is a, c, g, or t
  misc_feature (3267)..(3275): n is a, c, g, or t
  misc_feature (3278)..(3283): n is a, c, g, or t
  misc_feature (3285)..(3289): n is a, c, g, or t
  misc_feature (3291)..(3297): n is a, c, g, or t
  misc_feature (3299)..(3300): n is a, c, g, or t
  misc_feature (3304)..(3304): n is a, c, g, or t
  misc_feature (3308)..(3308): n is a, c, g, or t
  misc_feature (3310)..(3311): n is a, c, g, or t
  misc_feature (3315)..(3316): n is a, c, g, or t
  misc_feature (3318)..(3324): n is a, c, g, or t
  misc_feature (3326)..(3326): n is a, c, g, or t
  misc_feature (3328)..(3336): n is a, c, g, or t
  misc_feature (3338)..(3341): n is a, c, g, or t
  misc_feature (3343)..(3344): n is a, c, g, or t
  misc_feature (3346)..(3346): n is a, c, g, or t
  misc_feature (3348)..(3348): n is a, c, g, or t
  misc_feature (3350)..(3352): n is a, c, g, or t
  misc_feature (3354)..(3354): n is a, c, g, or t
  misc_feature (3356)..(3356): n is a, c, g, or t
  misc_feature (3358)..(3359): n is a, c, g, or t
  misc_feature (3363)..(3368): n is a, c, g, or t
  misc_feature (3371)..(3378): n is a, c, g, or t
  misc_feature (3380)..(3380): n is a, c, g, or t
  misc_feature (3382)..(3383): n is a, c, g, or t
  misc_feature (3386)..(3386): n is a, c, g, or t
  misc_feature (3389)..(3389): n is a, c, g, or t
  misc_feature (3392)..(3393): n is a, c, g, or t
  misc_feature (3395)..(3395): n is a, c, g, or t
  misc_feature (3397)..(3407): n is a, c, g, or t
  misc_feature (3409)..(3411): n is a, c, g, or t
  misc_feature (3413)..(3413): n is a, c, g, or t
  misc_feature (3418)..(3424): n is a, c, g, or t
  misc_feature (3429)..(3432): n is a, c, g, or t
  misc_feature (3435)..(3435): n is a, c, g, or t
  misc_feature (3438)..(3438): n is a, c, g, or t
  misc_feature (3442)..(3451): n is a, c, g, or t
  misc_feature (3453)..(3454): n is a, c, g, or t
  misc_feature (3456)..(3462): n is a, c, g, or t
  misc_feature (3464)..(3464): n is a, c, g, or t
  misc_feature (3466)..(3470): n is a, c, g, or t
  misc_feature (3472)..(3477): n is a, c, g, or t
  misc_feature (3479)..(3484): n is a, c, g, or t
  misc_feature (3488)..(3489): n is a, c, g, or t
  misc_feature (3491)..(3497): n is a, c, g, or t
  misc_feature (3499)..(3505): n is a, c, g, or t
  misc_feature (3508)..(3510): n is a, c, g, or t
  misc_feature (3512)..(3512): n is a, c, g, or t
  misc_feature (3514)..(3514): n is a, c, g, or t
  misc_feature (3519)..(3523): n is a, c, g, or t
  misc_feature (3526)..(3528): n is a, c, g, or t
  misc_feature (3530)..(3535): n is a, c, g, or t
  misc_feature (3539)..(3546): n is a, c, g, or t
  misc_feature (3548)..(3549): n is a, c, g, or t
  misc_feature (3551)..(3552): n is a, c, g, or t
  misc_feature (3554)..(3554): n is a, c, g, or t
  misc_feature (3557)..(3557): n is a, c, g, or t
  misc_feature (3559)..(3559): n is a, c, g, or t
  misc_feature (3562)..(3564): n is a, c, g, or t
  misc_feature (3567)..(3570): n is a, c, g, or t
  misc_feature (3572)..(3573): n is a, c, g, or t
  misc_feature (3578)..(3582): n is a, c, g, or t
  misc_feature (3584)..(3584): n is a, c, g, or t
  misc_feature (3586)..(3593): n is a, c, g, or t
  misc_feature (3595)..(3596): n is a, c, g, or t
  misc_feature (3598)..(3599): n is a, c, g, or t
  misc_feature (3601)..(3607): n is a, c, g, or t
  misc_feature (3609)..(3609): n is a, c, g, or t
  misc_feature (3611)..(3613): n is a, c, g, or t
  misc_feature (3615)..(3623): n is a, c, g, or t
  misc_feature (3625)..(3635): n is a, c, g, or t
  misc_feature (3638)..(3638): n is a, c, g, or t
  misc_feature (3642)..(3642): n is a, c, g, or t
  misc_feature (3644)..(3644): n is a, c, g, or t
  misc_feature (3646)..(3647): n is a, c, g, or t
  misc_feature (3649)..(3655): n is a, c, g, or t
  misc_feature (3657)..(3672): n is a, c, g, or t
  misc_feature (3675)..(3681): n is a, c, g, or t
  misc_feature (3683)..(3684): n is a, c, g, or t
  misc_feature (3687)..(3688): n is a, c, g, or t
  misc_feature (3691)..(3692): n is a, c, g, or t
  misc_feature (3694)..(3695): n is a, c, g, or t
  misc_feature (3698)..(3698): n is a, c, g, or t
  misc_feature (3703)..(3703): n is a, c, g, or t
  misc_feature (3706)..(3706): n is a, c, g, or t
  misc_feature (3710)..(3710): n is a, c, g, or t
  misc_feature (3714)..(3714): n is a, c, g, or t
  misc_feature (3717)..(3718): n is a, c, g, or t
  misc_feature (3722)..(3724): n is a, c, g, or t
  misc_feature (3726)..(3727): n is a, c, g, or t
  misc_feature (3729)..(3730): n is a, c, g, or t
  misc_feature (3732)..(3732): n is a, c, g, or t
  misc_feature (3734)..(3735): n is a, c, g, or t
  misc_feature (3737)..(3742): n is a, c, g, or t
  misc_feature (3744)..(3745): n is a, c, g, or t
  misc_feature (3748)..(3752): n is a, c, g, or t
  misc_feature (3754)..(3756): n is a, c, g, or t
  misc_feature (3758)..(3760): n is a, c, g, or t
  misc_feature (3765)..(3767): n is a, c, g, or t
  misc_feature (3769)..(3775): n is a, c, g, or t
  misc_feature (3777)..(3781): n is a, c, g, or t
  misc_feature (3783)..(3783): n is a, c, g, or t
  misc_feature (3786)..(3789): n is a, c, g, or t
  misc_feature (3791)..(3794): n is a, c, g, or t
  misc_feature (3797)..(3797): n is a, c, g, or t
  misc_feature (3799)..(3801): n is a, c, g, or t
  misc_feature (3803)..(3804): n is a, c, g, or t
  misc_feature (3806)..(3814): n is a, c, g, or t
  misc_feature (3816)..(3816): n is a, c, g, or t
  misc_feature (3818)..(3819): n is a, c, g, or t
  misc_feature (3821)..(3821): n is a, c, g, or t
  misc_feature (3823)..(3826): n is a, c, g, or t
  misc_feature (3829)..(3832): n is a, c, g, or t
  misc_feature (3835)..(3839): n is a, c, g, or t
  misc_feature (3842)..(3842): n is a, c, g, or t
  misc_feature (3844)..(3846): n is a, c, g, or t
  misc_feature (3848)..(3851): n is a, c, g, or t
  misc_feature (3853)..(3854): n is a, c, g, or t
  misc_feature (3856)..(3860): n is a, c, g, or t
  misc_feature (3862)..(3863): n is a, c, g, or t
  misc_feature (3865)..(3865): n is a, c, g, or t
  misc_feature (3867)..(3869): n is a, c, g, or t
  misc_feature (3871)..(3873): n is a, c, g, or t
  misc_feature (3875)..(3878): n is a, c, g, or t
  misc_feature (3880)..(3887): n is a, c, g, or t
  misc_feature (3889)..(3896): n is a, c, g, or t
  misc_feature (3898)..(3900): n is a, c, g, or t
  misc_feature (3902)..(3908): n is a, c, g, or t
  misc_feature (3910)..(3914): n is a, c, g, or t
  misc_feature (3917)..(3918): n is a, c, g, or t
  misc_feature (3920)..(3923): n is a, c, g, or t
  misc_feature (3925)..(3926): n is a, c, g, or t
  misc_feature (3928)..(3928): n is a, c, g, or t
  misc_feature (3931)..(3935): n is a, c, g, or t
  misc_feature (3937)..(3939): n is a, c, g, or t
  misc_feature (3941)..(3943): n is a, c, g, or t
  misc_feature (3945)..(3947): n is a, c, g, or t
  misc_feature (3949)..(3953): n is a, c, g, or t
  misc_feature (3955)..(3956): n is a, c, g, or t
  misc_feature (3958)..(3960): n is a, c, g, or t
  misc_feature (3963)..(3965): n is a, c, g, or t
  misc_feature (3968)..(3972): n is a, c, g, or t
  misc_feature (3974)..(3977): n is a, c, g, or t
  misc_feature (3980)..(3983): n is a, c, g, or t
  misc_feature (3985)..(3989): n is a, c, g, or t
  misc_feature (3991)..(3995): n is a, c, g, or t
  misc_feature (3997)..(3997): n is a, c, g, or t
  misc_feature (3999)..(3999): n is a, c, g, or t
tcctccgcgggcacggccgcggctgccccgccgcccgtgtcggtcaccccgggcaccaaagtcctggtcgcggcgacgtactcgatgtcctccccgggggtggtatccttgagcaccacgaaaccgcgtttgagatccgccgccgccgggacgaacctgctgccctcgtcgaaccgcacgtacctctcctgcgcgggcgtgaccctggcggggttggacagttcctccttggtgggctccggcttcttcttctccttctcgtcctcctcctcatccttagcatcgccgtcgacgtccatcccatccgcctcgccctccttcttctcgccgtccacgtccatgccgtccgtatccttgccctcctccctagccttcttggccgccttggccttggccttggcggtggtggagaggacagccttgacgagcttacccttgtccttcttgtcgtcgaggttgatcgccgccgggtaggcgaatagggacggcttgcagtgcgacgtcaccgagcacatgggcatcttgagctgggagtcgaggccgatgaacgcggtgggaacaaaggtgagggagatgaagtaggagagcgggtaccagtaccagtactgcgtgaacaccagcatggagagcacggcggtcatgcgggggtagcccgacttggccctcagcccgatggtcacgttcctgccgccggcgtcgatgatgccctgcgccatgatggcgcccatcttggtcatcgtcacctcgcgctcatcctggatgtggaccatcagcctcttgcggaagggcgcgagggactgctcggactgctcgaccatcaccatggccatggcgatgagcgcaccctgctgcacaaagtcaaccgcgtcggtgagcatgggctcgaggagcgccacagcctccttcatgccggtgcccgagcacgagatgcccaccgccatcgccgcaccgtagcgcacgtgggggttgtaagactccgcgaggagcttcacgaccctcgggcactggctcggggtggagcacagcacgaaacccagggacatcaccgcggctcttcgaacgtcgtccgacacgtcngacacggcgacgtgcagtagtcggcggatgcccgcgttgttacccgtggccacgtaggcggatgcggtggcgaggcaggcgccgtagcggatgatggggtcgctgtcacggaccatctgctcgatgagtggctcagcctcctcctcgcggccgtaggtggtgagcgccaggccgacggagcacccgcggatgatcttttcgtgctgcgtcttgtggcagtagttgagaatctgctgctgcttgtccacggcgccagagcccgcgaggacaaggcccatgccgacgccggcaccctcgcccgcgacggcaccgtccgtgcggaggatgcggaacatgtcggtgaacacctcctcgttgcccgtgccgagcgcggccaggccgaggccgaggcaggcgccgtgctggatcacctcgttgttgctggacctcgacgactccagcaaaaagggcaggataccctcgccgtggttggcgtggatcagaccgagcgcgtacaacgccccgccctcggtgtaggggctcgggcgcgcacccccggcgccgccctcgcgtggaaggaacggtcccatcagcgtgcggccctcgttgagctggccgcggtgaatgacgcccatgcccgccgtcgccgagaacctcgcccagttcgtcgccctgctgagccagtcgaggttctccctgaggaaggtgtccacggtggtacccgcgtgcatcagcgcgttggacagcacggtcgcggagtggcacacggagttcctggactcaaccgcggctcgcatctgcttgagcaagaggagatccgccgcgttgtgcgagtacagaaactcgaggtgaaggttcacggggagctcgccggagagcaccgagcggagcagcgcgatgggcttcttcttctcctcggngctntccttcttntcctcggtgtcgtccttcttctcctcggtgccgtcctgcatgtcggcgtcgccgtcctccaccttgggggtatctcccggggtatcctccggcgcgagcttggacgcgacttcggagagaaacttctgaatctcattttcgcagagggagaaggcgatctggtacgccaggagctgatcgtcctcctcgccctcgacgagccgggtgaggatcgccgcgacgccgtccgcgtcgtccaggaacatgaggcactggcacacgttcaggtagttgttctccacgtggtcgctctcgtacatgcgcaccagcaccgtgagcacctcgcggcggaactcgcgggaggtgacgagggtctggcacaccttggtggcgtagttgagcgcctccgccacgtcggtgctcgtgtggatggcctcctcgagcttgtccagccgcttggtctcgagcgcgacgccgatggcctgatggatctggccgtcgtcgaagcaccgctggaacatccgctcgacgatggacacgagccgcgcgtcgatcgcctgctcgctcgtgggcttctgcctttgctcgatgtactcgtcgatcgccttggctgttgggagaaatgggatcgggggaggggcgcgagggtcagatcggttgttcacttttttcttcccaaaactcgcacgggaaaaggcggtcaagggatgaacaacgggtaggttggatctgggggcgggggacgcgcgcgtaccgagcagggtcttgacgaaatcgttggactcggtgacgtcgaacatgccaccggcgcagagcgcgtagttgagcgcatcgttgagctcgccgaggtggtagaagacctgtcgaggggtgggaggggcgggtcaggtttcgttttagatctggctnggtgtgggcacacggtanccntnnaannntcgcggtggacggggcgcgacgtgtcgacggcgtgggaggtgganggcgcaccttggaggccaaaagtgccgcgagctcgcgctgggcgaagaactcgtcctcgtacatcgcctcgatgaccgagatggatcccgccacctcggcccagtgcgtgtcgatgaccttgttcagcgatcgcagcgcggtggtctggagctgcacctcggtctcctcgagcatcgagatgaggccagccnngnngnnnngnccnnggnngggnncnnngnnnnngggncngnnnncnncnnnnnnnnanccntnnnnnnnnnnncnannnnntnnntnnncnnnncnnnnnncnnnnnnnnnntncnnnnnngnnnnnnnnnccnnnnnngnnnnncnnnnnnntnncccntttncnntttnnannnnnnngncnnnnnnnnncnnnncnntngncnnnantngnngggnnnnnnggnnnnnnnnancnnccnttnaannangnnnnnnnnnnncnnnanggggnnnnnnnggggnnnnggnttncccnnnnnnnnnngnngnnnnnnnangnnnnnannnnnncnnnnnncccnncnnnnnnncnnnnnnnccnnncngncccgnnnnnccnnncnnnnnnaaannnnnnnnanntnntnccnanccnnnccnnnncnnccccnnnnntncnnnnnnnngnncnngnnnnnnncntnnngnnnnnnnnncnnnnnnnnnnnaancccnangnngnnnnnnngnnnnnnnnnnnnnnnnaannnnnnncnnccnnccnncnnccnacccnccncccncccnccnncccnnncnntnngnanngnnnnnncnnccnnnnnannnannnccccnnnannnnnnncnnnnntnccnnnncnnnnccnannntnncnnnnnnnnncnannancnnnnggnnnnggnnnnnccngnnntnnnngnngnnnnngnngncnnngnnntnnnngnnnnnnnncnnnnnnnncnnntnnnnnnncnnnnnttnngnnnngnngnttnnnnngnnntnnngnnngnnnnngnngnnnttnnnggnnnnngnnnnggnnnngnnnnngnnnnntngnt

SEQ ID NO: 1150 - DNA, 4000 bp, Escherichia coli
  misc_feature (3)..(3): n is a, c, g, or t
  misc_feature (5)..(8): n is a, c, g, or t
  misc_feature (10)..(13): n is a, c, g, or t
  misc_feature (15)..(16): n is a, c, g, or t
  misc_feature (19)..(20): n is a, c, g, or t
  misc_feature (22)..(27): n is a, c, g, or t
  misc_feature (29)..(41): n is a, c, g, or t
  misc_feature (43)..(50): n is a, c, g, or t
  misc_feature (52)..(52): n is a, c, g, or t
  misc_feature (54)..(58): n is a, c, g, or t
  misc_feature (60)..(75): n is a, c, g, or t
  misc_feature (78)..(87): n is a, c, g, or t
  misc_feature (91)..(92): n is a, c, g, or t
  misc_feature (94)..(97): n is a, c, g, or t
  misc_feature (100)..(100): n is a, c, g, or t
  misc_feature (102)..(105): n is a, c, g, or t
  misc_feature (107)..(107): n is a, c, g, or t
  misc_feature (109)..(111): n is a, c, g, or t
  misc_feature (113)..(113): n is a, c, g, or t
  misc_feature (115)..(119): n is a, c, g, or t
  misc_feature (121)..(124): n is a, c, g, or t
  misc_feature (126)..(127): n is a, c, g, or t
  misc_feature (130)..(132): n is a, c, g, or t
  misc_feature (134)..(134): n is a, c, g, or t
  misc_feature (137)..(139): n is a, c, g, or t
  misc_feature (141)..(147): n is a, c, g, or t
  misc_feature (149)..(152): n is a, c, g, or t
  misc_feature (156)..(156): n is a, c, g, or t
  misc_feature (158)..(161): n is a, c, g, or t
  misc_feature (163)..(171): n is a, c, g, or t
  misc_feature (174)..(175): n is a, c, g, or t
  misc_feature (177)..(180): n is a, c, g, or t
  misc_feature (182)..(184): n is a, c, g, or t
  misc_feature (188)..(189): n is a, c, g, or t
  misc_feature (192)..(198): n is a, c, g, or t
  misc_feature (200)..(201): n is a, c, g, or t
  misc_feature (203)..(207): n is a, c, g, or t
  misc_feature (209)..(210): n is a, c, g, or t
  misc_feature (212)..(214): n is a, c, g, or t
  misc_feature (216)..(219): n is a, c, g, or t
  misc_feature (224)..(225): n is a, c, g, or t
  misc_feature (227)..(235): n is a, c, g, or t
  misc_feature (237)..(244): n is a, c, g, or t
  misc_feature (248)..(264): n is a, c, g, or t
  misc_feature (266)..(266): n is a, c, g, or t
  misc_feature (268)..(273): n is a, c, g, or t
  misc_feature (276)..(278): n is a, c, g, or t
  misc_feature (281)..(281): n is a, c, g, or t
  misc_feature (283)..(286): n is a, c, g, or t
  misc_feature (289)..(289): n is a, c, g, or t
  misc_feature (291)..(299): n is a, c, g, or t
  misc_feature (301)..(301): n is a, c, g, or t
  misc_feature (303)..(309): n is a, c, g, or t
  misc_feature (311)..(311): n is a, c, g, or t
  misc_feature (313)..(319): n is a, c, g, or t
  misc_feature (321)..(322): n is a, c, g, or t
  misc_feature (325)..(327): n is a, c, g, or t
  misc_feature (329)..(329): n is a, c, g, or t
  misc_feature (331)..(331): n is a, c, g, or t
  misc_feature (338)..(338): n is a, c, g, or t
  misc_feature (341)..(342): n is a, c, g, or t
  misc_feature (344)..(344): n is a, c, g, or t
  misc_feature (347)..(347): n is a, c, g, or t
  misc_feature (349)..(350): n is a, c, g, or t
  misc_feature (353)..(353): n is a, c, g, or t
  misc_feature (355)..(355): n is a, c, g, or t
  misc_feature (359)..(359): n is a, c, g, or t
  misc_feature (362)..(362): n is a, c, g, or t
  misc_feature (365)..(365): n is a, c, g, or t
  misc_feature (1989)..(1989): n is a, c, g, or t
ganannnncnnnngnnganncnnnnnngnnnnnnnnnnnnntnnnnnnnnanannnnnannnnnnnnnnnnnnnnggnnnnnnnnnngggnnannnnagngnnnnanannncncnnnnnannnngnngtnnncnccnnnannnnnnncnnnngcgngnnnngnnnnnnnnntgnnannnngnnntttnngannnnnnntnngnnnnnanngnnnannnngcgcnnannnnnnnnnannnnnnnncccnnnnnnnnnnnnnnnnncncnnnnnnaannntanannnnttntnnnnnnnnntntnnnnnnnanannnnnnnannttnnngntntttgtcnaanngntgngnnagngntttnggngcngcgaggcgccaggcggcttcgagggcgcggcgcagcgtaggccttctggctcctttcagtcgcacgttcgtgcagcctcgacgtccccaagctcccccgcaagggttgaacaccttgggctgggctttgacgaacgtttcctgctccaccggcgtgagcttgaccatgccccagccattctcggggtagccaagagtggcaaaaatctttccggtcacgcgaaaatccggatggttcatgtgggcgcgctcctcggtttcggggaagctcaaggccagcctgcgaaagtctttaggggtcatggggcagcctccgtttcgagaagtatcggaccacaaaagcagcgggagaaaaaagatcttgacaggggcctgaaaagactgtatattcggtaacaacagaaacaacggacgcaacgaaagcgatggcaacgacgccagccacggatagaaaaaatgagtgaacccgcaaaaaacacgctagccccggtggcccagaagttcattttgcattggggagagatgggcacgaggtggggcatcaaccgcaccgtcgcgcaagtgcatgcgctgctgtttttgtcgccgcatccgctgcccgccgacgagatttccgagacgttggcagtggcgcggtcgaatgtgagcaccagcctgcgcgagttgcaggggtggagaattgtgcgcgtggtgcacgtgctgggagaccggcgcgaccatttcgagtcgatcaaggacgtttgggaaattttccggattgtttcggaagaacgcaagcggcgcgagatcgatccaacgctgaatgtgctggcggaatgtgtgcgcgagatcaagtccagtccgcagagtgatgcgtatacgcgcgagcggctggaaagcatgctggaatttttaacagcgatgacggggctgttcgaggagatcattcgtatgccgacgggcgcgttgaagggcgttgtgaaactacgcggcaaggtgattacgctgctcgggagtgaaaagaagaaggcggcgggttgaaagttaaaagctccgagagaaaaaggaaacggataacgcggagacgcagaggacgcggagattcgcagagaagagccgagcgcgataaggaaccgcaggtggatcatgatttcgctggtgagtgaatacacggacgggaagggacggcacgcacgaggttggctgttttttgatgcggagtgcaagttctgcacgcgcatcgcgcgatggctggccccgattctggagaagcgcgggatggcgctggcgccgctgcaggatccgcgcgtgggagcgctgctgggattggcacgcgaggacttaatgcgcgaaatgcaatttcttctgagtgacggaagccgcttcggcggagcggatgcggcggtggcgctggcgcgcgagatttggtggggccggccattggtatggatctcgaaaattcccgggatgatggaaattctgcgcaaaggataccactgggttgcggcgagccggagttgcgcggctgtctcttgtccggcgaatgagccctcgccccgagtctagacctggcaaggagggattctgccaatgactcctacaacagtttttctgtgcgatgtgggaattgcggcgttcttgctgcnggaatcgttatttacatcaagaagtatctgagaaccttgctcatcgaactctgcggcacaaccgaacgcgcgaacttttggttggcattctccaatgtcacgcttgttctcgtcccgttgatcttcgctctcgactacaagcccgagttcgggccagacaagaccgcgatcttcgagatcgccactcaactgaagtacgcactaattgggttcgtcgtcacgctgggctcccttgcgcttatccttttccgatttattccacgtgataagggcaatctcgcaagcggcctgcagcggtgaaggtgaacagcgcatcgatcggaacgtaaggaggtcttgtgacgtttcgttttgccgatttgtggcgatgggacggaaaagtcggccgcgcggaatacgcggcggttggtctcattggtgtggcgatcaaacacaacctcgaccggctgatcgcgttggcgtttttcgcgaacaacctaaattttctaaattactgggcgcctctgggaaaggcggcgcggctcgatcacctctcgaatcgcgaagcgaaatttctcgccacgctgctgctgttctccgttcctttcttatgggtgggcgtggcgatgaccgtgaagcggttgcgcgatgcgggacagccggtgtggctggtggtgctctttttctttccagtcatcaatgtgttgttcttcctggcgctttgcgcgttgccgccgcgcgagcgcgccgaggagtccgaaggcgcaccatggcccggaccgaccggactgagcggaatgattccgagcagtccgctcggtagcgcggtgctttcgatttttctcacgtccgtcctggggctggtgtttctgacgctggggacgttggtgatcggggcgtacggctgggggctgttcgtcgctttgccattttgtttgggaatgttttccgtgctgctttacagctaccattcgccgcgagactggtggacatgcctgaacgtcgcgctgctgccggtcggaatcttgggtgtcacactgattctggtggctatggagggcgtgatctgcgtgttgatggccgcgccgtttgcgctgggactagcggcgctgggcgggatgctgggctacacgattcaggcgcaccactggcgcccgaagcagacgccggcgatgttgtcgatcgtgattttgctgattccagcgtcgtttggaatcgagcacgccgcggcgctgcagccgccgacgtctgaggtgcggacggcgatcgaggtgaacgcgccgccggagaaagtttggaatcaggtcgtggcgttcgcagagataccgccgccgaaagaattgctgtttcgcgcggggattgcgtatccaattcgcgcggagatttccgggcatggagtcggcgcggtgcggcattgcgttttttcgaccgggccatttgtcgagccgatcgaagtgtgggacgagccgcggctgctgaagtttggcgtgacggcgaatccggctccactggatgagttgacgccgtacggtcatatcgatccgctgcacttgcatggctacttcgtttccgagaaggggcagtttttgctgacggcgttgcccgggggccgaacgcgggtcgaaggcacgacgtggtatcagcacacgatgtggccggcggcgtactggcatttgtggtcggattacatcattcatcggattcatctgcgcgtgctggagcacattcgcgaaggggtcgaagaaaagcctcgcgcctcccaaccgggccgggatcaattccggcctgagctatagcctcgggaattcctatcgcgtggagagcgcgtcacgcagggcgaagaaagcgggtttgggattgagatcggcgtcgaagggtaacgggcgctgggggaggccctctttgcggggacggaagccttggagccaagtatcccggtcggaaaggcaccaggttaggacggctttcacagattcatggcgaagaatgttttcgagatagcttcggtagacttctgcgaccaggcggtcgc

SEQ ID NO: 1151 - DNA, 4000 bp, Escherichia coli
  misc_feature (18)..(18): n is a, c, g, or t
  misc_feature (25)..(25): n is a, c, g, or t
  misc_feature (185)..(185): n is a, c, g, or t
  misc_feature (196)..(196): n is a, c, g, or t
  misc_feature (262)..(262): n is a, c, g, or t
  misc_feature (565)..(565): n is a, c, g, or t
  misc_feature (567)..(567): n is a, c, g, or t
  misc_feature (1200)..(1200): n is a, c, g, or t
  misc_feature (1240)..(1241): n is a, c, g, or t
  misc_feature (1250)..(1250): n is a, c, g, or t
  misc_feature (1295)..(1295): n is a, c, g, or t
  misc_feature (1319)..(1319): n is a, c, g, or t
  misc_feature (1346)..(1346): n is a, c, g, or t
  misc_feature (1972)..(1972): n is a, c, g, or t
  misc_feature (1987)..(1987): n is a, c, g, or t
  misc_feature (1992)..(1992): n is a, c, g, or t
  misc_feature (2051)..(2051): n is a, c, g, or t
  misc_feature (2073)..(2073): n is a, c, g, or t
  misc_feature (2123)..(2123): n is a, c, g, or t
  misc_feature (2170)..(2170): n is a, c, g, or t
  misc_feature (2270)..(2270): n is a, c, g, or t
  misc_feature (2573)..(2573): n is a, c, g, or t
  misc_feature (2771)..(2771): n is a, c, g, or t
  misc_feature (2798)..(2799): n is a, c, g, or t
  misc_feature (2803)..(2803): n is a, c, g, or t
  misc_feature (2806)..(2806): n is a, c, g, or t
  misc_feature (2817)..(2817): n is a, c, g, or t
  misc_feature (2858)..(2858): n is a, c, g, or t
  misc_feature (2864)..(2864): n is a, c, g, or t
  misc_feature (2984)..(2984): n is a, c, g, or t
  misc_feature (3124)..(3124): n is a, c, g, or t
  misc_feature (3151)..(3151): n is a, c, g, or t
  misc_feature (3218)..(3218): n is a, c, g, or t
  misc_feature (3388)..(3388): n is a, c, g, or t
  misc_feature (3390)..(3390): n is a, c, g, or t
  misc_feature (3393)..(3396): n is a, c, g, or t
  misc_feature (3398)..(3399): n is a, c, g, or t
  misc_feature (3401)..(3402): n is a, c, g, or t
  misc_feature (3405)..(3408): n is a, c, g, or t
  misc_feature (3411)..(3411): n is a, c, g, or t
  misc_feature (3413)..(3413): n is a, c, g, or t
  misc_feature (3417)..(3418): n is a, c, g, or t
  misc_feature (3420)..(3423): n is a, c, g, or t
  misc_feature (3426)..(3434): n is a, c, g, or t
  misc_feature (3436)..(3438): n is a, c, g, or t
  misc_feature (3440)..(3440): n is a, c, g, or t
  misc_feature (3442)..(3445): n is a, c, g, or t
  misc_feature (3447)..(3452): n is a, c, g, or t
  misc_feature (3457)..(3459): n is a, c, g, or t
  misc_feature (3461)..(3464): n is a, c, g, or t
  misc_feature (3467)..(3468): n is a, c, g, or t
  misc_feature (3473)..(3473): n is a, c, g, or t
  misc_feature (3475)..(3475): n is a, c, g, or t
  misc_feature (3480)..(3484): n is a, c, g, or t
  misc_feature (3487)..(3487): n is a, c, g, or t
  misc_feature (3489)..(3490): n is a, c, g, or t
  misc_feature (3492)..(3492): n is a, c, g, or t
  misc_feature (3495)..(3500): n is a, c, g, or t
  misc_feature (3503)..(3503): n is a, c, g, or t
  misc_feature (3505)..(3512): n is a, c, g, or t
  misc_feature (3514)..(3520): n is a, c, g, or t
  misc_feature (3522)..(3522): n is a, c, g, or t
  misc_feature (3524)..(3529): n is a, c, g, or t
  misc_feature (3532)..(3532): n is a, c, g, or t
  misc_feature (3534)..(3541): n is a, c, g, or t
  misc_feature (3547)..(3547): n is a, c, g, or t
  misc_feature (3549)..(3552): n is a, c, g, or t
  misc_feature (3554)..(3554): n is a, c, g, or t
  misc_feature (3556)..(3562): n is a, c, g, or t
  misc_feature (3564)..(3567): n is a, c, g, or t
  misc_feature (3569)..(3575): n is a, c, g, or t
  misc_feature (3578)..(3580): n is a, c, g, or t
  misc_feature (3582)..(3583): n is a, c, g, or t
  misc_feature (3585)..(3585): n is a, c, g, or t
  misc_feature (3587)..(3589): n is a, c, g, or t
  misc_feature (3591)..(3596): n is a, c, g, or t
  misc_feature (3599)..(3599): n is a, c, g, or t
  misc_feature (3601)..(3602): n is a, c, g, or t
  misc_feature (3604)..(3604): n is a, c, g, or t
  misc_feature (3606)..(3610): n is a, c, g, or t
  misc_feature (3612)..(3615): n is a, c, g, or t
  misc_feature (3617)..(3622): n is a, c, g, or t
  misc_feature (3624)..(3626): n is a, c, g, or t
  misc_feature (3630)..(3631): n is a, c, g, or t
  misc_feature (3633)..(3638): n is a, c, g, or t
  misc_feature (3640)..(3640): n is a, c, g, or t
  misc_feature (3642)..(3643): n is a, c, g, or t
  misc_feature (3645)..(3645): n is a, c, g, or t
  misc_feature (3648)..(3649): n is a, c, g, or t
  misc_feature (3651)..(3651): n is a, c, g, or t
  misc_feature (3653)..(3653): n is a, c, g, or t
  misc_feature (3659)..(3661): n is a, c, g, or t
  misc_feature (3663)..(3663): n is a, c, g, or t
  misc_feature (3665)..(3672): n is a, c, g, or t
  misc_feature (3675)..(3676): n is a, c, g, or t
  misc_feature (3678)..(3680): n is a, c, g, or t
  misc_feature (3682)..(3682): n is a, c, g, or t
  misc_feature (3686)..(3687): n is a, c, g, or t
  misc_feature (3691)..(3693): n is a, c, g, or t
  misc_feature (3695)..(3695): n is a, c, g, or t
  misc_feature (3697)..(3697): n is a, c, g, or t
  misc_feature (3699)..(3700): n is a, c, g, or t
  misc_feature (3702)..(3707): n is a, c, g, or t
  misc_feature (3709)..(3709): n is a, c, g, or t
  misc_feature (3711)..(3715): n is a, c, g, or t
  misc_feature (3717)..(3717): n is a, c, g, or t
  misc_feature (3719)..(3720): n is a, c, g, or t
  misc_feature (3722)..(3724): n is a, c, g, or t
  misc_feature (3726)..(3726): n is a, c, g, or t
  misc_feature (3728)..(3736): n is a, c, g, or t
  misc_feature (3738)..(3738): n is a, c, g, or t
  misc_feature (3741)..(3741): n is a, c, g, or t
  misc_feature (3743)..(3745): n is a, c, g, or t
  misc_feature (3747)..(3748): n is a, c, g, or t
  misc_feature (3750)..(3754): n is a, c, g, or t
  misc_feature (3757)..(3764): n is a, c, g, or t
  misc_feature (3768)..(3772): n is a, c, g, or t
  misc_feature (3774)..(3776): n is a, c, g, or t
  misc_feature (3778)..(3780): n is a, c, g, or t
  misc_feature (3782)..(3790): n is a, c, g, or t
  misc_feature (3793)..(3802): n is a, c, g, or t
  misc_feature (3804)..(3808): n is a, c, g, or t
  misc_feature (3810)..(3810): n is a, c, g, or t
  misc_feature (3814)..(3817): n is a, c, g, or t
  misc_feature (3819)..(3822): n is a, c, g, or t
  misc_feature (3824)..(3826): n is a, c, g, or t
  misc_feature (3828)..(3836): n is a, c, g, or t
  misc_feature (3838)..(3848): n is a, c, g, or t
  misc_feature (3850)..(3852): n is a, c, g, or t
  misc_feature (3854)..(3857): n is a, c, g, or t
  misc_feature (3859)..(3861): n is a, c, g, or t
  misc_feature (3863)..(3865): n is a, c, g, or t
  misc_feature (3867)..(3869): n is a, c, g, or t
  misc_feature (3873)..(3874): n is a, c, g, or t
  misc_feature (3876)..(3876): n is a, c, g, or t
  misc_feature (3878)..(3881): n is a, c, g, or t
  misc_feature (3883)..(3883): n is a, c, g, or t
  misc_feature (3885)..(3885): n is a, c, g, or t
  misc_feature (3887)..(3891): n is a, c, g, or t
  misc_feature (3893)..(3895): n is a, c, g, or t
  misc_feature (3899)..(3900): n is a, c, g, or t
  misc_feature (3902)..(3903): n is a, c, g, or t
  misc_feature (3905)..(3905): n is a, c, g, or t
  misc_feature (3907)..(3908): n is a, c, g, or t
  misc_feature (3911)..(3916): n is a, c, g, or t
  misc_feature (3918)..(3918): n is a, c, g, or t
  misc_feature (3920)..(3922): n is a, c, g, or t
  misc_feature (3924)..(3924): n is a, c, g, or t
  misc_feature (3926)..(3926): n is a, c, g, or t
  misc_feature (3928)..(3928): n is a, c, g, or t
  misc_feature (3930)..(3940): n is a, c, g, or t
  misc_feature (3942)..(3942): n is a, c, g, or t
  misc_feature (3944)..(3945): n is a, c, g, or t
  misc_feature (3947)..(3950): n is a, c, g, or t
  misc_feature (3952)..(3962): n is a, c, g, or t
  misc_feature (3967)..(3967): n is a, c, g, or t
  misc_feature (3969)..(3972): n is a, c, g, or t
  misc_feature (3974)..(3976): n is a, c, g, or t
  misc_feature (3978)..(3982): n is a, c, g, or t
  misc_feature (3984)..(3988): n is a, c, g, or t
  misc_feature (3990)..(3991): n is a, c, g, or t
  misc_feature (3993)..(3993): n is a, c, g, or t
  misc_feature (3995)..(3999): n is a, c, g, or t
cctcctgccgcctttcgntctcgcnggcgtggggatgatggtgctgatcatgccgcagacctcaatcaccctggcggagattcccacgaccgaagccggagcagcgtccggcaccctcacgaccttcggccaagtcggcatggtgttcggcatcgcactgtccggcaccgcatacttcggagcanccggtgacagnggccagaacgtgaccgcgggcctgtgggtcatcgtcatcgcctacaccgtctccggcttggccgcnctcacgatgcccacccgcagcagccaggagcagccctcgcccgaccccaatgagcctggttgagccagcatgagcggccccttccccgaagccggttgagccggggcgcgacgaaggagcgacccgagtcgaaaccatcactggcgctcggtagatagaactcgaccacagctccccggacacgcacaccgcggtttcgacacgaccagctcgcagagcgagcaggccggctcaaccagcttgggagaagttcaccgcaggtcggctcaaccggcttggaagcagggagagcagaccctcagnanccaccaaacccctgcacggaggtgtgtgcaggggttcggcgggaattgaggaagggcttgaaagccaagtttttatttgtcagaggacctcgtagttgacggtgatcaccccggaggaggtgccgccgatggtttccatggcggccttggagaggtccaggcagcgtccggcgacgtaggggccgcggtcgttgatgcgaaccacgacggtcttgccgttgctcgggttggtcaccttgaccttgctgccgaggggaagggtcttgtgggcggcggtgaggtcgctggggttgaactgttcaccggaggccgtgatctgtccctgccagtagtaggaggcctggcaggagctgccgttggcggggctgaggtcgccgccgctacccgagccggagccaccctcggaaggcttgctggccttcttggtgcccaccttggtcacctgggcgacgggctccttggtgacctgctcgttctgcagctcggaggagaccagcgtgccgttgtggtagacctcgacgaagttctgggtcttgacgccgttgacgccctcggtggtgaccttggtcttgccctcctccagttcgtcggacttctcctccttcttctcgaaggggaccgcctcctccttgntggtggcgcgcttctcgacgttggtgtaggagatggccannccatcggtnagggaggtgtccgcggcgggggtgaccacgtcgtcctcgtcgggngtcaccttggcggcggtcagggcntcgccgacggtcccggcgacccgcagntcgaccggggtgcccgcggcgtcgacggtcacgttcttgggggtgctgatgttgaaggagagcccctcgcggccgatggcggccgagcgggaggtggacagcttggagtcggggtcgttgaggttgagctgcgtcagagcgtcgtcgacggtgcgggaagtggtccacacggtgcgggcctcaccgtcgatggtcagctggagctggcggccgtagagaacgctgatctccatgccgttggtgatcttggtgtccagcgacggggccaccacgtcgtgctcgccgacggtgatcccgtccttctcgagcacctgcttcaccgtgtcctcgcgaaccgagacactgtgggtttccccgtccacggaaaggaccacatcgttcttgtgcagtgccaccgcgacggcgacgccaccggcgatcgtcagcgccacaccgcctgccactgcggcaataaccacgtgtttcttggccatagatctcttcctggtctaagacttcccggaccttaccggctgggccagcctagccgagcaccgatttaattccaaacgaatcctgagaatctctcagggccgcgcaatccgattgtagccctcgaccctcccaactgggaacaggtcctcgtngacgcccgcctcccnggggncgaatcctgacgtgaccacgggtttcacagcgatcccccggcttccgggagggatgggnggaagccgggggaaccctgagnaacggtcttaacggaagttacgcaacctgagagagttcagcaccacgaanacgctggagcaggccatggccgcgcccgcgatcatcggggtcagcancccgagggccgccaccgggatggccgccacgttgtagaagaaggcccacagcaggttgccccggatggtgcgttccgtggcgcgggagagccggatggcntccaccacgcccatcaggtcgtcgcgcatcagggtgaggtcgctggcggccatggccgcgtcggtgcccgcgcccatcgcgatgccgaggtcggaggtggcaagcgccgcggcgtcgttcaccccgtcgccgaccatcgccacccgcatcccatcggcctgcagcccggtgatcacctcggccttgccctgcggcagcacctcggcgtgcacgtcttcgatgcccacctgcgaggccacctcccgggccacggcccacgagtcgccggtcagcaacaccggtcgcaatcccagatccctcaanccggccacggcctccgcggccccgggtttgagctggtcgccgaccacgatccgccccagcagcgcgccgtcgcggacgacgaacacctcgctgccctcccggctggcctcgcccgggacctcgatgccctgctcggccagcagacgccgggaacccaccgccaccggaaccccgtcgagcagggcccgcgccccgatnccgggcagggcctcgaaccgctccgcnncggncgngtccccggcgngctccacgacggcgcgggcgatgggatgctcggaaccggcntccacngccgcggcgacggccagcagctcggcctcgtccacgccctcggcgggcgcgacctccagcaccgacatcctccccgtggtgagggtgccggtcttgtccagcaccaccgcctgcacggancgggccttctccagggcctgggcgcctcggatgatcacgcccagctcggcgccgcgaccggtgcccaccagcagcgccgacggggtggcgagcccgagcgcgcacgggcaggcgatgatgagcaccgccatgcccgcggngagcgcgaaggtggggcccgcaccgangagcagctgcaccatgaaggtgagcatcgacaacaccagcacggcgggcacgaagaactccgtgatncggtccgccaggcgctgggcccgggccttgccggtctgggcctcctcgacgagccgcgcgatctgcgccacctgggtggccgacccgaccgccgtcgccttgaccaccaggcgtcccgtggtgttgaccgacccgcccaccaccgccgagcccgggccgacctccaccgncngcnnnncnncnntgnnnncgncngcgnngnnnncgnnnnnnnnntnnncnannnncnnnnnngcggnnncnnnntcnnccggncncaccnnnnngangnngntgnnnnnnagntnnnnnnnngnnnnnnngncnnnnnngcngnnnnnnnngatcgncnnnncntnnnnnnngnnnncnnnnnnngcnnncnncncnnntnnnnnntcncnntngnnnnngnnnncnnnnnngnnncccnncnnnnnnangnngnccnngncngcggcnnncncnnnnnnnncgnngnnnancggnncggnnngncngnngnnnnnngngnnnnngngnntnnngncnnnnnnnnngncgngnnngnngnnnnnggnnnnnnnngacnnnnncnnngnnncnnnnnnnnngannnnnnnnnngnnnnncntggnnnngnnnncnnncnnnnnnnnngnnnnnnnnnnntnnngnnnncnnngnnngnnncagnncncnnnnangntnnnnngnnncagnncnngncnntgnnnnnngngnnncngnangnnnnnnnnnnncnanncnnnnannnnnnnnnnngccancnnnnannncnnnnncnnnnncnncngnnnnnc

SEQ ID NO: 1152 - DNA, 4000 bp, Escherichia coli
  misc_feature (2637)..(2637): n is a, c, g, or t
  misc_feature (2886)..(2886): n is a, c, g, or t
  misc_feature (2949)..(2949): n is a, c, g, or t
gaggtggggcatgccaggtacgaggccgatgagcacgagaatccctgcggtaatcttgagcgcggctgggttggtgagctgactgcctgctgagttggccgtagtttcagaggtggtgacgcgagttacgattattgctgtagacagcgatagcagcagcgatggcacttgggcaacaagaccgtcgccaatagtgaggagcacataaatttccgctgcctcgctaaattcgagtccgttctgcgttaccccgacgagcagaccgcccacaatgttgatcaacagaataagcacgccagcgatcgcatcaccgcggacaaacttagaggcaccgtccatggagccgaaaaaatcggactcctgcgagacttcttctcgtcgcttaagggcagtttcctgatcgatcacgccggcattcagatcggcatcgattgccatttgcttaccaggcaacgcgtcgagagtgaaacgcgcgataacctcggaggttcggcctgcacccttggtcacaacgataaaattgatgatcatcagaatgataaaaatgatgaagccgacgatgtaatttccggcgatgacgaactcgccaaacgaggcgatgacatttcctgccgcgtcggggccttcgtgaccacgcaggagcactacgcgagtcgaggctacattaaggctcaggcgaagcattgtggctaagagcagtattagcgggaacgaagaaaattcgaggggcttatgcacgttgatgcagatcatcacaatgatgaggccggtcataatattaaaagtaaacaggatatcgagcgctatcgaaggtaatggcacaacaagcatgcccataatcgctaggataaccaggggaatacctaggtttttcgcttcaccggtaaagagtgattgtcgtaaacctgacactaaagtcgcgctcataattacttcttcttaatcaatgggttactagattattccggcgatctatcgttctgtttatagccttttcagcctcggcatttaccggctgtcctaggcagttgcaaagcctgtgccaataaattgtgacagtgaaattcgagactagtcggcctgtgatgactcgcttgaagaaattaagcgacaccaacgagtaaagcgcggtgaacaagtgtcgattggctcttcgtagaggcgccactaaagaacctaaagaggagcaggaaatgaagtcatcgcagagctatttaataggccgaattgggttattcgccttaatagtcaccgtgtttgctagctgttcgagcaatggacgggtcggtgttgcaggcatcaatgcaggcttctccctagagggccccgtcgtcaactcgtcgggtggcttggggtatcttgctagtgatcgcatcgaggcaacggggtatgcggtgatccagagtcaggctggagaaccggcgcagcagcgtcttatggctattaaagcagcccgttttgatgcctatcgtcagctcaccgaaattgtttttggtgtctacattgactcatcgaccacgatcgcggatctcacgattgccagcgacgattttcgctcgcgtatcgaaggtgtgatctacggtgccgagctcgtgaagatcgaaccagtctcgggcgatacctatgccgtcacgctggcattgccaaactcgacgatcgacgatctccgtgcgctgtacctcgaccaacttgcgttaggtgctggataagttgatgcgagctgatttcatccattcctttgcgatcgctttacgcgccatagtgtcgggccgaatgctcctagtggggatggccgttgcggtgagtttgccgagtgttgctcaagatacagcaagtcaactcgaaacaattaaggccgaggtactcaatgcggcggtggccgacggcgtctctgtggtctcttctgcttatataaatggcgatggccaactcgttgagtcttctttttatcgcgccggcggcggtatccgcggcattcggatgcatgcgttgctcgaagaccaaaacgcgcatgttcacgcgggatacatagaaacgagtccgctaaatccaaagttgagctgcgatcagctaccgcctccacgctatgcccgttctttagcgctgtcgtttgtgctgctcgatcaggtaaaagagcaagcgaaacgtcacgtccgcgagctcggcgaggtgtccactctcttacaggacgcggtgagcaccgaaataaacacgagcagccagtggtcactgctgtcggttcgcaattctgacaggcaggcagaggagccagtctctctctacacgcgctttaccgacggcagttttatcgaccatcgaaacaacaacacagcgctgcgagtaaccgttatcgacttttcgccccaggagctcaatcccgcgcagacactgcgtgcggggacacgaggcctcaggcgactggggtctcaattgggcgccgagattggcctcggcgttgaccgtagtgtgctcgcaggctcgagagtgcgcgagggaatgatcgaggtaagccttatgctgagcctagttgagctcgatagcggggaaaccgaaatagctcggcaacgattaaacttgaaagttgcgctacgtgacggccagatcgcgaatgcagaccggatgcaagggcagatcgcntctgcaaccgcgtcgctcttagcacgcggtcaggcgacactccgatgccagcccgaatcgcttgtagtctatagccaactcgaattctcggacgcaacccctacacttaatcagggtgcgagcgtcggtgttcgccgcggcgatagatttctgcttagcacgcgcaaatttaccgacgccgagcaactgctggattctgagatgcttgaatcattatcgatcgccgaggttgtgcgggtaaatccacanaatgccgaactgcgaattctcgaagggcctaccactgtgggacttcataaaagcgcgctgccnttctagtggaaagacgacaggtcatccatacagtaaggtaattgagcgtgcccaaaaaacgaatacaacgctaacgacaagattgaagggctagaaggggaataagatgacagtaaaaattcggttggtcgtagttgcgctattagcatggttcaccggtcaagcgatagccgccgaaaccgcgtctcgcactgagatcgaccgcgcgctccgggtcttgcttgcagactatgacgtacaagatcatctcgacattcgctacgccgaagaagtcgcgaccggcttttatgaggttcgcgctggcgacacgctcgacggcatcattaatcgcgcgattcagggcagctcgatccgtaaagaaatgctgcgcagcgcgtttattaaagcgaacccgcgcgcatttccttcgggtaatcccaatcgaatgcttgccggtgtgacacttcgcattcccaccgccgacgatgtactccgcctcgtgtttacggtcgatccggcggagctcgaaattgaacgtagggcacgagaaagctgggttcactttccctagacacgcttttctctgcataactttcgtctatctgattagggcgcagacgagcgacgttaataaggactgcccgtgaatggccccgagaatatcagccaattccttagagttccgatagccgatcaaccggccctcggaattttgcgcttaaacagcgccgaggtgcgtgagtacggactcactcctgggcagactgtgcgtggcattgttgcggacgatgggcgttcggttaccttgtttttccctaatcagccgcgacgatttcgcggtgactatcaagacctcaaaaatcaatcgctcgacttcagtgtgtcacgcagcgcctatggcgtgacaataaaaccggtcgaggagcgtatgacgctaaccacggcggcgatggcacgcgcagcagcgctgcaagcacagacccccaaacaaccagttaaccttcaagcgctcgcggcactggcgtcgaatcccgagctcaccgacgtgccggtgctcgcgggcgctgcaggc

SEQ ID NO: 1153 - DNA, 4000 bp, Escherichia coli
  misc_feature (1273)..(1273): n is a, c, g, or t
  misc_feature (1987)..(1987): n is a, c, g, or t
  misc_feature (1991)..(1991): n is a, c, g, or t
aaggatggtgatatcaaaggtgccgccgccaagatcgaaaaccgcgatggtggcgtcagtattggtcttgtccagcccgtacgccagcgacgaggcagtgggctcgttgatgatgcgcaaaacttccagtccggcgatggtaccggcgtctttggttgcctggcgttgtgcgtcgttgaaataggctgggaccgtgatcactgcctgggttatcttctcgcccaacttggcttcggcgtcctgcttgatcttctgcagcacgaaggcggagatctggggaggggcgtgggactcgtcgcccaactgcaccatcgcgtcgccactggggccggccacgatcttgtagggcagtttggacatggcgttctgaatctcagcgtcgttgaacttacggcccatgagccgtttcactgaaaagagcgtgttctcggggttggttacggcctgccgtttcgcgacttggccaacgtaacgctcgcccgttttggtgttcagagcaacgaccgacggggtgatgcgggcgccttctgcattttccacgaccacgggttcaccggcttcgatgatcgccgcgactgagttggttgttccgaggtcgattcccaggactttagccatttggtttctcctaaattctcacacgctggtgacaatattgatgcgatgggatgatttggggtttgctatctgatcttaagttggttctgattggtctttgggggccgtggccaccatcacttgggctgggcggatgacccggtcatgcaaccggaaccccatccttaatatctgagtgatgtagcccggctccacctcgcttgactcttcggtgccaacagcttcgtgctccatggggttgaacatcagacccacggcctcgatggccgctacgccctcggattctagcacgccggttaatttccgctggatcagcttgatcccttcgaggaaagagtcgttgatctcggtgctggattcggtatgggtgatagccaggtccaactcctccaagaccgggaggatattggcgatcaaccggctgttggcgtatttggcgttggcgatgcggtcttcgtcggtccggcgccggaagttaaccatctccgcttgggcccgctgggcggtgtccaggttctcggcggcatcttgctgcgctcgttcgagactggtcttcagcgaactcacctggtcctccaaggggaggctgtccagatcgactccagcctgggccaagagttcttcaagttccttctccagtccctgagattcgggntgttctgcccgctcttcttgctcttcgggctggtcatctgattcgtttggtcctttccccattgaggtattcccctagatgtgatcggtcttggtccgaaaagccggctttagcggtctaccggcagattcaagctcttgaataataggtccatctcttcttgtaccacctgttgggccgcagggataccctcgaggcggtcactgattcgctgcttgatcgtggacatattgtcaaacgcggccaaggcgaattcaaccccagccagattcaggcccaattcgtcggacagataccggatcaaccggacctttctgatgtcctcggttgaatagagccggagcatcccgatggtccgcccaggattgatcaaccccagccgctcgtacttacgcagcgtctgagggtgaatgtccaagatccgcgcggcgacgctgatgatatagacgccctgggcctcgatcaccggttcgtcattggcaggcggctgagcaggcgaaatgtccgtattttcggggcgcgtggggggcgtccggcccggcgttaccggctgattctccacgcgaggtctctgttgttggctcatatggactccccagggccaccacgagttctggcatgaaactctagaatcggtcaatcagcggcgcatttcggtcacattgttgaccggcgattaatcatatgatagagtctgatacgtttcgtgtcaangttngtgcaacagcctgcattacatgacttaagatcatccggttaatggctgaggccaaataagagttagaccgggaaaaagaaggttaatcatgatgtacttcaaggaatgcccaaagtgccacggtgacctattagacggagaggatgttcacggccggtatgttagctgtatccagtgcggatacatgcgtgatctgcctgaggagaccccccatccgttggcagggaagacctttgtgatcgatgctcccaagcccgccaagaagcgccgaaaaaaggtcgctcgagccgcctgaaattagattaggccgatgcaaaagaggggcggctaagttgccgcccctcttctttttctattattgggccgaggttcggatctaatcattacttggcaatcaccgtcattccagcggaggctggaaaccagatttgctgagttagccaaccatcatactgtgaaggcatcctgggttcctgccttcgcaggaacgacggggcggcttttcgctcacagtgccttgacatgcgaggttcagtttatttagtcagttcgggccagaatcgttcttctttccacggatcgccatcgttgtggtagccgcgctgctcccagaatccgggggaatcttcggcgatgagctcgataccgttgacccacttggcgcttttccaggcgtagatgctggggacgatcagccttagtggccagccgtggctcgtgcccaagggctcgccttcctgcttgtgggccagtatcccctcttccatggccaaggccagcgggaggttggtggagtagccgccgtagcagtgggccatgacgaacttggcctccggtttggggccggcggcggcgaccagttcgttgaagttcacgccctcccaggtgttgtccaatctgctccactgggtgacgcagtggaaatcggccagcgtggtggtccatttgagcttggagaattcctcccaattaagggttatctcccgttccaccagtccgaagactcggatctgccaggtgtcgatatcgatcttgggttcagtgccgtaggtcaggacagggaacttgtcggttaggaattgtcccggtgggacgcggtcgcccaggctttggccgggcgccgtctttacttggtcaggtcgcttcatttgataagactcttcggctgatattccgcaatagggccaaaccggctgcgaatacacagtttatcaccggcttgcggcgtattgaaagaaaggcgccgttgtctggctctaggcggatacgctgatccgtccggggttctcggcggtgatctcgcccaccacggccttggtctgcactccggaggcgtccagtttagctagcaattggtccaacttggacttggggaccgagatcagtaggccgccggaggtctgggcgtcgcacatcaaaagcttctgttggtctgacagaacgtcgtcccagtccaccacgtcctcgacgctggacatgttgcggaaggtgcctccgggaaccgtccctttctccagcaggtcccagacgccgggcaacaccggtacgtccgccacccgaatcctggcccctgcctggctgcccttgaccatgccgctcaggtgtcccatcaggccgaagcccgtgatgtcggtgcaagagttcactcccaccctcatcatggcctcggacgcgcccttgttcagttcggccatcatgtccacggcctgcttcaatatggcgtctggcgtgaccccctgtttgacgccggtggtgactatccctgtgccgatgggtttcgttagcaccaggacgtcgccgggcttcgcgttggcgttggaaacctcttttccgggctcgatcaggccgaccaccgagaggccgtactttggctctgcgtcatctaccgtgtgcccgcccacgatcaggcagcccgcctccgtagccttatcgtagccgcccttcagcacatcgcccagcatctccacggccagatcggcagggaatcccaccacgttcaaggccaccag

SEQ ID NO: 1154 - DNA, 4000 bp, Escherichia coli
  misc_feature (1)..(4): n is a, c, g, or t
  misc_feature (6)..(6): n is a, c, g, or t
  misc_feature (8)..(8): n is a, c, g, or t
  misc_feature (12)..(13): n is a, c, g, or t
  misc_feature (15)..(19): n is a, c, g, or t
  misc_feature (21)..(22): n is a, c, g, or t
  misc_feature (26)..(26): n is a, c, g, or t
  misc_feature (28)..(30): n is a, c, g, or t
  misc_feature (32)..(35): n is a, c, g, or t
  misc_feature (37)..(37): n is a, c, g, or t
  misc_feature (40)..(40): n is a, c, g, or t
  misc_feature (42)..(42): n is a, c, g, or t
  misc_feature (46)..(46): n is a, c, g, or t
  misc_feature (48)..(50): n is a, c, g, or t
  misc_feature (52)..(55): n is a, c, g, or t
  misc_feature (57)..(57): n is a, c, g, or t
  misc_feature (59)..(61): n is a, c, g, or t
  misc_feature (63)..(63): n is a, c, g, or t
  misc_feature (65)..(65): n is a, c, g, or t
  misc_feature (67)..(69): n is a, c, g, or t
  misc_feature (72)..(76): n is a, c, g, or t
  misc_feature (78)..(78): n is a, c, g, or t
  misc_feature (82)..(85): n is a, c, g, or t
  misc_feature (89)..(92): n is a, c, g, or t
  misc_feature (94)..(94): n is a, c, g, or t
  misc_feature (98)..(100): n is a, c, g, or t
  misc_feature (102)..(102): n is a, c, g, or t
  misc_feature (104)..(107): n is a, c, g, or t
  misc_feature (109)..(114): n is a, c, g, or t
  misc_feature (119)..(119): n is a, c, g, or t
  misc_feature (122)..(122): n is a, c, g, or t
  misc_feature (125)..(125): n is a, c, g, or t
  misc_feature (127)..(127): n is a, c, g, or t
  misc_feature (130)..(130): n is a, c, g, or t
  misc_feature (132)..(132): n is a, c, g, or t
  misc_feature (134)..(137): n is a, c, g, or t
  misc_feature (139)..(139): n is a, c, g, or t
  misc_feature (141)..(141): n is a, c, g, or t
  misc_feature (143)..(144): n is a, c, g, or t
  misc_feature (147)..(149): n is a, c, g, or t
  misc_feature (151)..(155): n is a, c, g, or t
  misc_feature (157)..(157): n is a, c, g, or t
  misc_feature (159)..(162): n is a, c, g, or t
  misc_feature (164)..(172): n is a, c, g, or t
  misc_feature (174)..(174): n is a, c, g, or t
  misc_feature (176)..(190): n is a, c, g, or t
  misc_feature (194)..(194): n is a, c, g, or t
  misc_feature (196)..(196): n is a, c, g, or t
  misc_feature (198)..(199): n is a, c, g, or t
  misc_feature (201)..(201): n is a, c, g, or t
  misc_feature (203)..(203): n is a, c, g, or t
  misc_feature (205)..(205): n is a, c, g, or t
  misc_feature (207)..(211): n is a, c, g, or t
  misc_feature (213)..(214): n is a, c, g, or t
  misc_feature (216)..(216): n is a, c, g, or t
  misc_feature (218)..(218): n is a, c, g, or t
  misc_feature (221)..(223): n is a, c, g, or t
  misc_feature (226)..(227): n is a, c, g, or t
  misc_feature (229)..(230): n is a, c, g, or t
  misc_feature (233)..(233): n is a, c, g, or t
  misc_feature (237)..(239): n is a, c, g, or t
  misc_feature (241)..(241): n is a, c, g, or t
  misc_feature (243)..(243): n is a, c, g, or t
  misc_feature (248)..(250): n is a, c, g, or t
  misc_feature (252)..(256): n is a, c, g, or t
  misc_feature (258)..(260): n is a, c, g, or t
  misc_feature (262)..(267): n is a, c, g, or t
  misc_feature (270)..(273): n is a, c, g, or t
  misc_feature (277)..(279): n is a, c, g, or t
  misc_feature (286)..(286): n is a, c, g, or t
  misc_feature (291)..(293): n is a, c, g, or t
  misc_feature (295)..(295): n is a, c, g, or t
  misc_feature (297)..(297): n is a, c, g, or t
  misc_feature (299)..(301): n is a, c, g, or t
  misc_feature (303)..(304): n is a, c, g, or t
  misc_feature (306)..(306): n is a, c, g, or t
  misc_feature (308)..(312): n is a, c, g, or t
  misc_feature (315)..(318): n is a, c, g, or t
  misc_feature (321)..(321): n is a, c, g, or t
  misc_feature (323)..(324): n is a, c, g, or t
  misc_feature (327)..(331): n is a, c, g, or t
  misc_feature (335)..(335): n is a, c, g, or t
  misc_feature (337)..(338): n is a, c, g, or t
  misc_feature (342)..(342): n is a, c, g, or t
  misc_feature (345)..(345): n is a, c, g, or t
  misc_feature (350)..(351): n is a, c, g, or t
  misc_feature (354)..(358): n is a, c, g, or t
  misc_feature (360)..(360): n is a, c, g, or t
  misc_feature (363)..(364): n is a, c, g, or t
  misc_feature (366)..(366): n is a, c, g, or t
  misc_feature (370)..(370): n is a, c, g, or t
  misc_feature (372)..(372): n is a, c, g, or t
  misc_feature (374)..(374): n is a, c, g, or t
  misc_feature (405)..(405): n is a, c, g, or t
  misc_feature (795)..(795): n is a, c, g, or t
  misc_feature (879)..(879): n is a, c, g, or t
  misc_feature (1080)..(1080): n is a, c, g, or t
  misc_feature (1096)..(1096): n is a, c, g, or t
  misc_feature (1657)..(1657): n is a, c, g, or t
  misc_feature (1662)..(1662): n is a, c, g, or t
  misc_feature (1683)..(1683): n is a, c, g, or t
  misc_feature (1696)..(1696): n is a, c, g, or t
  misc_feature (1710)..(1710): n is a, c, g, or t
  misc_feature (1728)..(1728): n is a, c, g, or t
  misc_feature (1737)..(1737): n is a, c, g, or t
  misc_feature (1752)..(1752): n is a, c, g, or t
  misc_feature (3578)..(3578): n is a, c, g, or t
  misc_feature (3584)..(3584): n is a, c, g, or t
  misc_feature (3656)..(3656): n is a, c, g, or t
nnnncngngggnngnnnnngnnaaanannntnnnnanaancnaaanannncnnnngngnnncncngnnnaannnnngntttnnnnaaannnngngggnnngntnnnngnnnnnnggggnccnccngnggntntnnnntngngnnggnnncnnnnnanannnncnnnnnnnnngngnnnnnnnnnnnnnnngggncncnngntngnannnnncnnangnccnnnacnnannggngaannntntntcccnnnannnnncnnntnnnnnnaannnngggnnnagggggnaaagnnntngngnnnanncncnnnnngannnnccntnnggnnnnntgtnanncccnggncccanngcnnnnntnttnnantttngngnaaaaattttttaaccgtatttccgaccaaanaaatcggataactttgtttgaatgaaataaacgctgccgagcaaaggagagagagcgatggagaaagctctgacttggaaagaaaaactcgccggcaaaatggtaccggagctggcacgcgagatcgacatcttcgagcagcaaatgaaactccgcaagcaaggcaagatcgacgagaaggtctttgccgagacacggttgcggcgcggtatctacgggcaacgctacgacaacgggcagcgccacgacggcaagcgcgtgcagaaactcaaactgcctgccgaggttatcaaaggacctgacacgctctgggacgcgcccggtatgatgcgaatcaaaatacctttcggcggcgtaacgcctgaacagctggagaccttggccgatctntccgaggaatacgccgacggggttgcgcacatcaccacgcgccaagatgtccaattccatttcgttcatatcgacgacacgccntcgctcatgcggcgcctggccgcggtcggaatcacgagccgcgaggcctgcggcaacgtcgtgcgcaatgtgacggcctgcccgttggccggcatttgccgcgacgaagcattcgatacgacgccctacgccaaagcctgctcgaagttcatgatgggccatcccgatacgcaggactttggccgcaagttcaagatcgcnttttcaggctgccaanagcatccttgcgggctggtaaccatgcatgacatgggcgccatcgctaagacgaagatcgtggatggcaaggagaagcgagggttcgaattctacgtgggtggcggcctcggctcggttccgtataaagcgaagctattcgatgaatttctgcctgaggaagaattcctgccgatggcgcaggcgatttcccgggtcttcgcccgcctcggcgaaaagcgcaatcgcgcgcgggcgcggatcaagtttttgatcgccaatctcggcattgacgaattccgccggctagtactcgaagagcggcagaagctttctcctgatcctcgctggacggcccatctcgccacggtcaatgagcagatggaagaagcgctcaaggctggagtgagcttgaacggcagcgagcggcccgagggattcgaggcctggtacgctaccaacgtttacaagcagaggcagccgggatatgtggccgccaccgtgaccttgcctctcggcgacgccagcgccgagcagttgcgcgcgctcgccgacatcgcgcggcgatttgttaaggacacgntccgnaccacggtagagcaaaatatnctctttcgctggntgagcgaggcggancttccggagttttaccgngccattcgngcgatcggtctgggngcggcggacgcggccaccatcgtcgacgttaccgcctgccccggcaccgacacctgcaaattgggcatcgcttcctcgcgcggtctcgcgcgcgagctgcgttatcgcctcggtgaaaagagtctggagctggatcaagcggtgaagaacctgcgcatcaaagtcagcggctgctttaactcatgcggccaacaccacgtcgccgacatcggcttctatggcatcaaccgcaacgttaagggtttccaggtgccgcacttccaggtgatcctcggcggcaaattccgcgacaacgcgggggaatacggcgtggccgtcggggcggtgccgtccaaacgagtaccggaggcggtgctgtcgatcacggaatactacgtgcgcaggcggttgagggatgagagctttcaggattttgttcgacggattggcaagaaggagattaaagacctgctggaggatttaaccaaaatacccgcgcacgaggtgggcccgtcgtactacaccgattggggagatccgcgcgagtttactttgaccgatatgggaaccggagaatgtgcgggtgaggtcgtcagccaagcggagtttgcgctggcagcgagcgaacgcgaattgttcgaggcccaattgctcttggacggcggacgtccccaggacgctgtcaagacggcgtatgcctctatgctccgcgcggcgcaaggtctggtgaagacccagaatcccggtatctccgaggatgaacagcagattctcgcggaattcaccagccgtttttacgatacgcagctcttctgggacaaatacgctggtggaaaattcgccgagtatttgttcaaggccaaggaatttatcggcgcggcaaaatctgccgacgcggatcgcgcggttcaactgttgcaggaagcgcagctgtttatcgacgcggctcacgactgccacaacaaggtgcgcggcgccgtggaaagtccggttaagataacgaccgccgctcaaccgagcgcatagcgtcttggagcaaagatggaactgcaaaagatcaatgtaaaattcttcgcgacggatcctaacaacccgccactgacggattttatcgatctttttcatggctggattcaagctaccgacggcgtctaccacgacgtggccgactatagtcacatgcaagcggggccggggatcgtgctggttgccaacgatgccaacgtgagcatcgatgagacggacaatcgtcgggggcttctctacagtcagaagtcgccgcttagcggctccaacccggaaaaaatccgcacggtgttgcgctccgctctgaaaaactgccgccggttggaggaagagccctcgctgcacaataaattgaagttttccggtagcgaggcgttgatatccatcaatgatcggttggctgcgccgaataccgacgaggccttcgaagaaataaaaccggagatcgagtcggtggcacaaacccttttcggcgacgcggatattactttggagcgcgatccagatccgcgccagcgcctgaacgttcgcatcaagacgtctcgttcgttgggcttgggcgaattggtgcgcaatctgcagaacgactgactggaaagggcgaaaaaatggcattgttaaaccttcagcaagcaacctcgacggcaacgattgatgctttggaacaacttcccaccgagggaatcctgcgctgggccttcgacaagtttgctccgaagttagcgctggcctgttcctttcaagccgaggagtcggtcctgatcgatatgatgcaccgcatgcgtggagcggattttcgcatctttaccttggataccggncggctnaatcaggaaacctatgactgcatggatgcgatccggcagcggtatggggtgagcgtggaagtctatttcccngacgccgagaaggttcaaaacatggtacggagccacggccttaacctgttctacaactcggtggagctccgcaagctgtgctgtggcattcgcaaggtggagccgctcaaccgggcgttgagagaattaaacgcatggatgaccgggttgcgccgcgagcaggcggtgacccgctccgaggtgcgcaagatcgagctggatagagatcacggctccattgtcaaaattaacccgttggtcgattggagctacgaccaggtgtggaactatattcgcgagcacaaggttccgtacaatcggctccataaccaaggttatccgagcatcggctgcgccccgtgcac

SEQ ID NO: 1155 - DNA, 4000 bp, Escherichia coli
  misc_feature (1987)..(1987): n is a, c, g, or t
  misc_feature (1989)..(1989): n is a, c, g, or t
  misc_feature (2884)..(2884): n is a, c, g, or t
  misc_feature (2898)..(2899): n is a, c, g, or t
  misc_feature (2902)..(2902): n is a, c, g, or t
  misc_feature (2916)..(2916): n is a, c, g, or t
  misc_feature (2919)..(2922): n is a, c, g, or t
  misc_feature (2924)..(2925): n is a, c, g, or t
  misc_feature (2930)..(2930): n is a, c, g, or t
  misc_feature (2932)..(2933): n is a, c, g, or t
  misc_feature (2936)..(2942): n is a, c, g, or t
  misc_feature (2944)..(2946): n is a, c, g, or t
  misc_feature (2948)..(2951): n is a, c, g, or t
  misc_feature (3018)..(4000): n is a, c, g, or t
tcaggtatgtgtaatataccgaattacaccgagcacataaattgttccgaatcttcaaatataaataataaaaataataatgttgcgatgtatccgggtaataatattatttatcataataatcaacaaaacaacttaaatttaaacgctgttaaaaataatcaatatatgcaatccattcaaaataatcattcaatgatgaatcagaattgtatttctaatccacaaataaattgtaataatgaatacatgcaatctttaattcaatttggatgtttcaatgtaaattgcaattttatgggtgcttcaaggaatggtattaataacatggattattacaataaaataaatggaatgttagattgtgataatgaaaaattaataaaacaatttgatgaagatatgaaaagaataaatggtaagtagtagaaaatttgtaatattttcatttattaataaatttttattatatatattaatatagtaatttttaatattatattttatataaaaggagagaatacatcaaataatcaaaaaatagatgttaataatcaaactaatattaaatgtacacaaacaacatattatgaacaaggatatacaaataattcctatagagaatataattcttctagtaatcaaagtaatggtagtaatggtgatagtaatagtaatgactctaatggtaattgtagtaatagtggttatggtaataacagtggaaatcaaaataatgataacaataataataacaataataacaacaataataattttaatgatctttcaaaagataaagatgtagttgaaagaccaaaaacattaaaaaattctgaggaaattatggaaaaatatttcaaaaatcatactttacataaagattttgttaatcaatatacattaacagaggaattaggggaaggtggatatggttttgttatatcatgtacaagaaaaagtgatggtcaaaaagttgctgtgaaatttattatcagagaaaaagttcctgttgcttgttgggtaagaaatgaagaccttggaatgatcccacaagaaattcatattttaagaatgattaatcataaaaatattataaaatatattgattattttgaagatgacaaatatttctatttagttcaagaacttcatggtactttttgggcaaataatttaaatattccagcaattgaaaacagttttagttcaagttcagaattttatgataatgttgctaatgaaagtagtgcatccaatattcattatcttcaaaagaatggtaatgataattctggaaattactatgataatgccaatccacttcctacacctccattttatgatcaacatgttcctagtaaaccatattatgtaaacccatctatgatggatattggttctagaaaagatttagatccaaacaatgttttaaaatcattaacaattcaagaaattgaagaaattgaattgaaagaaaaatcatcaatgtcgtcaggatcagcatcaataccagtaaaaggagtaagaaaggtaacaaatacttctatttcttcttctttttcatcatctacatcatcatcaccaatcaattattattctttgaattctaattctaactatcacaattataatatggaaatgcaacctccaccacttcctccatcacctgtcaataataaaaaggaaggaaataataagggttcaaatagtcaacaatttattgaattaccaagatctgttagtccatatataccatcagtaaaccaacgaccaatgaaaaatttaaataaaggtcgtaatttacaaaagaaaccatcaatggatctttttgaatgtatagaaagacatccccaattagacgaatcaatagtgaaatatatcatgagacaagtagtagaatgtgtttattatttgattaatacttgttctgtggtacatcgtgatttgaaggatgaaaatattgtaagttttttttttttttttntnttgttttttaaaatgtaaaatacaattataaattataaattataaattattattattattattattattattattttaaaaaaaaattaacaaaaatatttttattataaaaatattaatacattatataaaggttattgatgaaaactataatatcaaaattattgactttggtagtgcaactatattacctaaaaacagaaaaaatagactttttgcccaatttaatggtactattcaatatgcttcacctgaaattataagaggtgaaatgtattctgctcttgctcaagaaatttggtcattgggtatattaatgtatatgctcttatgtgaaggagaacatccatttggtgatgctaataatgttgttaataagccattagtgataactagacgatgctcaccagaatgtctcgatttattatatagaatgttggataaaaaccctacaaaccgtattaatattgatgatgtttataatcatccatggtttaaaaattaaatatgccattaacaataataataataattaaataacggaatcaactttttatttttatattatagacatttatatttaagtaaaatttcatttatattgtgtttttattttattttattttttaattaaattcttttaatattttaaaaattttaaggtaatatctataaaaaggaaacgaattacaacaatgaaaaaatatatttgtgataaaaaaaattttttttttttccattttatcttttaatcattatacaagaactttacataaaaaaaattaacaatattcacaattcatattcatattttatattaacaaaaacatttttaaacaaccaaaaaaaaaaaaaaaaaaaaaaaaaaaaaaaaaaaaaaaatattttttttttnttttttaaaaaaannttnaaaaattttaaaanttnnnntnnaaaantnnttnnnnnnntnnntnnnntttttttttttttttttttttggttgttttaaattgtttttgtttatataaaatatgaatatgaatnnnnnnnnnnnnnnnnnnnnnnnnnnnnnnnnnnnnnnnnnnnnnnnnnnnnnnnnnnnnnnnnnnnnnnnnnnnnnnnnnnnnnnnnnnnnnnnnnnnnnnnnnnnnnnnnnnnnnnnnnnnnnnnnnnnnnnnnnnnnnnnnnnnnnnnnnnnnnnnnnnnnnnnnnnnnnnnnnnnnnnnnnnnnnnnnnnnnnnnnnnnnnnnnnnnnnnnnnnnnnnnnnnnnnnnnnnnnnnnnnnnnnnnnnnnnnnnnnnnnnnnnnnnnnnnnnnnnnnnnnnnnnnnnnnnnnnnnnnnnnnnnnnnnnnnnnnnnnnnnnnnnnnnnnnnnnnnnnnnnnnnnnnnnnnnnnnnnnnnnnnnnnnnnnnnnnnnnnnnnnnnnnnnnnnnnnnnnnnnnnnnnnnnnnnnnnnnnnnnnnnnnnnnnnnnnnnnnnnnnnnnnnnnnnnnnnnnnnnnnnnnnnnnnnnnnnnnnnnnnnnnnnnnnnnnnnnnnnnnnnnnnnnnnnnnnnnnnnnnnnnnnnnnnnnnnnnnnnnnnnnnnnnnnnnnnnnnnnnnnnnnnnnnnnnnnnnnnnnnnnnnnnnnnnnnnnnnnnnnnnnnnnnnnnnnnnnnnnnnnnnnnnnnnnnnnnnnnnnnnnnnnnnnnnnnnnnnnnnnnnnnnnnnnnnnnnnnnnnnnnnnnnnnnnnnnnnnnnnnnnnnnnnnnnnnnnnnnnnnnnnnnnnnnnnnnnnnnnnnnnnnnnnnnnnnnnnnnnnnnnnnnnnnnnnnnnnnnnnnnnnnnnnnnnnnnnnnnnnnnnnnnnnnnnnnnnnnnnnnnnnnnnnnnnnnnnnnnnnnnnnnnnnnnnnnnnnnnnnnnnnnnnnnnnnnnnnnnnnnnnnnnnnnnnnnnnnnnnnnnnnnnnnnnnnnnnnnnnnnnnnnnnnnnnnnnnnnnnnnnnnnnnnnnnnnnnnnnnnnnnnnnnnnnnnnnnnnnnnnnnnn

SEQ ID NO: 1156 - DNA, 4000 bp, Escherichia coli
  misc_feature (1)..(6): n is a, c, g, or t
  misc_feature (8)..(10): n is a, c, g, or t
  misc_feature (15)..(17): n is a, c, g, or t
  misc_feature (19)..(20): n is a, c, g, or t
  misc_feature (22)..(24): n is a, c, g, or t
  misc_feature (27)..(29): n is a, c, g, or t
  misc_feature (31)..(32): n is a, c, g, or t
  misc_feature (34)..(38): n is a, c, g, or t
  misc_feature (40)..(46): n is a, c, g, or t
  misc_feature (48)..(52): n is a, c, g, or t
  misc_feature (55)..(55): n is a, c, g, or t
  misc_feature (57)..(57): n is a, c, g, or t
  misc_feature (59)..(60): n is a, c, g, or t
  misc_feature (62)..(63): n is a, c, g, or t
  misc_feature (66)..(71): n is a, c, g, or t
  misc_feature (73)..(74): n is a, c, g, or t
  misc_feature (76)..(77): n is a, c, g, or t
  misc_feature (79)..(83): n is a, c, g, or t
  misc_feature (85)..(93): n is a, c, g, or t
  misc_feature (95)..(101): n is a, c, g, or t
  misc_feature (103)..(105): n is a, c, g, or t
  misc_feature (107)..(108): n is a, c, g, or t
  misc_feature (110)..(119): n is a, c, g, or t
  misc_feature (121)..(125): n is a, c, g, or t
  misc_feature (127)..(127): n is a, c, g, or t
  misc_feature (129)..(133): n is a, c, g, or t
  misc_feature (135)..(140): n is a, c, g, or t
  misc_feature (142)..(142): n is a, c, g, or t
  misc_feature (144)..(152): n is a, c, g, or t
  misc_feature (155)..(157): n is a, c, g, or t
  misc_feature (160)..(163): n is a, c, g, or t
  misc_feature (165)..(173): n is a, c, g, or t
  misc_feature (175)..(176): n is a, c, g, or t
  misc_feature (181)..(185): n is a, c, g, or t
  misc_feature (187)..(187): n is a, c, g, or t
  misc_feature (189)..(190): n is a, c, g, or t
  misc_feature (192)..(193): n is a, c, g, or t
  misc_feature (195)..(200): n is a, c, g, or t
  misc_feature (202)..(204): n is a, c, g, or t
  misc_feature (207)..(218): n is a, c, g, or t
  misc_feature (220)..(220): n is a, c, g, or t
  misc_feature (223)..(229): n is a, c, g, or t
  misc_feature (233)..(233): n is a, c, g, or t
  misc_feature (235)..(235): n is a, c, g, or t
  misc_feature (237)..(245): n is a, c, g, or t
  misc_feature (247)..(253): n is a, c, g, or t
  misc_feature (255)..(256): n is a, c, g, or t
  misc_feature (258)..(259): n is a, c, g, or t
  misc_feature (261)..(261): n is a, c, g, or t
  misc_feature (263)..(263): n is a, c, g, or t
  misc_feature (265)..(265): n is a, c, g, or t
  misc_feature (268)..(268): n is a, c, g, or t
  misc_feature (272)..(272): n is a, c, g, or t
  misc_feature (275)..(277): n is a, c, g, or t
  misc_feature (279)..(283): n is a, c, g, or t
  misc_feature (286)..(301): n is a, c, g, or t
  misc_feature (303)..(304): n is a, c, g, or t
  misc_feature (306)..(314): n is a, c, g, or t
  misc_feature (316)..(317): n is a, c, g, or t
  misc_feature (319)..(319): n is a, c, g, or t
  misc_feature (322)..(322): n is a, c, g, or t
  misc_feature (324)..(329): n is a, c, g, or t
  misc_feature (331)..(337): n is a, c, g, or t
  misc_feature (339)..(342): n is a, c, g, or t
  misc_feature (345)..(347): n is a, c, g, or t
  misc_feature (349)..(361): n is a, c, g, or t
  misc_feature (363)..(373): n is a, c, g, or t
  misc_feature (375)..(379): n is a, c, g, or t
  misc_feature (382)..(386): n is a, c, g, or t
  misc_feature (388)..(393): n is a, c, g, or t
  misc_feature (395)..(395): n is a, c, g, or t
  misc_feature (398)..(398): n is a, c, g, or t
  misc_feature (400)..(404): n is a, c, g, or t
  misc_feature (407)..(415): n is a, c, g, or t
  misc_feature (419)..(429): n is a, c, g, or t
  misc_feature (431)..(431): n is a, c, g, or t
  misc_feature (433)..(435): n is a, c, g, or t
  misc_feature (437)..(449): n is a, c, g, or t
  misc_feature (451)..(453): n is a, c, g, or t
  misc_feature (455)..(455): n is a, c, g, or t
  misc_feature (457)..(458): n is a, c, g, or t
  misc_feature (460)..(460): n is a, c, g, or t
  misc_feature (462)..(464): n is a, c, g, or t
  misc_feature (466)..(469): n is a, c, g, or t
  misc_feature (471)..(475): n is a, c, g, or t
  misc_feature (477)..(477): n is a, c, g, or t
  misc_feature (479)..(488): n is a, c, g, or t
  misc_feature (490)..(490): n is a, c, g, or t
  misc_feature (492)..(492): n is a, c, g, or t
  misc_feature (494)..(494): n is a, c, g, or t
  misc_feature (496)..(511): n is a, c, g, or t
  misc_feature (514)..(515): n is a, c, g, or t
  misc_feature (518)..(518): n is a, c, g, or t
  misc_feature (520)..(520): n is a, c, g, or t
  misc_feature (522)..(526): n is a, c, g, or t
  misc_feature (528)..(533): n is a, c, g, or t
  misc_feature (535)..(535): n is a, c, g, or t
  misc_feature (538)..(541): n is a, c, g, or t
  misc_feature (543)..(545): n is a, c, g, or t
  misc_feature (549)..(550): n is a, c, g, or t
  misc_feature (554)..(555): n is a, c, g, or t
  misc_feature (557)..(559): n is a, c, g, or t
  misc_feature (562)..(562): n is a, c, g, or t
  misc_feature (564)..(572): n is a, c, g, or t
  misc_feature (574)..(575): n is a, c, g, or t
  misc_feature (577)..(579): n is a, c, g, or t
  misc_feature (582)..(586): n is a, c, g, or t
  misc_feature (588)..(595): n is a, c, g, or t
  misc_feature (598)..(600): n is a, c, g, or t
  misc_feature (602)..(603): n is a, c, g, or t
  misc_feature (605)..(608): n is a, c, g, or t
  misc_feature (610)..(611): n is a, c, g, or t
  misc_feature (614)..(617): n is a, c, g, or t
  misc_feature (619)..(619): n is a, c, g, or t
  misc_feature (621)..(621): n is a, c, g, or t
  misc_feature (625)..(630): n is a, c, g, or t
  misc_feature (632)..(634): n is a, c, g, or t
  misc_feature (636)..(638): n is a, c, g, or t
  misc_feature (640)..(650): n is a, c, g, or t
  misc_feature (653)..(666): n is a, c, g, or t
  misc_feature (668)..(671): n is a, c, g, or t
  misc_feature (673)..(678): n is a, c, g, or t
  misc_feature (680)..(682): n is a, c, g, or t
  misc_feature (684)..(684): n is a, c, g, or t
  misc_feature (687)..(687): n is a, c, g, or t
  misc_feature (689)..(690): n is a, c, g, or t
  misc_feature (692)..(692): n is a, c, g, or t
  misc_feature (694)..(694): n is a, c, g, or t
  misc_feature (697)..(700): n is a, c, g, or t
  misc_feature (702)..(703): n is a, c, g, or t
  misc_feature (706)..(716): n is a, c, g, or t
  misc_feature (718)..(721): n is a, c, g, or t
  misc_feature (724)..(729): n is a, c, g, or t
  misc_feature (731)..(732): n is a, c, g, or t
  misc_feature (734)..(734): n is a, c, g, or t
  misc_feature (737)..(737): n is a, c, g, or t
  misc_feature (741)..(743): n is a, c, g, or t
  misc_feature (745)..(746): n is a, c, g, or t
  misc_feature (749)..(752): n is a, c, g, or t
  misc_feature (754)..(756): n is a, c, g, or t
  misc_feature (758)..(762): n is a, c, g, or t
  misc_feature (764)..(771): n is a, c, g, or t
  misc_feature (773)..(775): n is a, c, g, or t
  misc_feature (777)..(779): n is a, c, g, or t
  misc_feature (781)..(785): n is a, c, g, or t
  misc_feature (788)..(789): n is a, c, g, or t
  misc_feature (791)..(792): n is a, c, g, or t
  misc_feature (794)..(797): n is a, c, g, or t
  misc_feature (799)..(805): n is a, c, g, or t
  misc_feature (809)..(811): n is a, c, g, or t
  misc_feature (815)..(822): n is a, c, g, or t
  misc_feature (824)..(831): n is a, c, g, or t
  misc_feature (833)..(844): n is a, c, g, or t
  misc_feature (846)..(847): n is a, c, g, or t
  misc_feature (849)..(852): n is a, c, g, or t
  misc_feature (854)..(854): n is a, c, g, or t
  misc_feature (856)..(856): n is a, c, g, or t
  misc_feature (858)..(860): n is a, c, g, or t
  misc_feature (862)..(864): n is a, c, g, or t
  misc_feature (866)..(869): n is a, c, g, or t
  misc_feature (871)..(874): n is a, c, g, or t
  misc_feature (877)..(878): n is a, c, g, or t
  misc_feature (880)..(883): n is a, c, g, or t
  misc_feature (885)..(885): n is a, c, g, or t
  misc_feature (887)..(890): n is a, c, g, or t
  misc_feature (892)..(897): n is a, c, g, or t
  misc_feature (899)..(902): n is a, c, g, or t
  misc_feature (904)..(907): n is a, c, g, or t
  misc_feature (909)..(909): n is a, c, g, or t
  misc_feature (911)..(912): n is a, c, g, or t
  misc_feature (915)..(917): n is a, c, g, or t
  misc_feature (919)..(921): n is a, c, g, or t
  misc_feature (923)..(926): n is a, c, g, or t
  misc_feature (928)..(931): n is a, c, g, or t
  misc_feature (933)..(940): n is a, c, g, or t
  misc_feature (944)..(951): n is a, c, g, or t
  misc_feature (953)..(962): n is a, c, g, or t
  misc_feature (964)..(965): n is a, c, g, or t
  misc_feature (967)..(968): n is a, c, g, or t
  misc_feature (970)..(971): n is a, c, g, or t
  misc_feature (974)..(979): n is a, c, g, or t
  misc_feature (981)..(982): n is a, c, g, or t
  misc_feature (984)..(998): n is a, c, g, or t
  misc_feature (1000)..(1002): n is a, c, g, or t
  misc_feature (1005)..(1005): n is a, c, g, or t
  misc_feature (1007)..(1012): n is a, c, g, or t
  misc_feature (1014)..(1017): n is a, c, g, or t
  misc_feature (1019)..(1019): n is a, c, g, or t
  misc_feature (1021)..(1023): n is a, c, g, or t
  misc_feature (1026)..(1028): n is a, c, g, or t
  misc_feature (1030)..(1031): n is a, c, g, or t
  misc_feature (1033)..(1039): n is a, c, g, or t
  misc_feature (1041)..(1041): n is a, c, g, or t
  misc_feature (1043)..(1046): n is a, c, g, or t
  misc_feature (1048)..(1049): n is a, c, g, or t
  misc_feature (1051)..(1051): n is a, c, g, or t
  misc_feature (1053)..(1053): n is a, c, g, or t
  misc_feature (1055)..(1055): n is a, c, g, or t
  misc_feature (1057)..(1059): n is a, c, g, or t
  misc_feature (1063)..(1063): n is a, c, g, or t
  misc_feature (1066)..(1067): n is a, c, g, or t
  misc_feature (1071)..(1072): n is a, c, g, or t
  misc_feature (1074)..(1077): n is a, c, g, or t
  misc_feature (1079)..(1080): n is a, c, g, or t
  misc_feature (1083)..(1098): n is a, c, g, or t
  misc_feature (1100)..(1107): n is a, c, g, or t
  misc_feature (1110)..(1111): n is a, c, g, or t
  misc_feature (1113)..(1116): n is a, c, g, or t
  misc_feature (1119)..(1119): n is a, c, g, or t
  misc_feature (1121)..(1124): n is a, c, g, or t
  misc_feature (1128)..(1131): n is a, c, g, or t
  misc_feature (1133)..(1134): n is a, c, g, or t
  misc_feature (1136)..(1144): n is a, c, g, or t
  misc_feature (1146)..(1150): n is a, c, g, or t
  misc_feature (1152)..(1156): n is a, c, g, or t
  misc_feature (1158)..(1159): n is a, c, g, or t
  misc_feature (1161)..(1164): n is a, c, g, or t
  misc_feature (1166)..(1166): n is a, c, g, or t
  misc_feature (1168)..(1174): n is a, c, g, or t
  misc_feature (1176)..(1176): n is a, c, g, or t
  misc_feature (1178)..(1181): n is a, c, g, or t
  misc_feature (1185)..(1188): n is a, c, g, or t
  misc_feature (1191)..(1196): n is a, c, g, or t
  misc_feature (1198)..(1202): n is a, c, g, or t
  misc_feature (1204)..(1205): n is a, c, g, or t
  misc_feature (1207)..(1208): n is a, c, g, or t
  misc_feature (1210)..(1210): n is a, c, g, or t
  misc_feature (1212)..(1212): n is a, c, g, or t
  misc_feature (1214)..(1218): n is a, c, g, or t
  misc_feature (1220)..(1221): n is a, c, g, or t
  misc_feature (1223)..(1226): n is a, c, g, or t
  misc_feature (1228)..(1231): n is a, c, g, or t
  misc_feature (1233)..(1234): n is a, c, g, or t
  misc_feature (1236)..(1240): n is a, c, g, or t
  misc_feature (1242)..(1246): n is a, c, g, or t
  misc_feature (1248)..(1249): n is a, c, g, or t
  misc_feature (1253)..(1253): n is a, c, g, or t
  misc_feature (1257)..(1258): n is a, c, g, or t
  misc_feature (1260)..(1261): n is a, c, g, or t
  misc_feature (1263)..(1265): n is a, c, g, or t
  misc_feature (1267)..(1274): n is a, c, g, or t
  misc_feature (1276)..(1277): n is a, c, g, or t
  misc_feature (1279)..(1280): n is a, c, g, or t
  misc_feature (1282)..(1283): n is a, c, g, or t
  misc_feature (1285)..(1285): n is a, c, g, or t
  misc_feature (1287)..(1287): n is a, c, g, or t
  misc_feature (1289)..(1289): n is a, c, g, or t
  misc_feature (1291)..(1293): n is a, c, g, or t
  misc_feature (1295)..(1295): n is a, c, g, or t
  misc_feature (1298)..(1299): n is a, c, g, or t
  misc_feature (1301)..(1302): n is a, c, g, or t
  misc_feature (1304)..(1305): n is a, c, g, or t
  misc_feature (1307)..(1308): n is a, c, g, or t
  misc_feature (1310)..(1310): n is a, c, g, or t
  misc_feature (1312)..(1314): n is a, c, g, or t
  misc_feature (1316)..(1322): n is a, c, g, or t
  misc_feature (1324)..(1324): n is a, c, g, or t
  misc_feature (1327)..(1327): n is a, c, g, or t
  misc_feature (1329)..(1332): n is a, c, g, or t
  misc_feature (1334)..(1337): n is a, c, g, or t
  misc_feature (1340)..(1345): n is a, c, g, or t
  misc_feature (1347)..(1353): n is a, c, g, or t
  misc_feature (1355)..(1357): n is a, c, g, or t
  misc_feature (1359)..(1363): n is a, c, g, or t
  misc_feature (1366)..(1366): n is a, c, g, or t
  misc_feature (1368)..(1369): n is a, c, g, or t
  misc_feature (1371)..(1375): n is a, c, g, or t
  misc_feature (1378)..(1378): n is a, c, g, or t
  misc_feature (1380)..(1381): n is a, c, g, or t
  misc_feature (1383)..(1383): n is a, c, g, or t
  misc_feature (1385)..(1385): n is a, c, g, or t
  misc_feature (1387)..(1390): n is a, c, g, or t
  misc_feature (1392)..(1397): n is a, c, g, or t
  misc_feature (1399)..(1402): n is a, c, g, or t
  misc_feature (1404)..(1404): n is a, c, g, or t
  misc_feature (1408)..(1409): n is a, c, g, or t
  misc_feature (1411)..(1414): n is a, c, g, or t
  misc_feature (1416)..(1419): n is a, c, g, or t
  misc_feature (1421)..(1421): n is a, c, g, or t
  misc_feature (1423)..(1423): n is a, c, g, or t
  misc_feature (1425)..(1426): n is a, c, g, or t
  misc_feature (1428)..(1428): n is a, c, g, or t
  misc_feature (1430)..(1432): n is a, c, g, or t
  misc_feature (1434)..(1438): n is a, c, g, or t
  misc_feature (1440)..(1440): n is a, c, g, or t
  misc_feature (1442)..(1445): n is a, c, g, or t
  misc_feature (1447)..(1454): n is a, c, g, or t
  misc_feature (1456)..(1458): n is a, c, g, or t
  misc_feature (1460)..(1463): n is a, c, g, or t
  misc_feature (1466)..(1466): n is a, c, g, or t
  misc_feature (1468)..(1468): n is a, c, g, or t
  misc_feature (1471)..(1473): n is a, c, g, or t
  misc_feature (1478)..(1481): n is a, c, g, or t
  misc_feature (1483)..(1483): n is a, c, g, or t
  misc_feature (1485)..(1490): n is a, c, g, or t
  misc_feature (1493)..(1496): n is a, c, g, or t
  misc_feature (1498)..(1499): n is a, c, g, or t
  misc_feature (1502)..(1513): n is a, c, g, or t
  misc_feature (1516)..(1517): n is a, c, g, or t
  misc_feature (1520)..(1526): n is a, c, g, or t
  misc_feature (1528)..(1528): n is a, c, g, or t
  misc_feature (1530)..(1532): n is a, c, g, or t
  misc_feature (1535)..(1535): n is a, c, g, or t
  misc_feature (1537)..(1537): n is a, c, g, or t
  misc_feature (1539)..(1546): n is a, c, g, or t
  misc_feature (1548)..(1554): n is a, c, g, or t
  misc_feature (1556)..(1557): n is a, c, g, or t
  misc_feature (1559)..(1560): n is a, c, g, or t
  misc_feature (1562)..(1562): n is a, c, g, or t
  misc_feature (1566)..(1578): n is a, c, g, or t
  misc_feature (1580)..(1581): n is a, c, g, or t
  misc_feature (1583)..(1585): n is a, c, g, or t
  misc_feature (1587)..(1587): n is a, c, g, or t
  misc_feature (1589)..(1591): n is a, c, g, or t
  misc_feature (1593)..(1594): n is a, c, g, or t
  misc_feature (1596)..(1596): n is a, c, g, or t
  misc_feature (1598)..(1598): n is a, c, g, or t
  misc_feature (1600)..(1600): n is a, c, g, or t
  misc_feature (1602)..(1610): n is a, c, g, or t
  misc_feature (1614)..(1627): n is a, c, g, or t
  misc_feature (1629)..(1630): n is a, c, g, or t
  misc_feature (1632)..(1635): n is a, c, g, or t
  misc_feature (1637)..(1640): n is a, c, g, or t
  misc_feature (1642)..(1643): n is a, c, g, or t
  misc_feature (1645)..(1655): n is a, c, g, or t
  misc_feature (1657)..(1658): n is a, c, g, or t
  misc_feature (1660)..(1661): n is a, c, g, or t
  misc_feature (1663)..(1663): n is a, c, g, or t
  misc_feature (1665)..(1666): n is a, c, g, or t
  misc_feature (1668)..(1671): n is a, c, g, or t
  misc_feature (1673)..(1673): n is a, c, g, or t
  misc_feature (1675)..(1675): n is a, c, g, or t
  misc_feature (1677)..(1678): n is a, c, g, or t
  misc_feature (1680)..(1685): n is a, c, g, or t
  misc_feature (1986)..(1986): n is a, c, g, or t
  misc_feature (3192)..(3192): n is a, c, g, or t
nnnnnncnnnttttnnncnngnnnttnnnannannnnntnnnnnnnannnnnttnancnnannttnnnnnngnnanngnnnnncnnnnnnnnnannnnnnnannngnngnnnnnnnnnntnnnnncnannnnngnnnnnntngnnnnnnnnnaannnttnnnngnnnnnnnnngnnttttnnnnnangnntnntnnnnnnannnaannnnnnnnnnnnanttnnnnnnntttncntnnnnnnnnntnnnnnnnanntnntncngnttncccnttnnntnnnnnttnnnnnnnnnnnnnnnngnntnnnnnnnnntnncnggnannnnnncnnnnnnnannnnaannngnnnnnnnnnnnnnannnnnnnnnnnannnnnttnnnnnannnnnngnaantnnnnnttnnnnnnnnnaaannnnnnnnnnnantnnncnnnnnnnnnnnnncnnncntnncntnnnannnnannnnngnannnnnnnnnncntncntnnnnnnnnnnnnnnnnttnnttncngnnnnngnnnnnncnttnnnncnnnaaanncccnncnnnttngnnnnnnnnncnncnnnttnnnnnannnnnnnnttnnnanncnnnnannccnnnntngntttnnnnnngnnntnnntnnnnnnnnnnnggnnnnnnnnnnnnnntnnnntnnnnnngnnntnaantnntnanttnnnnannttnnnnnnnnnnnannnnaannnnnngnngnaancccnnncnnttnnnncnnntnnnnnannnnnnnntnnntnnntnnnnnaannanngnnnncnnnnnnntttnnnaaannnnnnnnannnnnnnnannnnnnnnnnnntnncnnnnantngnnnannnannnncnnnnggnncnnnntngnnnncnnnnnngnnnncnnnngnannccnnngnnncnnnncnnnntnnnnnnnntttnnnnnnnnannnnnnnnnntnncnncnnggnnnnnngnnannnnnnnnnnnnnnntnnnccntnnnnnntnnnncngnnnttnnncnncnnnnnnntnannnncnncnantncnnntttnccnntttnntnnnntnnggnnnnnnnnnnnnnnnntnnnnnnnnttnnannnnccnannnntttnnnnanngnnnnnnnnntnnnnnannnnncnncnnnncnannnnnnntnannnnaaannnnccnnnnnncnnnnncnncnncntnannnnntnntnnnncnnnntnntnnnnncnnnnnannaaantttnncnncnnngnnnnnnnncnncnngnngnantncnnngnccnncnnanntnnangnnngnnnnnnncnaantnnnnannnnaannnnnntnnnnnnntnnnannnnnaangnntnnnnnttngnntncnannnntnnnnnngnnnncnaaanngnnnncnnnntncnannantnnngnnnnnantnnnntnnnnnnnncnnnannnnaantnccnnnggggnnnntncnnnnnnggnnnncnnaannnnnnnnnnnnccnnccnnnnnnnancnnnaantncnnnnnnnngnnnnnnncnntnnangggnnnnnnnnnnnnntnncnnncngnnncnngncnancnnnnnnnnncccnnnnnnnnnnnnnncnngnnnncnnnncnncnnnnnnnnnnngnngnntncnngnnnncngnannannnnnntatccgcaagttaccgccaaaaattcgcaaccaaacgggagcagcggcccatgacgagccgctatcttggttctcaaagatgagaccaaatttaatcaaaatcaccgtgaccgccgcagcgagtttttttggcttaacgactcatttgcgcgcgcaggaggtagcaactgttccggaagtggaaatcaccggaaccgctccgggcgttcttcgccaagagttacaggtaggccagtacgggcagccggagtggacgacagagcgcgccttcagcaacagccgcgtttatgtgcggccggcngggacgcttgagttcaaccagttctggactccagaatttgccgaaggccacgtcacacacagctttcgcgaggaagtcgaaatcggcttgccgtatcggtttcaactcgatctctatcagaactggggcatagaacgaggagacgccttctacaaaggctcaagcgtggagcttcgttatgcgcttgctaactggggaaaaattccgctaaacccgaccctttacggcgagtggagctttaatgacaatgcgcccgacgtatgggagctcaagctgctgcttggtcaaacattcgcccatcgttggaactgggccgctaacctcacatatgaacacgaaaatggagggccgcgcgaacgtctgttcgagatgagcagcgcgctgacctatgcgctaattgatcagaccctcaacgtcggcatcgaagctctctttgaacacgccacggaggccggctcgcggagtgatcctacgtacgaattcctcatcggcccgagtgtcaaccttcgacccacacgcaatacttttgtcacggtatcgccacagttcggcgtaacccacgactcgccggacgcgaaggtgtttgtcatcgcgggatttaacttctctttcggtgggccgcgcgccccgagagaagaaggcattcgagcgcctgcctcaatgttcgggcgctaaacatcgagaaatggtgtggccttatcacgcaatttttcggtgtgcgcacgggattcgtgagctgccgcctagttcggctgacctgttcggttttttgctttgacgcaaatttcctacttgtacctcgaagctgcatacgaacacgctccggaagcgacctcgtcgggccgtgcgtttgcgagtctcttcgaaacagcggtagtgaactcaggttcaacaacccctcttgcctggcaagcgattccgggatgtggcaaccacatacatcgcgtggcgaaatgtgctgccgcggtcttgctcgcttgacgctggattgcagcgtcatcgggagcgcgcctagagcaacgcggtgctatcgcgagcctttctccgcgtatctcgccagcacccagcagagatcagaaagccggttgaggtaacgcaagatctccggattaagatctttctctccggcgcctaatgtggcgatgcgccgctctgctcgccgacatgttgtgcgggcaaaatcgatcgcagcggacaagggtgttncacctggtataacccaatccttcgaataaagcgacttgtctttctcaagctcggaaatgactccggtgatccgatccaccatctccgttgtggtaagatgaaacccatctttgacgtagcgttcccggtcgcctgtcgccgtcgccagctcacccatgacgacgatcaaatctttttgtgcagctaaaatctcgcctgaaatgaatttgtccgttgaaaatgatcgggcgagaccaagcgcggcggtgagctcatcgatacaaccgtaagcatcaacgcgcggatcagctttcgacaggcgccggccatacataagggaggtttcacccttatcgccctttttggttacgatcgacatccgccaaactgtaggccgtttatgcaaactcggagccgacacacaggccctaccatctttgctggcgagccgtgttttatccgatcgcaggttgcggctcagcttcttccatcactggcgcgccaatcggctcgcctttttcgatcagcttgatctggcgatgctcggggaacccggtgccggccgggatcaagtgacccatgatcacgttttccttgaagccacgcagcttatcgactttaccgagcgtggccgcttccgtgagaacacgtgtcgtgtcctggaacgaggcagcagaaataaagctgtccgtttcaagcgaagctttcgtgataccgagcagtacaggaagggcttccgctggtttgccgcccttctcgaccacctttttgttctcttcctcgaagtcgagcttgtccacctgatcgccccagagcaacgatgtgtcac

SEQ ID NO: 1157 - DNA, 4000 bp, Escherichia coli
  misc_feature (833)..(833): n is a, c, g, or t
  misc_feature (839)..(839): n is a, c, g, or t
  misc_feature (848)..(848): n is a, c, g, or t
  misc_feature (860)..(861): n is a, c, g, or t
  misc_feature (872)..(872): n is a, c, g, or t
  misc_feature (881)..(881): n is a, c, g, or t
  misc_feature (884)..(884): n is a, c, g, or t
  misc_feature (892)..(892): n is a, c, g, or t
  misc_feature (896)..(896): n is a, c, g, or t
  misc_feature (899)..(899): n is a, c, g, or t
  misc_feature (901)..(901): n is a, c, g, or t
  misc_feature (907)..(907): n is a, c, g, or t
  misc_feature (911)..(911): n is a, c, g, or t
  misc_feature (962)..(962): n is a, c, g, or t
  misc_feature (983)..(983): n is a, c, g, or t
  misc_feature (989)..(989): n is a, c, g, or t
  misc_feature (1001)..(1001): n is a, c, g, or t
  misc_feature (1004)..(1004): n is a, c, g, or t
  misc_feature (1064)..(1064): n is a, c, g, or t
  misc_feature (1096)..(1097): n is a, c, g, or t
  misc_feature (1139)..(1139): n is a, c, g, or t
  misc_feature (2190)..(2190): n is a, c, g, or t
  misc_feature (2358)..(2358): n is a, c, g, or t
  misc_feature (3334)..(3334): n is a, c, g, or t
gcgtcgctgcgggtcttgaagatgcgtacggcccagaggtatttgtctaatctgatcgcttccatttcgttttttcaattatatcgtacgggcaaaatccgatgtcgggaggctcggtggctccggcagattcggattttccgttgtgctgacgattcggggcaggatgtcggaacagagccgaagccggtagtgtgcggctgcgggttgtccgacggtcttcgaaccggaggtcggtagttgcatcgatccctcgggaacggcggtttcggtggggaagtgtcgcggactatttctcatagatgctttccgatttgggcatgtcgtgcgattgttcgtcgttctgtcggctgacgctcaagatcatgcccagggcgatagccgtgaagatcgtcgaggagccgccgcgtgagatgagcggcagggtttgtcccgtttcgggaatcaggtttaccgttaccatgatgtgcagcagcgcctggcaggtaatcaacagggccaatcccaggaccagcagacccggaaatgccgtgccgcaccgtcggaaaatttcgatggcacggaagaagatccacaggtagagcaacagcagcagcagcgccaggacgataccgtactcctcgacgaaaaaggcgtaggcgtaatcgctttccgggtggatcatctctacgcgcatggcgctctgtccggcgccttcgcccaggatgccgccgttgtggatggcgatcatcgaacgctcggtgtcggtcagctggtcgatcggcttttcggtttggggcttggtccagaggtcgatccaggtttccacgcggccgccggccgtttcgctgcgncccagnttcagcagnccggccagcatnncggcggcgaangccaggccnagnagtttcancagntcncngatccncacncgtccgataagcatcatcacccacgaggcgaagaagaccagcacggccgangaggtgtgggccgggaagatnactacncaggagagcagnacnggggccaggatgggccacgtgccctcgcgccagattttgcgctggtcggggcgcttccancgcagcgggttgagcgaggggatgatccgcannttgtcgatcacgctctgccggccggcgagctgccgggccagnaacagtacggtggcgaccttgagtgcttccgaaggctggaactggaaaggaccgagcggaatccagcgggcggcgccgttggtcgtggcgccgatgaaatagacggccagcgtcagcagaacgctgcctgcataggcgaccagcgccaggtggttgtatatccgggagttgatcttgtgtacgatgatgatcagcggaacgcagacgaaaaggatcagcagctgttggcgcaggaagtgggccgtcgaacgagccgtatgcgcatcgtaggccatcttcgccgtcgaggaatagaccaccagtacggaaatgacggccagtgccgcgataatgatccacagcaccttgtccccggcgaagagtttcatgccgggctcctgtccgggtgcgtcggtctgcacagtcgtaccctctgtgttcggattgccggccgttttctccgtctgtttttccgcttccatcttattatttcgcgtgttcggcgacccactgtttgaacagttcgccccggttttcgtaatttttgaagaggtcgaagctcgcacaggccggtgaaagcaacaccacgtcgcccggacgggaagctttgcgggccgcctgcatcgccgcgtcgagcgaatcggtcgaaatgatttcgggaattatgcccgtgaaactttcgaccagcttgcggttgtcgatgcccatgcagacgagcgtatgcactttttcgcgggcgaaccgcttgagcggctcgtagtcgttgcctttgtccgtaccgcctgcgatccagactacgggacgtttcatactctccagtgcgtaccacgtggaatcgacgttggtggctttcgagtcgttgatgtaggctacgccgccgatctctccggcgggttcgagccggtgttccaccggcgcgaagtcgtagatggagctgcggatgcgggtcggggatactccggccgcgagcgccgcgagcgccgccgccatagcattataagcgttgtgcagcccgggaatccgcattttggccgtgtcgatctccaccgactcccggccgaccgtcgcggtnaattttccgtccaggaggaacgcatcgcctgcgccgctcgccacggcgtttttggccgcgaaggggagctgcttcatccgcaggtcgtatttgggcaactgctgccagatcacctcgtcgtcgcccgaatagatgaagaagtcgcgcgaattctggttctgcgtaatncgcatcttggcatccacgtagttctggaaacagtagtcgtaacggtcgagatggtcgggcgtgatgttcgtcagcacgccgatatgggcgcggaaccggaacatgccgtcgagctggaacgagctcaactccagtacgtaccagtcgtaatcgccggtagcgaccgagtaggcgaaactctcgccgatgttgccgccgagggctacgttgtagccggcgtcgcgcaggatcttgtagatgagcgacgtagtagtcgtcttgccgttcgagccggtgacgcagatcgtccgggccttacccaggtagcggcccgcgaactccatttcggagatgaccggaatgcccgcttcgcggagtttgacgatcagcggcgccttgtccggaatgccgggcgacttgacgacctcgtccgccgcgaggatccgctcttcggagtggtgcccctcctcgtaggggacctgccactggtccagtttggctttgtagcggtcggcgatccgccccttgtcggagaggaaaacgtcgaatcctttcttcttggcgaggatcgcggagccgtagccgctgatgccgccgcccaggacaactatttttttcatggggttatcggattttaagcgttaccagggtaatggccgccagcagcagcgacacgatccagaaacgggtgacgatcttggtttcgaagaaaccctgtttctggtagtgatggtgcaggggggacatgagcagaatgcggcgtccttcgccgtatttgcgtttggtgtatttgaagtagctcacctgaagcatgaccgagaggctctcgaccaggaagatgccgcagagaaggggcagcagcagctccttgcggatgcagagagcgaagacggcgatgatgccgccgatggagagcgagccggtatcgcccatgaagatctgtgccgggaagctgttgtaccagaggaagccgaccagcgcaccggccagcgccgcngcgaagacgaccagttcgccgctgcccggaatgtacatgatgttcaggtagtcggcatagacgatgtgtccggagagataggccaggatgcccagcaccagtacgatcggggccgatacccccgtcaccaggccgtcgagtccgtccgtgaggttggcgccgttcgaaacggccgtgaccaccaggatcgccacgacgacgtagagaatccaagtgagggtgcggttgccgcccgtgagccagctgtaatcgaattcgttgtccttgacgaagggaatcgtggtctgggtcgtctgacggctctcggagctgacgatgcgccgctggatgtggtcggcgatggttcggccgtgttcgtcgaggtagatcgtttcgaccggttcggtcgtcttttcccggacgacgatgtcgggcgagaagcacatggtcgtacctacgataatgcccaggccgacctgtcccacgatcttgaaacgccctttgagcccctctttgtggtggcggaagactttgatgtagtcgtccagaaagccgatcagccccagccagatcgtcgaaaccagcatcagttggatatagacgttgtcgagctgtccgaaaagcagtacggggatgagaatggccagcaggatgattacgccgcccatcgtgggcgtgcctttcttc

SEQ ID NO: 1158 - DNA, 4000 bp, Escherichia coli
  misc_feature (2)..(3): n is a, c, g, or t
  misc_feature (5)..(10): n is a, c, g, or t
  misc_feature (12)..(12): n is a, c, g, or t
  misc_feature (14)..(16): n is a, c, g, or t
  misc_feature (18)..(19): n is a, c, g, or t
  misc_feature (21)..(21): n is a, c, g, or t
  misc_feature (24)..(24): n is a, c, g, or t
  misc_feature (26)..(26): n is a, c, g, or t
  misc_feature (28)..(33): n is a, c, g, or t
  misc_feature (35)..(35): n is a, c, g, or t
  misc_feature (37)..(37): n is a, c, g, or t
  misc_feature (39)..(40): n is a, c, g, or t
  misc_feature (42)..(42): n is a, c, g, or t
  misc_feature (44)..(44): n is a, c, g, or t
  misc_feature (46)..(46): n is a, c, g, or t
  misc_feature (48)..(49): n is a, c, g, or t
  misc_feature (52)..(52): n is a, c, g, or t
  misc_feature (54)..(54): n is a, c, g, or t
  misc_feature (57)..(57): n is a, c, g, or t
  misc_feature (61)..(63): n is a, c, g, or t
  misc_feature (65)..(72): n is a, c, g, or t
  misc_feature (74)..(75): n is a, c, g, or t
  misc_feature (77)..(77): n is a, c, g, or t
  misc_feature (81)..(82): n is a, c, g, or t
  misc_feature (85)..(85): n is a, c, g, or t
  misc_feature (90)..(90): n is a, c, g, or t
  misc_feature (96)..(96): n is a, c, g, or t
  misc_feature (101)..(102): n is a, c, g, or t
  misc_feature (104)..(105): n is a, c, g, or t
  misc_feature (110)..(112): n is a, c, g, or t
  misc_feature (114)..(116): n is a, c, g, or t
  misc_feature (118)..(118): n is a, c, g, or t
  misc_feature (120)..(124): n is a, c, g, or t
  misc_feature (126)..(128): n is a, c, g, or t
  misc_feature (131)..(131): n is a, c, g, or t
  misc_feature (133)..(133): n is a, c, g, or t
  misc_feature (136)..(142): n is a, c, g, or t
  misc_feature (144)..(144): n is a, c, g, or t
  misc_feature (147)..(147): n is a, c, g, or t
  misc_feature (149)..(149): n is a, c, g, or t
  misc_feature (151)..(153): n is a, c, g, or t
  misc_feature (155)..(159): n is a, c, g, or t
  misc_feature (161)..(161): n is a, c, g, or t
  misc_feature (163)..(163): n is a, c, g, or t
  misc_feature (165)..(166): n is a, c, g, or t
  misc_feature (169)..(169): n is a, c, g, or t
  misc_feature (173)..(174): n is a, c, g, or t
  misc_feature (176)..(181): n is a, c, g, or t
  misc_feature (183)..(183): n is a, c, g, or t
  misc_feature (186)..(186): n is a, c, g, or t
  misc_feature (191)..(191): n is a, c, g, or t
  misc_feature (193)..(196): n is a, c, g, or t
  misc_feature (198)..(198): n is a, c, g, or t
  misc_feature (201)..(202): n is a, c, g, or t
  misc_feature (205)..(205): n is a, c, g, or t
  misc_feature (207)..(207): n is a, c, g, or t
  misc_feature (209)..(209): n is a, c, g, or t
  misc_feature (211)..(211): n is a, c, g, or t
  misc_feature (213)..(213): n is a, c, g, or t
  misc_feature (219)..(219): n is a, c, g, or t
  misc_feature (221)..(221): n is a, c, g, or t
  misc_feature (223)..(224): n is a, c, g, or t
  misc_feature (227)..(230): n is a, c, g, or t
  misc_feature (234)..(234): n is a, c, g, or t
  misc_feature (236)..(236): n is a, c, g, or t
  misc_feature (238)..(242): n is a, c, g, or t
  misc_feature (244)..(245): n is a, c, g, or t
  misc_feature (247)..(247): n is a, c, g, or t
  misc_feature (249)..(249): n is a, c, g, or t
  misc_feature (254)..(254): n is a, c, g, or t
  misc_feature (257)..(257): n is a, c, g, or t
  misc_feature (259)..(259): n is a, c, g, or t
  misc_feature (261)..(261): n is a, c, g, or t
  misc_feature (264)..(264): n is a, c, g, or t
  misc_feature (266)..(267): n is a, c, g, or t
  misc_feature (269)..(269): n is a, c, g, or t
  misc_feature (271)..(272): n is a, c, g, or t
  misc_feature (274)..(274): n is a, c, g, or t
  misc_feature (277)..(277): n is a, c, g, or t
  misc_feature (279)..(279): n is a, c, g, or t
  misc_feature (281)..(282): n is a, c, g, or t
  misc_feature (286)..(287): n is a, c, g, or t
  misc_feature (289)..(289): n is a, c, g, or t
  misc_feature (292)..(292): n is a, c, g, or t
  misc_feature (294)..(294): n is a, c, g, or t
  misc_feature (296)..(297): n is a, c, g, or t
  misc_feature (299)..(302): n is a, c, g, or t
  misc_feature (304)..(306): n is a, c, g, or t
  misc_feature (310)..(311): n is a, c, g, or t
  misc_feature (313)..(314): n is a, c, g, or t
  misc_feature (316)..(316): n is a, c, g, or t
  misc_feature (319)..(319): n is a, c, g, or t
  misc_feature (324)..(324): n is a, c, g, or t
  misc_feature (328)..(329): n is a, c, g, or t
  misc_feature (336)..(337): n is a, c, g, or t
  misc_feature (339)..(339): n is a, c, g, or t
  misc_feature (341)..(346): n is a, c, g, or t
  misc_feature (348)..(348): n is a, c, g, or t
  misc_feature (351)..(352): n is a, c, g, or t
  misc_feature (354)..(355): n is a, c, g, or t
  misc_feature (357)..(357): n is a, c, g, or t
  misc_feature (361)..(362): n is a, c, g, or t
  misc_feature (372)..(372): n is a, c, g, or t
  misc_feature (375)..(375): n is a, c, g, or t
  misc_feature (378)..(378): n is a, c, g, or t
  misc_feature (380)..(383): n is a, c, g, or t
  misc_feature (387)..(388): n is a, c, g, or t
  misc_feature (392)..(393): n is a, c, g, or t
  misc_feature (395)..(396): n is a, c, g, or t
  misc_feature (398)..(398): n is a, c, g, or t
  misc_feature (400)..(402): n is a, c, g, or t
  misc_feature (404)..(404): n is a, c, g, or t
  misc_feature (408)..(408): n is a, c, g, or t
  misc_feature (417)..(419): n is a, c, g, or t
  misc_feature (422)..(424): n is a, c, g, or t
  misc_feature (429)..(429): n is a, c, g, or t
  misc_feature (433)..(438): n is a, c, g, or t
  misc_feature (442)..(442): n is a, c, g, or t
  misc_feature (444)..(445): n is a, c, g, or t
  misc_feature (447)..(447): n is a, c, g, or t
  misc_feature (450)..(450): n is a, c, g, or t
  misc_feature (453)..(453): n is a, c, g, or t
  misc_feature (455)..(455): n is a, c, g, or t
  misc_feature (458)..(458): n is a, c, g, or t
  misc_feature (460)..(460): n is a, c, g, or t
  misc_feature (463)..(464): n is a, c, g, or t
  misc_feature (469)..(472): n is a, c, g, or t
  misc_feature (476)..(479): n is a, c, g, or t
  misc_feature (481)..(484): n is a, c, g, or t
  misc_feature (486)..(487): n is a, c, g, or t
  misc_feature (491)..(493): n is a, c, g, or t
  misc_feature (497)..(498): n is a, c, g, or t
  misc_feature (500)..(504): n is a, c, g, or t
  misc_feature (506)..(506): n is a, c, g, or t
  misc_feature (508)..(510): n is a, c, g, or t
  misc_feature (512)..(512): n is a, c, g, or t
  misc_feature (514)..(518): n is a, c, g, or t
  misc_feature (520)..(520): n is a, c, g, or t
  misc_feature (523)..(523): n is a, c, g, or t
  misc_feature (526)..(527): n is a, c, g, or t
  misc_feature (529)..(529): n is a, c, g, or t
  misc_feature (532)..(533): n is a, c, g, or t
  misc_feature (536)..(536): n is a, c, g, or t
  misc_feature (540)..(540): n is a, c, g, or t
  misc_feature (543)..(546): n is a, c, g, or t
  misc_feature (551)..(552): n is a, c, g, or t
  misc_feature (555)..(557): n is a, c, g, or t
  misc_feature (561)..(561): n is a, c, g, or t
  misc_feature (563)..(566): n is a, c, g, or t
  misc_feature (570)..(571): n is a, c, g, or t
  misc_feature (573)..(573): n is a, c, g, or t
  misc_feature (577)..(579): n is a, c, g, or t
  misc_feature (582)..(582): n is a, c, g, or t
  misc_feature (586)..(586): n is a, c, g, or t
  misc_feature (588)..(588): n is a, c, g, or t
  misc_feature (590)..(597): n is a, c, g, or t
  misc_feature (600)..(601): n is a, c, g, or t
  misc_feature (603)..(603): n is a, c, g, or t
  misc_feature (606)..(606): n is a, c, g, or t
  misc_feature (608)..(608): n is a, c, g, or t
  misc_feature (610)..(610): n is a, c, g, or t
  misc_feature (612)..(613): n is a, c, g, or t
  misc_feature (616)..(616): n is a, c, g, or t
  misc_feature (618)..(618): n is a, c, g, or t
  misc_feature (620)..(620): n is a, c, g, or t
  misc_feature (624)..(625): n is a, c, g, or t
  misc_feature (627)..(627): n is a, c, g, or t
  misc_feature (629)..(629): n is a, c, g, or t
  misc_feature (631)..(631): n is a, c, g, or t
  misc_feature (633)..(634): n is a, c, g, or t
  misc_feature (643)..(643): n is a, c, g, or t
  misc_feature (646)..(647): n is a, c, g, or t
  misc_feature (649)..(651): n is a, c, g, or t
  misc_feature (654)..(658): n is a, c, g, or t
  misc_feature (666)..(667): n is a, c, g, or t
  misc_feature (669)..(669): n is a, c, g, or t
  misc_feature (673)..(674): n is a, c, g, or t
  misc_feature (676)..(676): n is a, c, g, or t
  misc_feature (682)..(682): n is a, c, g, or t
  misc_feature (684)..(684): n is a, c, g, or t
  misc_feature (686)..(687): n is a, c, g, or t
  misc_feature (690)..(694): n is a, c, g, or t
  misc_feature (705)..(706): n is a, c, g, or t
  misc_feature (709)..(710): n is a, c, g, or t
  misc_feature (1190)..(1190): n is a, c, g, or t
  misc_feature (1992)..(1994): n is a, c, g, or t
  misc_feature (1996)..(1996): n is a, c, g, or t
gnntnnnnnntngnnngnngngtnanannnnnncntncnntntngntnntgntnggntccnnntnnnnnnnngnngnttgnntgnagttnggtttnaaaannannttccnnncnnntngnnnnntnnncantnaannnnnnnantgntngnnngnnnnntngntnnttnaagnngnnnnnnangtnaaggntnnnntnganntancntncntnttgggntngnnggnnnnaaantnannnnngnnantnccttnttnancnacnannananncnaangnanntttnnanttncngnntnnnntnnnaaannanngnttnctttntttnncttcaanngnannnnnncnttnngnntnaaannctttttttcnttnggnannnnggannattnncnnangnnncnaccnccggatttnnnttnnngtttncaannnnnncccnanncnctnacngnaangnttnnatttnnnnattnnnncnnnntnntaannnggtnnannnnntnannnantnnnnntnccngtnntncannaantttngtnnnnggagnntannnaatnannnntttnngnattnnntcntttncntnnnnnnnnttnnanggnantnannccnananaatnncnantnannaaaaacaanttnntnnnatnnnnntaaaaaanntnttanngntatttnanannaannnnntcaaatttgtnnttnnaaaaataaacgatgtgtttattagtagttttaaaagaatcataaagaatctaattctgtgatgaaatatatagtgacgttatttccattcgatagtgacgatattccatagatatggtgacactatgttgagggcatagcgtcactatatttttatgagatttattttttcggaaattctcaaaattcccaaatcttttcagattttcccctcatctttgcaatataaattaaatgataacagtaaaaccaattaaaaaaacaacgattatgaaaaagttagtattcttattagtatgtttgtttactttgcaaacagtagcacgtgcagacgatgacaaaccaatccaggttactcaaatgccacaaccggctcaacagttcatcaaacagcattttgccgatagtaaagttgctttggcaaaaatggaaagtgatttcttctataaaagttatgaagtgattttcacgaatggcaatnaagtggagtttggcaagaatggaaactgggaggaggtgaattgcaaatatacttctgttcccacagctattatccccacaactattcagaaatatgtgacaactaattatcctgatactagagtgctgaaaattgaacgcgataaaaaggaatatgaagtgcaactttccaatcgtgtggaattaaagttcgatctgaaattcaatttgatcgatattgataactaaaccttaaaaaattagaactaatgatgaaacgaaagatttttacctttttattggtattaggtgttgcatggagcttacatagttgcgataataatgatgatgaatcaatagctgttcctgttgaattgcaaagtacattttcggctaaatatccgaatgccacaaacgtagaatgggaaaacaagtacggatattacgtagcagatttctatgacggacatgaagcatctgcatggtttactcaagaaggtaagtgggttttaacttcatgggaggtacatttcaacacattgcctgatcctgtaaaaaatacgattcatgctacatatcctggacgagttgatgacgacgacactgaatatgttgaagaagcaacgggtgctacatactacttgattgacatagaaaatagtgagatagatgtaaaaataagagctgacggacaaatacttgactaataattatacaataatcttattatggaacggtaacgaactattcatttatagtttcaggtagagtcaatcatgcgattattttttatgggtttcatgccttgaaaataagagtttccnnnanagaaactcttattttcaaggcatctgcgttttatcactgctcatgttgcctttttaatacagactttgctgtattggtatttccgatactgtctgtctgctgtttggacttttctttctgttttcgtttattacgtagcttccacttattccaaaagaacaggtcactccatttattgaaatctttcttgtacataatacctacaccttgtgtagtcagatttgtctttgtataatatcggtcgttcgtttcattgtaagctttcaaacgaatgtctcccgaacggtttatcagccattctgcttcaaagtcgcccacaaaattcgtgtttgccattggattatcccgataaccaaagtttccgttaataagtaaccggttattcagtaactgaccggacaagatgccttccacttccatatctgtccagcctttatcgcctgtgcttagatttgttccaatattccagttattcgtttcaaagacttgcgacaaggcgttattcaactgaccggagagggtggaagaaagtaccgaagacatcacgtttgaattttgattattacgtgcatcctccgtgtagaacttaccaatacccaatagataaaggatttgcatattcatctgttcttccgtactaatataattacgtaccaatgtttgtacttcatcccgttcgttcggaagctcaatacctaatttaatagtaggtcgtaccaatatcccgctcaaattcatgatacagttcaccttaacattgggttgttgtatgattgacgaagattcttccggtatcaggtcattcagagatgctgaatttaccgtgtaggaagcctgaatgtctaagtttgcatccagaggggcaccgttaaaggtaatcgtacttccgttcttgataacaaagtctttacggatcacttcctgcaaactgaatttatatactccctgattaatttggtagctaccgaacatcttcacatcccctttattgtaaaattctgttcgtatatttcctgtacccttgccactgatataatctccggcaacaggatccatgataatcttcattgttgcatctggcgtcgcatctacaagaatattcaatcgtatatccgtcttttgctcttcctcagcttcctgacgtttttgttgcaattgttcataataagaaattatttgaatagaatcctgaatagtgcggcggggagttttgtctacaaacttgataaactggttactcgtagctgatgcaacactaccattaatataagtaaagatgctatttcgattggtcgtcatggcgacattaacatctagtccctgtatggcatttccggtaagcaatgcatttccggtaccatacaccgtgccatagaaaggcatgtccgtcgattcttttgtattcattacaagcatgttgtttgcttgtatctcaaaacgataatttaagttcttaaaatgctggaaatgcagataaccgttcattcttcccgaatggccttccatatcagaaatatgtatattgttgaacgtcaatccggtaggagctaaaagaatggtatcctttatagcaaaatgagtattcaaaatatcaaaattcatggaagcatccgtcatgactgcgccatcgagattcaatcctttaaatttcccgtagaagtgtactttacccgttgcccgtccttttatatcatttgcaatagacttcatataatgttccagaaacttcagattcagttcatttgcttcgatatttaagtcaagcccactttccggttttagcggatgaatgatgccggtgacacgtgacggggtcgtagaaatatctttgatagatgcatccagtcggattcctctattttcattatcccattcgccatatatgttcaaatcgcccaaacgtccttgattaagagagaaattttttataaataaacgcgtattcatcacaggttttttgaaaacaccacttgcataggcagttcctgtagcatctccttcaaa

SEQ ID NO: 1159 - DNA, 4000 bp, Escherichia coli
  misc_feature (1)..(3): n is a, c, g, or t
  misc_feature (5)..(6): n is a, c, g, or t
  misc_feature (8)..(13): n is a, c, g, or t
  misc_feature (15)..(16): n is a, c, g, or t
  misc_feature (18)..(24): n is a, c, g, or t
  misc_feature (28)..(30): n is a, c, g, or t
  misc_feature (33)..(49): n is a, c, g, or t
  misc_feature (52)..(60): n is a, c, g, or t
  misc_feature (62)..(69): n is a, c, g, or t
  misc_feature (71)..(72): n is a, c, g, or t
  misc_feature (75)..(78): n is a, c, g, or t
  misc_feature (80)..(80): n is a, c, g, or t
  misc_feature (84)..(88): n is a, c, g, or t
  misc_feature (90)..(91): n is a, c, g, or t
  misc_feature (93)..(94): n is a, c, g, or t
  misc_feature (96)..(97): n is a, c, g, or t
  misc_feature (99)..(118): n is a, c, g, or t
  misc_feature (120)..(132): n is a, c, g, or t
  misc_feature (134)..(134): n is a, c, g, or t
  misc_feature (136)..(143): n is a, c, g, or t
  misc_feature (145)..(146): n is a, c, g, or t
  misc_feature (149)..(150): n is a, c, g, or t
  misc_feature (152)..(158): n is a, c, g, or t
  misc_feature (160)..(167): n is a, c, g, or t
  misc_feature (169)..(174): n is a, c, g, or t
  misc_feature (179)..(182): n is a, c, g, or t
  misc_feature (184)..(191): n is a, c, g, or t
  misc_feature (193)..(193): n is a, c, g, or t
  misc_feature (195)..(196): n is a, c, g, or t
  misc_feature (200)..(205): n is a, c, g, or t
  misc_feature (208)..(213): n is a, c, g, or t
  misc_feature (215)..(215): n is a, c, g, or t
  misc_feature (218)..(223): n is a, c, g, or t
  misc_feature (226)..(228): n is a, c, g, or t
  misc_feature (231)..(236): n is a, c, g, or t
  misc_feature (239)..(239): n is a, c, g, or t
  misc_feature (242)..(248): n is a, c, g, or t
  misc_feature (250)..(256): n is a, c, g, or t
  misc_feature (258)..(268): n is a, c, g, or t
  misc_feature (270)..(272): n is a, c, g, or t
  misc_feature (274)..(276): n is a, c, g, or t
  misc_feature (278)..(286): n is a, c, g, or t
  misc_feature (288)..(288): n is a, c, g, or t
  misc_feature (290)..(291): n is a, c, g, or t
  misc_feature (293)..(304): n is a, c, g, or t
  misc_feature (308)..(308): n is a, c, g, or t
  misc_feature (310)..(311): n is a, c, g, or t
  misc_feature (313)..(313): n is a, c, g, or t
  misc_feature (315)..(317): n is a, c, g, or t
  misc_feature (319)..(319): n is a, c, g, or t
  misc_feature (321)..(321): n is a, c, g, or t
  misc_feature (324)..(324): n is a, c, g, or t
  misc_feature (326)..(336): n is a, c, g, or t
  misc_feature (338)..(341): n is a, c, g, or t
  misc_feature (343)..(348): n is a, c, g, or t
  misc_feature (351)..(369): n is a, c, g, or t
  misc_feature (371)..(371): n is a, c, g, or t
  misc_feature (375)..(382): n is a, c, g, or t
  misc_feature (384)..(399): n is a, c, g, or t
  misc_feature (401)..(401): n is a, c, g, or t
  misc_feature (403)..(407): n is a, c, g, or t
  misc_feature (410)..(412): n is a, c, g, or t
  misc_feature (414)..(418): n is a, c, g, or t
  misc_feature (421)..(423): n is a, c, g, or t
  misc_feature (425)..(425): n is a, c, g, or t
  misc_feature (427)..(427): n is a, c, g, or t
  misc_feature (429)..(429): n is a, c, g, or t
  misc_feature (431)..(432): n is a, c, g, or t
  misc_feature (434)..(434): n is a, c, g, or t
  misc_feature (436)..(436): n is a, c, g, or t
  misc_feature (438)..(438): n is a, c, g, or t
  misc_feature (440)..(441): n is a, c, g, or t
  misc_feature (443)..(443): n is a, c, g, or t
  misc_feature (445)..(445): n is a, c, g, or t
  misc_feature (447)..(447): n is a, c, g, or t
  misc_feature (449)..(450): n is a, c, g, or t
  misc_feature (452)..(452): n is a, c, g, or t
  misc_feature (454)..(454): n is a, c, g, or t
  misc_feature (456)..(456): n is a, c, g, or t
  misc_feature (458)..(459): n is a, c, g, or t
  misc_feature (461)..(461): n is a, c, g, or t
  misc_feature (463)..(463): n is a, c, g, or t
  misc_feature (465)..(465): n is a, c, g, or t
  misc_feature (467)..(467): n is a, c, g, or t
  misc_feature (469)..(478): n is a, c, g, or t
  misc_feature (481)..(483): n is a, c, g, or t
  misc_feature (485)..(485): n is a, c, g, or t
  misc_feature (487)..(487): n is a, c, g, or t
  misc_feature (489)..(490): n is a, c, g, or t
  misc_feature (492)..(493): n is a, c, g, or t
  misc_feature (496)..(496): n is a, c, g, or t
  misc_feature (498)..(500): n is a, c, g, or t
  misc_feature (502)..(513): n is a, c, g, or t
  misc_feature (515)..(516): n is a, c, g, or t
  misc_feature (518)..(520): n is a, c, g, or t
  misc_feature (522)..(522): n is a, c, g, or t
  misc_feature (524)..(537): n is a, c, g, or t
  misc_feature (539)..(540): n is a, c, g, or t
  misc_feature (543)..(544): n is a, c, g, or t
  misc_feature (547)..(556): n is a, c, g, or t
  misc_feature (558)..(559): n is a, c, g, or t
  misc_feature (562)..(564): n is a, c, g, or t
  misc_feature (566)..(588): n is a, c, g, or t
  misc_feature (590)..(592): n is a, c, g, or t
  misc_feature (594)..(596): n is a, c, g, or t
  misc_feature (598)..(598): n is a, c, g, or t
  misc_feature (600)..(610): n is a, c, g, or t
  misc_feature (612)..(624): n is a, c, g, or t
  misc_feature (626)..(632): n is a, c, g, or t
  misc_feature (634)..(635): n is a, c, g, or t
  misc_feature (638)..(650): n is a, c, g, or t
  misc_feature (652)..(688): n is a, c, g, or t
  misc_feature (691)..(694): n is a, c, g, or t
  misc_feature (821)..(821): n is a, c, g, or t
  misc_feature (848)..(848): n is a, c, g, or t
  misc_feature (1427)..(1427): n is a, c, g, or t
  misc_feature (1686)..(1686): n is a, c, g, or t
  misc_feature (1976)..(1976): n is a, c, g, or t
  misc_feature (1991)..(1991): n is a, c, g, or t
  misc_feature (3578)..(3578): n is a, c, g, or t
  misc_feature (3659)..(3659): n is a, c, g, or t
  misc_feature (3758)..(3758): n is a, c, g, or t
  misc_feature (3788)..(3788): n is a, c, g, or t
  misc_feature (3809)..(3809): n is a, c, g, or t
nnncnngnnnnnngnngnnnnnnncgcnnncgnnnnnnnnnnnnnnnnncannnnnnnnngnnnnnnnncnngcnnnngncgannnnnanncnnanncnnnnnnnnnnnnnnnnnnnntnnnnnnnnnnnnncnannnnnnnncnnagnngnnnnnnnannnnnnnncnnnnnntgccnnnngnnnnnnnncnannatcnnnnnnccnnnnnncnccnnnnnncannncannnnnntcnggnnnnnnnannnnnnncnnnnnnnnnnngnnnannngnnnnnnnnncncnncnnnnnnnnnnnnggtncnngncnnncncngcncnnnnnnnnnnncnnnncnnnnnncgnnnnnnnnnnnnnnnnnnncngccnnnnnnnngnnnnnnnnnnnnnnnncngnnnnngcnnngnnnnngcnnngngngngnngngngngnngngngngnngngngngnngngngngngnnnnnnnnnngcnnntncntnncnnacntnnntnnnnnnnnnnnncnngnnncncnnnnnnnnnnnnnncnnacnnacnnnnnnnnnngnntgnnngnnnnnnnnnnnnnnnnnnnnnnngnnngnnngngnnnnnnnnnnncnnnnnnnnnnnnngnnnnnnntnnggnnnnnnnnnnnnngnnnnnnnnnnnnnnnnnnnnnnnnnnnnnnnnnnnnncgnnnntcgccctcctcgtatgcgcgtgtatgtgcgcacggtgtgccccaatcaccaaaaacatcgtaacgcgacaaatctaaattcacgagtgcgcgttgcgtcctatcctaaaacgcgcaccaacaactcngtggtgtagctgtaggttcccaggtanactgtgccgcctaatgccatgtaaacggttcgtggcagaacgccgcgccagaagccggcaaagccctcgacgcgcgcgagcgcgagcaccgtcttcgggagagagcgccgctcgcccggtttcaccgtccagagaacgtggcgcgtgcggatcacatcgaggggcgtcgtgaggaaggctgcgagcgcgccggcgcacgcgcctgcgagtgccccgtcaagggcgcgcggagaggcttcgacgccgtcggcgcgcgcgccgtgcgcgccgctgcccgtgcggaggcgcgagatgtggtgccggagcgcctcgtagagcgggaattggagcagcgcaaaaggcacatcgaggcaaagcgtcgcgccaagcccacgatagaaagtacagatgccgccctcggcccaggtcagacgcacggctccccaaagggagctgccgccgcccgcgcccgactgcatcttcatcttgatcagatcggcgggaacgcgaagcatgcagctcgatgcctcggcggtcgccgcagccacgcagcacgccgacgtcgagtcagaacctagccagttcttgacgccctcatangtgcagaagaaggcggcggcggaagggatggccggcaggacggccgcaccgataccgcgccaaagcgtgctcacctgtcgcaggcgctcgagcagcgtgccccgcatcgcgaacatcgggagcccttggatcgcccgagtcttgaacgtatccacaggatagagcgcgccatcgatggtcatcccagcgagaccaccagagagcaacgcgacgagctgtgacacctgctgcgactgctgcgacggcggcagcggcggcnacacgttcagtgacggcggtgctgcgggagattctgcagacgccttcgccgttgccgccgctaacggctcgagcacagcacaggcatcggcgctcgccagtggcagccgctgcagcgtgtctgcatgcgacggcggctgccgcgaagcaggcggcaactgcgacgacggcgggcgcgcgaggccagcagccaaactgaatgccttccacgaagtctgtgcatcggcgcccgatgggctctgcaccgtgagcagcagtgtcctcagcacggcctcatacacaccaaaaaanatgtaaccgcccaangccatccagccgacgcgcggcacgaagcccgagaagagcgcactcacgccgtgcatgcgcacgatctcctcgatctcgcgcagcagcccatggcgcgagtgcccgagcattcggcgcgtcttgagcacgtcgagcggcgtggtgaccgccgcggcgaccgagcccgcgaccgagccgcagagggcaccctgcgagggtgtgacgtcgccgcccgctccgacgagccgtttgagctgctcatagatcgggaactggatgaaagcgaaggggatctcgcgcgcgatggagatgctcagcccactgtaaaaggccaacggaccgccctcgagcgcgatgccgcggatggcggcgcgcaagccggaaaactggccaacctgcatccgctgctgcacgacaacggccggattgcgcagtacgctgctcgacgtcgcgccgatgcacgcggccgtcgcgtccatcatccagtgtggcacttggtgacgctcgctggccggctgccgctgtatcagcaccgagcgtgcgaactcatacgtgccaaagaagagggcgcctccgggagcggcgcccgcagcggcggcggtcacgccggagtagaggttgcggtagccgccggccgcgcgaaaaccgagtggtgattgcaacctcgtcttgatcgtgtccagcgggaagatggccacgtccacggccgacgaagcgcatccaccggcgagcaccgcaatcgcgaaggaaggggcatccactcccttcatgggagacccagtgccaaaccagcccgtgccggtgctgcccgacgtggaggcatccggccgacgtataacatcgacaaactcgggctccatctgagttcgacgcaggcgtcgccgtgccagacgagatggagtgcaagaggagttgagagatttcaaacaggccttgctttttcgtccgaggtgtgaatgcaaaacatcaaaaactgcgccggaccctccctgcactcccaacacaccagctacccccgagaccctacagtgaccactcatgtaaagcgtagatgtgcctattcgtcatcaagatttgcgcagtgatgttatggacccccaatgtgctcgtcatcttaagacctccccatacacgtgagccattcgctcaccatgcatgatcttcttgggtcacccgcctgcctgccccctttccgctcaattcttgcgctcgtgggccgggatgaagtcggacatgtccttggcgcacacatacaacgtgtggaagtacttgaagaactcgtccttgctcagccagaagatgccatcgtcggccacgaccggcttcaggaacgccttgacctgggggtacttttcccagccggggccgtcgtcatcaaactcaccattctcgatctcgcccttgccccaaggattgcgcatcttgatgaggtcgacgtccgtgccagccacgtcgttgacgcactcgagcaccgtgtacgcatgcccatcgacgatgccgtcggtggactgcgtgtccgagcccgccttcgtgcccgcggcgatgacgaagttggcgtcgtcccacgcgcacatgcgcatgaagagctcctcctcgtcgagctggagngtatagctgccgccgccgccgaccttgggccacgcgctcggccagagcccgcggaagcccttttgcggcgagttctcgagngcctcccacctcctctcgttggggttgaacttgctcaggcagccaaacttgccagtcttgcctttgcgaatggtgtactgctccttgcagcccgtgagnatgctccacgcgtgcgtgcactggccgccntcgatctcgtcccagccgccncagtggatcgcgaccgccttctcgaggtagcacacccacagctcgccatcgtggctgggcgagcatccaaggagcccgtcgcccgtcgccttggccgcaaggcgctcgtcgaccaccacgtcgacctccgtccaggtcgcgaggtcccacagcgagatcgtgtacttgttcgggccctccctgggcatgct

SEQ ID NO: 1160 - DNA, 4000 bp, Escherichia coli
  misc_feature (10)..(10): n is a, c, g, or t
  misc_feature (349)..(349): n is a, c, g, or t
  misc_feature (971)..(971): n is a, c, g, or t
  misc_feature (1224)..(1225): n is a, c, g, or t
  misc_feature (1987)..(1988): n is a, c, g, or t
  misc_feature (1990)..(1990): n is a, c, g, or t
  misc_feature (1993)..(1993): n is a, c, g, or t
  misc_feature (2045)..(2045): n is a, c, g, or t
  misc_feature (3202)..(3202): n is a, c, g, or t
  misc_feature (3580)..(3580): n is a, c, g, or t
  misc_feature (3967)..(3967): n is a, c, g, or t
tccgtctttntgcggtatccacaagggcgtactcccgtacttctcggtaaattccgccgacgggtcccacacggccccgaaataatgcataggtatcaagcataagtctacttttacttgatttaaaaaggctgaaacaccccattcacgagtacggcccaagcgtgcgtctacaggaaaaaaggccaaatccgtttcaccgatatccagtcgactcatttcccgtgcaaacagtttatccgcttctcgtctgtcagcttcagtatctccgtcccaatgccagtgattcaaatctccggcatgaaaaattcgtaacccgtccgtttctacataaaaggagcctccttcntcggtagagccgaactcatgcacatatacattatcttcacgccactcttcataaggcctcagaacgactgtttttttgtccttccacgccgataacggtacggttgcatccgtaatacgtcgagccgtcacatccgaaaaattgactatatacggattgaagtgatcggcatgactatggctgacaaaaaaccaaaaaggcttttcccctgcctgtaatctcggcaataccttttccggatccttataataatcaaaaatcagtaccttcgtatccgtttcgactgcaaaaccgctatggttcaaataatacactttcacaaaagtcattaattcctccggcatcaaaatagtacctgctactatcactatattataacaatcagaatgtaaagactcaacacctatgcccattccggtacatgagagtttgtcgacgtttctcgttgggaatatatctaaaaacacccctcccgaaaaaagcttcggaaatttttatttataaaaatacagtctgaaccaataccatatagcacaaggtaccgacaaacatgctgataagaaagtttttcttatataaatgaaccccaacggttacaatcagtgccagcccttcaggaatnccgtttggccaagtcataagactgacgtccttcaacgcataaacgaccaacatccccataacggcggccggcaacacctctcctaaatacgtaacgacatcaggcaacttcccgtcccgtttatgggcaaaaagtaaaaagggcgagaaccgtgtaacccaggtaccgaaagccactataaagattgtccacatcatctgttcactagtcatcatgagcaatcccccctaagcggtaacgtagtaaaaacacnnaaagtatacccgccatagccggtatcagaaaggaagcgggaccgcatatgaatagggctaccaaggtaatagccagccccataataccgcattttgccgatttggagcggcacagatccaaaaaaagaacaacaaacatagctgtcaacacaaatccaatccccttaagcggcaaaaaggtcagtgtacttccggctatagaaccgattaaaacacccataaaccaatatgcctgattcagcaatgtaacccaaaaataaaaccaaccttcatcaatattttcagggacctccgtagttacattaacagcaaagctttcatcacacatcccataaatgaggtacggtgttttccaaccttttcccctatacttaccgagcatcgtgatcgcgtaaaataaatgcctaccatttaccataagagccataataaaggctcccacgggatcaaagggttgaaataacagcgtcactgtaataaattccatagacccggcaaaaataagcaaacacataataagggggtaccctaaaggtagcccctgtgaaacggtaaataacccgtacgtaaggccaataaataaaaaaccggcagcaataggcacagttagtggaaaggcaaatcgtaatgcccgtaaaacagtttgtgacaacatgattgtctccttccattactttataagatataacgtacatcaaaaatcaggctaaatcaatagatatacaaactaccatagcataggagaaaatcataaatatactnnanttntgaaaatatattttattcttgacaattcttataacgacgtatagaattacanttaatttcacaagtacatgcaatgaccgaaacaagtacacatatgtacgggtcacacagagagtatcggccaccggctgaaaaccgatacagcagcccacttatgtcgaatgccttcgggagcaggattatcgaacaacagtagatagtcccgtatgactgacgttacaagtccttgagtggtaatcaatatatgattacaatcagagtggaaccgcggattcgacgtctctgtgagacgacgggtctttttttatacccttttatcaggaggttgtactacgtgttttcaagattacgtaaagatattcaagtaatcaaagatcgagatccggctgctaaaaacgtggcggaaatcttgctttgttacgccggtctgcacgcaatttgggcacacagactctctcattttttttaccgtcacggttattttgttacggctcgccttatttccaacatagcccgcttctttacaggcatcgaaatccatcccggtgcccgcatcggcgaaggacttttcatcgatcacggtacaggcattgtcattggagaaacaacgattatcggcaataatgtatcactctaccagggggttaccctcggcggcacaggtaaggaaaaggggaaacggcacccgaccatagaagacggtgtggtcgttgccagcggagccaaggttctcggttcttttaccgtcggagaaggctcaaaaataggtgccggctcggtcgtcttaagagaggttccgccatattcgacagtcgtcggcattccggggcatatcgtttcacagcggggcaagcgaattcgccgagtacttacggaacaggatattgacttggatcataccagtcttcccgatccgttggaagaggaaattgccgagctgaagcaacaagtgtgctttttacaaaagcgcctgaatgatttggactcatggaactccaacgttcgtcataatacggcacatcaccaatagtgccgatcgtattgcaaggggggaagcgataactatggaacaactatttgaaaaatttattctctgtaagcgatgttgtcgcctcataggcagagaataattaactatatttcgctaagatataaaaggagacatttatcatgacaaaaatagctacttctacattagatttaatcggncgtacacccttactcgaaccgcaacgttataacaaacaaactcaaagccttgccagaattcttgttaaagccgaagcttttaatccggcgggctccgtaaaagaccgtattgccaagggcatggttgaagcggctgaaaaagaaggtctgctaaaagaaggctccgtaatcattgaaccgactagtggtaacacgggtatcggtttagcggccgtcgcagcggctaagggctaccgcatcattttgaccatgccggaaaccatgtcggccgaacgccgtaaactcatgtccgcttacggcgccgaaatcgtacttacgcccggttctacaggaatgcagggggctgtcgacaaggccgcagaattggcaaaagaaatncccggatcctttattcccggccagtttaccaatcccgtaaatcctcaggttcattttgaaacaacaggtccggaaatttatgaagatactgacggaaaggtagatatcttcattgccggtgtcggtacaggcggtaccttatcaggtaccggtaagtacttaaagagcaaaaatcccgccgtcaaagtcgttgccgtcgaaccgaccggttcgcctctactttccgaaggccatgccggccctcataagattcaaggtatcggtgccaacttcattcccgataccttagatacaaaaatttatgacgaaatagttacggtcgacaatgatgcggctttcaaaacggctcaagcatttattaaagcggaaggcttcctcatcggcatntccggcggggcagccgtatatgccgcaaccgaa

SEQ ID NO: 1161 - DNA, 4000 bp, Escherichia coli
  misc_feature (1)..(1): n is a, c, g, or t
  misc_feature (3)..(7): n is a, c, g, or t
  misc_feature (9)..(12): n is a, c, g, or t
  misc_feature (14)..(17): n is a, c, g, or t
  misc_feature (19)..(24): n is a, c, g, or t
  misc_feature (26)..(35): n is a, c, g, or t
  misc_feature (37)..(40): n is a, c, g, or t
  misc_feature (42)..(49): n is a, c, g, or t
  misc_feature (51)..(56): n is a, c, g, or t
  misc_feature (58)..(63): n is a, c, g, or t
  misc_feature (66)..(68): n is a, c, g, or t
  misc_feature (70)..(71): n is a, c, g, or t
  misc_feature (73)..(75): n is a, c, g, or t
  misc_feature (78)..(83): n is a, c, g, or t
  misc_feature (86)..(104): n is a, c, g, or t
  misc_feature (106)..(112): n is a, c, g, or t
  misc_feature (114)..(130): n is a, c, g, or t
  misc_feature (132)..(150): n is a, c, g, or t
  misc_feature (153)..(167): n is a, c, g, or t
  misc_feature (169)..(170): n is a, c, g, or t
  misc_feature (172)..(174): n is a, c, g, or t
  misc_feature (176)..(177): n is a, c, g, or t
  misc_feature (179)..(191): n is a, c, g, or t
  misc_feature (193)..(200): n is a, c, g, or t
  misc_feature (203)..(206): n is a, c, g, or t
  misc_feature (208)..(217): n is a, c, g, or t
  misc_feature (219)..(224): n is a, c, g, or t
  misc_feature (227)..(249): n is a, c, g, or t
  misc_feature (251)..(251): n is a, c, g, or t
  misc_feature (253)..(254): n is a, c, g, or t
  misc_feature (256)..(259): n is a, c, g, or t
  misc_feature (261)..(267): n is a, c, g, or t
  misc_feature (271)..(271): n is a, c, g, or t
  misc_feature (273)..(279): n is a, c, g, or t
  misc_feature (281)..(287): n is a, c, g, or t
  misc_feature (289)..(291): n is a, c, g, or t
  misc_feature (293)..(296): n is a, c, g, or t
  misc_feature (298)..(302): n is a, c, g, or t
  misc_feature (304)..(305): n is a, c, g, or t
  misc_feature (308)..(316): n is a, c, g, or t
  misc_feature (318)..(326): n is a, c, g, or t
  misc_feature (328)..(330): n is a, c, g, or t
  misc_feature (333)..(336): n is a, c, g, or t
  misc_feature (339)..(340): n is a, c, g, or t
  misc_feature (344)..(345): n is a, c, g, or t
  misc_feature (347)..(349): n is a, c, g, or t
  misc_feature (352)..(356): n is a, c, g, or t
  misc_feature (358)..(358): n is a, c, g, or t
  misc_feature (360)..(369): n is a, c, g, or t
  misc_feature (371)..(373): n is a, c, g, or t
  misc_feature (377)..(381): n is a, c, g, or t
  misc_feature (383)..(389): n is a, c, g, or t
  misc_feature (392)..(395): n is a, c, g, or t
  misc_feature (397)..(399): n is a, c, g, or t
  misc_feature (401)..(402): n is a, c, g, or t
  misc_feature (405)..(411): n is a, c, g, or t
  misc_feature (413)..(420): n is a, c, g, or t
  misc_feature (423)..(427): n is a, c, g, or t
  misc_feature (430)..(432): n is a, c, g, or t
  misc_feature (435)..(438): n is a, c, g, or t
  misc_feature (440)..(441): n is a, c, g, or t
  misc_feature (443)..(444): n is a, c, g, or t
  misc_feature (451)..(453): n is a, c, g, or t
  misc_feature (455)..(462): n is a, c, g, or t
  misc_feature (464)..(466): n is a, c, g, or t
  misc_feature (468)..(472): n is a, c, g, or t
  misc_feature (474)..(476): n is a, c, g, or t
  misc_feature (478)..(479): n is a, c, g, or t
  misc_feature (482)..(485): n is a, c, g, or t
  misc_feature (489)..(490): n is a, c, g, or t
  misc_feature (492)..(493): n is a, c, g, or t
  misc_feature (496)..(496): n is a, c, g, or t
  misc_feature (499)..(502): n is a, c, g, or t
  misc_feature (504)..(505): n is a, c, g, or t
  misc_feature (507)..(512): n is a, c, g, or t
  misc_feature (514)..(517): n is a, c, g, or t
  misc_feature (520)..(520): n is a, c, g, or t
  misc_feature (523)..(524): n is a, c, g, or t
  misc_feature (526)..(526): n is a, c, g, or t
  misc_feature (530)..(531): n is a, c, g, or t
  misc_feature (534)..(537): n is a, c, g, or t
  misc_feature (540)..(541): n is a, c, g, or t
  misc_feature (544)..(548): n is a, c, g, or t
  misc_feature (550)..(559): n is a, c, g, or t
  misc_feature (561)..(565): n is a, c, g, or t
  misc_feature (568)..(569): n is a, c, g, or t
  misc_feature (571)..(571): n is a, c, g, or t
  misc_feature (573)..(581): n is a, c, g, or t
  misc_feature (583)..(584): n is a, c, g, or t
  misc_feature (586)..(596): n is a, c, g, or t
  misc_feature (598)..(600): n is a, c, g, or t
  misc_feature (603)..(607): n is a, c, g, or t
  misc_feature (609)..(609): n is a, c, g, or t
  misc_feature (611)..(612): n is a, c, g, or t
  misc_feature (616)..(626): n is a, c, g, or t
  misc_feature (628)..(630): n is a, c, g, or t
  misc_feature (634)..(635): n is a, c, g, or t
  misc_feature (638)..(641): n is a, c, g, or t
  misc_feature (643)..(644): n is a, c, g, or t
  misc_feature (646)..(651): n is a, c, g, or t
  misc_feature (653)..(654): n is a, c, g, or t
  misc_feature (657)..(661): n is a, c, g, or t
  misc_feature (663)..(668): n is a, c, g, or t
  misc_feature (671)..(674): n is a, c, g, or t
  misc_feature (677)..(682): n is a, c, g, or t
  misc_feature (684)..(684): n is a, c, g, or t
  misc_feature (686)..(689): n is a, c, g, or t
  misc_feature (692)..(697): n is a, c, g, or t
  misc_feature (699)..(699): n is a, c, g, or t
  misc_feature (701)..(701): n is a, c, g, or t
  misc_feature (704)..(710): n is a, c, g, or t
  misc_feature (715)..(716): n is a, c, g, or t
  misc_feature (718)..(723): n is a, c, g, or t
  misc_feature (725)..(727): n is a, c, g, or t
  misc_feature (729)..(733): n is a, c, g, or t
  misc_feature (736)..(737): n is a, c, g, or t
  misc_feature (739)..(743): n is a, c, g, or t
  misc_feature (746)..(746): n is a, c, g, or t
  misc_feature (751)..(751): n is a, c, g, or t
  misc_feature (753)..(753): n is a, c, g, or t
  misc_feature (755)..(758): n is a, c, g, or t
  misc_feature (760)..(760): n is a, c, g, or t
  misc_feature (763)..(763): n is a, c, g, or t
  misc_feature (765)..(771): n is a, c, g, or t
  misc_feature (773)..(773): n is a, c, g, or t
  misc_feature (775)..(784): n is a, c, g, or t
  misc_feature (786)..(788): n is a, c, g, or t
  misc_feature (790)..(793): n is a, c, g, or t
  misc_feature (795)..(799): n is a, c, g, or t
  misc_feature (801)..(802): n is a, c, g, or t
  misc_feature (807)..(807): n is a, c, g, or t
  misc_feature (811)..(818): n is a, c, g, or t
  misc_feature (820)..(820): n is a, c, g, or t
  misc_feature (822)..(822): n is a, c, g, or t
  misc_feature (825)..(825): n is a, c, g, or t
  misc_feature (827)..(827): n is a, c, g, or t
  misc_feature (829)..(830): n is a, c, g, or t
  misc_feature (833)..(835): n is a, c, g, or t
  misc_feature (838)..(844): n is a, c, g, or t
  misc_feature (847)..(847): n is a, c, g, or t
  misc_feature (849)..(850): n is a, c, g, or t
  misc_feature (853)..(860): n is a, c, g, or t
  misc_feature (862)..(865): n is a, c, g, or t
  misc_feature (867)..(868): n is a, c, g, or t
  misc_feature (870)..(870): n is a, c, g, or t
  misc_feature (873)..(885): n is a, c, g, or t
  misc_feature (887)..(889): n is a, c, g, or t
  misc_feature (891)..(891): n is a, c, g, or t
  misc_feature (893)..(902): n is a, c, g, or t
  misc_feature (905)..(905): n is a, c, g, or t
  misc_feature (907)..(907): n is a, c, g, or t
  misc_feature (909)..(916): n is a, c, g, or t
  misc_feature (919)..(924): n is a, c, g, or t
  misc_feature (926)..(927): n is a, c, g, or t
  misc_feature (929)..(934): n is a, c, g, or t
  misc_feature (937)..(938): n is a, c, g, or t
  misc_feature (940)..(940): n is a, c, g, or t
  misc_feature (943)..(946): n is a, c, g, or t
  misc_feature (948)..(948): n is a, c, g, or t
  misc_feature (951)..(959): n is a, c, g, or t
  misc_feature (962)..(964): n is a, c, g, or t
  misc_feature (966)..(982): n is a, c, g, or t
  misc_feature (984)..(986): n is a, c, g, or t
  misc_feature (988)..(996): n is a, c, g, or t
  misc_feature (998)..(1000): n is a, c, g, or t
  misc_feature (1003)..(1005): n is a, c, g, or t
  misc_feature (1007)..(1007): n is a, c, g, or t
  misc_feature (1009)..(1009): n is a, c, g, or t
  misc_feature (1012)..(1015): n is a, c, g, or t
  misc_feature (1017)..(1020): n is a, c, g, or t
  misc_feature (1022)..(1037): n is a, c, g, or t
  misc_feature (1041)..(1043): n is a, c, g, or t
  misc_feature (1046)..(1046): n is a, c, g, or t
  misc_feature (1048)..(1049): n is a, c, g, or t
  misc_feature (1053)..(1055): n is a, c, g, or t
  misc_feature (1058)..(1058): n is a, c, g, or t
  misc_feature (1061)..(1062): n is a, c, g, or t
  misc_feature (1065)..(1066): n is a, c, g, or t
  misc_feature (1068)..(1068): n is a, c, g, or t
  misc_feature (1071)..(1088): n is a, c, g, or t
  misc_feature (1091)..(1094): n is a, c, g, or t
  misc_feature (1096)..(1096): n is a, c, g, or t
  misc_feature (1099)..(1099): n is a, c, g, or t
  misc_feature (1101)..(1107): n is a, c, g, or t
  misc_feature (1110)..(1115): n is a, c, g, or t
  misc_feature (1117)..(1119): n is a, c, g, or t
  misc_feature (1121)..(1122): n is a, c, g, or t
  misc_feature (1125)..(1126): n is a, c, g, or t
  misc_feature (1128)..(1128): n is a, c, g, or t
  misc_feature (1131)..(1131): n is a, c, g, or t
  misc_feature (1133)..(1135): n is a, c, g, or t
  misc_feature (1137)..(1138): n is a, c, g, or t
  misc_feature (1140)..(1142): n is a, c, g, or t
  misc_feature (1144)..(1151): n is a, c, g, or t
  misc_feature (1153)..(1155): n is a, c, g, or t
  misc_feature (1157)..(1161): n is a, c, g, or t
  misc_feature (1163)..(1163): n is a, c, g, or t
  misc_feature (1165)..(1167): n is a, c, g, or t
  misc_feature (1169)..(1174): n is a, c, g, or t
  misc_feature (1176)..(1178): n is a, c, g, or t
  misc_feature (1181)..(1182): n is a, c, g, or t
  misc_feature (1184)..(1187): n is a, c, g, or t
  misc_feature (1189)..(1190): n is a, c, g, or t
  misc_feature (1195)..(1195): n is a, c, g, or t
  misc_feature (1197)..(1202): n is a, c, g, or t
  misc_feature (1204)..(1217): n is a, c, g, or t
  misc_feature (1220)..(1229): n is a, c, g, or t
  misc_feature (1231)..(1234): n is a, c, g, or t
  misc_feature (1238)..(1238): n is a, c, g, or t
  misc_feature (1240)..(1240): n is a, c, g, or t
  misc_feature (1242)..(1249): n is a, c, g, or t
  misc_feature (1251)..(1251): n is a, c, g, or t
  misc_feature (1253)..(1253): n is a, c, g, or t
  misc_feature (1258)..(1264): n is a, c, g, or t
  misc_feature (1267)..(1268): n is a, c, g, or t
  misc_feature (1271)..(1272): n is a, c, g, or t
  misc_feature (1275)..(1278): n is a, c, g, or t
  misc_feature (1280)..(1289): n is a, c, g, or t
  misc_feature (1291)..(1296): n is a, c, g, or t
  misc_feature (1298)..(1307): n is a, c, g, or t
  misc_feature (1309)..(1312): n is a, c, g, or t
  misc_feature (1314)..(1316): n is a, c, g, or t
  misc_feature (1318)..(1320): n is a, c, g, or t
  misc_feature (1323)..(1327): n is a, c, g, or t
  misc_feature (1330)..(1331): n is a, c, g, or t
  misc_feature (1333)..(1334): n is a, c, g, or t
  misc_feature (1336)..(1341): n is a, c, g, or t
  misc_feature (1343)..(1344): n is a, c, g, or t
  misc_feature (1347)..(1349): n is a, c, g, or t
  misc_feature (1351)..(1351): n is a, c, g, or t
  misc_feature (1353)..(1354): n is a, c, g, or t
  misc_feature (1356)..(1362): n is a, c, g, or t
  misc_feature (1364)..(1367): n is a, c, g, or t
  misc_feature (1371)..(1371): n is a, c, g, or t
  misc_feature (1374)..(1374): n is a, c, g, or t
  misc_feature (1380)..(1382): n is a, c, g, or t
  misc_feature (1384)..(1385): n is a, c, g, or t
  misc_feature (1389)..(1389): n is a, c, g, or t
  misc_feature (1395)..(1395): n is a, c, g, or t
  misc_feature (1400)..(1400): n is a, c, g, or t
  misc_feature (1404)..(1406): n is a, c, g, or t
  misc_feature (1408)..(1408): n is a, c, g, or t
  misc_feature (1410)..(1410): n is a, c, g, or t
  misc_feature (1412)..(1412): n is a, c, g, or t
  misc_feature (1414)..(1414): n is a, c, g, or t
  misc_feature (1425)..(1428): n is a, c, g, or t
  misc_feature (1430)..(1437): n is a, c, g, or t
  misc_feature (1439)..(1440): n is a, c, g, or t
  misc_feature (1443)..(1443): n is a, c, g, or t
  misc_feature (1448)..(1448): n is a, c, g, or t
  misc_feature (1454)..(1454): n is a, c, g, or t
  misc_feature (1456)..(1456): n is a, c, g, or t
  misc_feature (1474)..(1475): n is a, c, g, or t
  misc_feature (1487)..(1489): n is a, c, g, or t
  misc_feature (1497)..(1497): n is a, c, g, or t
  misc_feature (1517)..(1517): n is a, c, g, or t
  misc_feature (1520)..(1520): n is a, c, g, or t
  misc_feature (1523)..(1523): n is a, c, g, or t
  misc_feature (1535)..(1535): n is a, c, g, or t
  misc_feature (1544)..(1544): n is a, c, g, or t
  misc_feature (1566)..(1567): n is a, c, g, or t
  misc_feature (1577)..(1577): n is a, c, g, or t
  misc_feature (1579)..(1579): n is a, c, g, or t
  misc_feature (1583)..(1584): n is a, c, g, or t
  misc_feature (1589)..(1589): n is a, c, g, or t
  misc_feature (1598)..(1598): n is a, c, g, or t
  misc_feature (1648)..(1648): n is a, c, g, or t
  misc_feature (1733)..(1733): n is a, c, g, or t
  misc_feature (1745)..(1745): n is a, c, g, or t
  misc_feature (1822)..(1822): n is a, c, g, or t
  misc_feature (1836)..(1836): n is a, c, g, or t
  misc_feature (1853)..(1853): n is a, c, g, or t
  misc_feature (1865)..(1865): n is a, c, g, or t
  misc_feature (1871)..(1871): n is a, c, g, or t
  misc_feature (1967)..(1967): n is a, c, g, or t
  misc_feature (1994)..(1994): n is a, c, g, or t
  misc_feature (2478)..(2478): n is a, c, g, or t
  misc_feature (3461)..(3461): n is a, c, g, or t
  misc_feature (3575)..(3575): n is a, c, g, or t
nannnnngnnnnannnnannnnnncnnnnnnnnnncnnnngnnnnnnnngnnnnnnannnnnncannncnnannncannnnnntcnnnnnnnnnnnnnnnnnnngnnnnnnnannnnnnnnnnnnnnnnncnnnnnnnnnnnnnnnnnnngannnnnnnnnnnnnnnanntnnncnnannnnnnnnnnnnnannnnnnnnggnnnngnnnnnnnnnngnnnnnnagnnnnnnnnnnnnnnnnnnnnnnnangnntnnnntnnnnnnncaanannnnnnncnnnnnnngnnnannnntnnnnngnnaannnnnnnnngnnnnnnnnnannnttnnnnaanngttnntnnnaannnnnanannnnnnnnnnannntttnnnnnannnnnnnggnnnncnnnannccnnnnnnntnnnnnnnngannnnnaannnaannnnanncnnaattaannnannnnnnnncnnntnnnnngnnnanngcnnnncaanncnncgnaannnnannannnnnncnnnncantgnntnagcnnacnnnncgnngcnnnnnannnnnnnnnncnnnnnaannanannnnnnnnntnngnnnnnnnnnnntnnnttnnnnntnannccannnnnnnnnnnannncacnncannnnanngnnnnnngnnaannnnntnnnnnnggnnnnaannnnnnancnnnncannnnnnanancannnnnnnggcgnngnnnnnncnnnannnnnggnntnnnnnaanaaaangncnnnncnttncnnnnnnngntnnnnnnnnnnannnannnnannnnnannagaanaaannnnnnnngngnggngngnngannngannnnnnnaanannaannnnnnnncnnnncnngnaannnnnnnnnnnnncnnnanannnnnnnnnnccncncnnnnnnnnctnnnnnncnnannnnnnccnnanccnnnncnctnnnnnnnnnggnnngnnnnnnnnnnnnnnnnnannngnnnnnnnnnannngannngngnagnnnngnnnngnnnnnnnnnnnnnnnnaagnnnggnanngaannnggnttnnatnncntgnnnnnnnnnnnnnnnnnnccnnnncnaancnnnnnnncgnnnnnntnnnannggnngnccnannngnnannngnnnnnnnncnnncnnnnngntnnnannnnnngnnnggnngnnnnannaaacnannnnnncnnnnnnnnnnnnnntcnnnnnnnnnncnnnncggnangnnnnnnnncngngcggnnnnnnnaannaannaannnnannnnnnnnnngnnnnnntnnnnnnnnnnannnncnnngnnnagnnnnncgnnannannnnnntnnaannnancnngnnnnnnngnnnncccnggntttttnnncnncccncccccnagggngggnnncnancncnctcttgagcannnntnnnnnnnntnnccnagaanaaatancngaagagaatctgaaatcnngagggaatcaannngagaaatnttgtctggctcatgcacgtntcnctngatggttttgtngcgggtccnaatggagaaattgactgggtcnnttttgacgangncctnntcgangatgtccangctctggtagactcagctgacacggctctttttggacgagtgacctatcngctcatggaaagctactggccgactgcagcggatagtccgacagcgtcgaagcatgatcttgaccattcacgatggctcaatccngcacccaagatngtattctccagaactctgaaaaacgttcattggcagaatacgaggattgtcaaagatcatatcggcgaagaaattgntagactgcggaaanagcctggcaagaacctnatactattcgcnagcccnacgcttgggtcaacgttcatgaatctgaacttgatcgacgaatacttcttcaacatcaatcctgtcgttctcggcaagggaaagcccttgttcagngaccagagtgagatgcgtaggttgaanctactagaatccaagacgtacaagaacggagtcgtcagtctccgctatggcaagggaagttagtagaatgagaaggatagtcgtttcagagttcgtgtcgctggatggtgtcatgcaggctccaggcggacgggaggaggatgctagtggcagtttcaagcatggcggttggagtttcaagttccgcgacgatcaggttccgaaatacaagctggacgagctagctgccagcgacgcgctcttgctaggccgaaagacctacgagatattcgcagcctactggccaaaagcaaaggacgacgcgggtttcgctgacaagatgaacaatctggccaagcatgtggtttcaacgactctgaagaaagccgactggaacaattccaagctgattaggacgaatgtcgcggatgaagtgaggaagctgaagcagcagccgggaaaggacattcttgtctacggaagcgcgaagctggtgaacacgctnttgcagcatgacctcgtcgatgaactacggctcatggtccatcctgttgtcttgggaagcgggaggcggctcttcgatgatcatgcggagatgctgaagcctttgaaacttgcagagtcgaagaccttcccgtcaggcatcgtcctcctctcctaccaccaagcaaaatagcgatttttcttacagagtaacgtcctcaagctgaggtttggataatgcggaccatcttactgatgatccgttcgtgcttcttctcatctgtatcaatccattccagaagcagtctcgctataggatgtgagatcttcacggtatctttgagtgattgttcccccgccttgtcttctatttgcaggatcgcatcgaggaattctttcttcggaacatttagtgtgggctcgcgaggtagttcggtccatgagatgatctgagaaacaacatcagcatgcctcatgctgtctgccgcgatcattctaaggagcagttttgagtattgatcgtcaaactttacggcggattctaggcatctttccgatgctttcagttctagttccagtctttgtcgaagaacgtcgacgatttgcctattgttcttcggtgttgtctcttctagcatcttgctgcctttgctggcgattattagttggtcggcggcttccatcaattctggcatcctgactccttcccttacgccgctccggaccctttgcaggatcctctccgctagtgcctcgatagtgcggtcgagttgagcgggtcgtccaaccagtctacctcgctttcctttcagatactgcacgacggcagctggagtggtgttgagagccgcggcgatctccgtcaccctcagtccctcgcgttggaggaccattgcgaggcgggcgcgaacgactggaatcatgttttcgctacgcacgttttcagcgatatttcgcatggcgttgggacaggcgtctgctgttattaacggtgttaacggattncgttaacgtcgattggcttaaatgacgtatgtcataacctagggttgcgttgcggtttgatagactacgctcagctcttactcctaggcgcagtcgccgggctgaccatattcntgggcctgcccatggccctgctccccaacgttagccgcatgaagaagggattcctcaacgcactcgcgatgggaatcctagtattcctgataactgacgtattgtcccacgcctgggaccccgctaagttagcagcggtcgccggtttcacagggaaaggtccggttgcggacgctgcgatagatcttcttgcattgttcggcggcctgggtctgggactattgggactcgcactctacgaacaaaggtatctcagaagaatcatctcaaccaagaagaaactagcaatctcggaagaaaacaatcgccccggagcatcaaacacccctgctaaacctgacacagcgccccagcagcatggctctgagcttttcagcaatccacatcatcttgcgacgatgatcgctgtcggcatagggttgcac

SEQ ID NO: 1162 - DNA, 4000 bp, Escherichia coli
  misc_feature (1985)..(1985): n is a, c, g, or t
  misc_feature (1987)..(1987): n is a, c, g, or t
  misc_feature (1992)..(1992): n is a, c, g, or t
atgcgccaggctcggcgcactcgcaagcggacggacgctacccgggcgtaggaaagtcatcctattggccgcgctgggccccccgccccccacccagcccaatccgggtcacatggcggcctgctgtgggcttatcgggcgctcacgggctagattggctccgcccgccagcgtgggagccagcctgcagttcgacgccgagttgtatcaaacgcacgagcagcgacgccacgactgagtcggccgcggccggggtctcggcctggatggctgcgtgcagatcttcccgggccgattcgatccaggaccattcccgccggaatccgtctgccttggcccagtagccacgctgctcccaggcgagcgcagttgcctccacggatgcggcaaccaaatggagctgctcgcgcacgaacaccaggcgctcctgctcccccgcttggcggaaggagtccgccggcgtcggctgcaacgccgtgcggatccggcgcagacaggcctgccgaacgctggcgggagactgaggacgaaggatcccgggcatctgaggctcctggctagtatagccgcagcctcgatgcggcaacccagcaggggagcatgccgccgtgctagaatgcctgtaggcggcacgcgcagcgctgcccgatcactcgaggcgtccaagcagacgacaagcaggatggaagacgggatcaaggtcgttgcgaccaaccgcaaggctcaacacgactacttcctcgaggatcgcctcgaggtcgggatggtgctcaagggtaccgagatcaagtcgattcggttgggccaggtcagcattcgtgaggccttcgtccgcctggaccagggcgagctatggctgcaaaacgcccacatcgcgccgtacgaccctgcgagccaaatgaaccatgacccgaaacggccgcgcaagttgctgatgcaccggcgcgagatcgctaagttggaaggatcgatccgtcagcgggggtatgcgctgatcccgacccggctgtacttgaaagacggccgggcaaagctcgagatcgcgctggcccgcggcaagcgacaatatgacaagcgcaaagcgctggcggagaaggacgcccagcgggccatgcagcgcgagctgggccggcgcggccccagatgatccagcagtccatcggcgccatcaactacctttcagcggctgagcggcgggcgatctatgctcgcttcgttccccctgagctgtcagagcagttgggcctatccccacagctgcgagacgccacgggtgccgacttgcttgaggtgcggggggagcgcggcgccccggacgtgcaggtgatcctgcgacatcagaccggcgcgcgcgatccggtgctgtacgcgcatctggcggacaccgtgcatgggcaggtccacgtcttgctgtacatcatcaacgacccggcctcgccacgcttcgacgtcgacgtcatgccggacggccgccccacccgcttcggcacccagctgcgcaatctgccagcggaggcaggcgcgttgactgccgggttggcgccgggacaggtgcggcgcgggctgcgcgttctgccatccgcgatccaggccttcgaggcattcgtcgcctcgctggatcaggagctgttctttgttgagccgctttactaccacaacgccgtccacttcgagcgcttcggcttcgcttatcagcagggtttgcagctgatgcgccgcattgcgggcggcttcggcccgaagggcgatctgaccagccgcctcgacgggtcaagtccgtttcgcgatcctgcggcctaccgctcgattcgcctgcgtagctgggcggtgcatgacggcgttctgggtgatccattcacgggggtgctcatgtaccgccggcttggcgcccccgtcacggtcgacacggcaccgtcgattccctggtaggacaggatgcgcatagcctcctgctgctttgggatgtgaacggcaagattacgggncncactngtggctatgcgcatgacgtgcgcattccgtctgctacaatggccgcatggggatgaaaggtttcgacgggggtggatagcgctgcacggcagaccgagaggcgccgatctcgtaaaatccgcgcacccataagtgccaaccgcacttcgtacgcggcgctcccgctcgcagcttagctcgagtgtgaccgcccggcgcccttgaggcgcccgcccgcccgaacctccctcgaccggctccgggatgcggcgaccaaaggccgaggtgccgtgcggatgccacgggccgcacctaagaccgccctccgggcgacgtggctggcaacaggaccgtctgggtcaccgcagacacctggcgcgagatctctcaggtgactacgtctgtagatgtgcagtgacagaagccttcggacgcgggttcgactcccgccatctccaccaagccggcagccgcacacggctgccggtcgctttgctgccgagctgacgcccagccacttcgtgcttgtgcgcccaaggcccgcatcagcgggctggggcttgcgcgttgacgtggaccggctctctgccaaccgctgtaggcggggcagcacgttctggtctagctgatcgccttgaggcgaaatcccaggccgcgcaccgtctcgatgaaagtcacgcccggcccatgctccgacagccgctcgcgcagccgccggaccaaggcgtcgatcgcctgctcactgaccccgctgcccaggctctcctgccagacaatttcaacgatttcttcgcgcgtcacgatgcgggtgggattcaggtacagcaattcgagcagccggaactgctgcggcgagagcggcggatcaagctcgctctcccctacccacaggcggtgtgccgcccggtcaaggcgaagcaagcccaggtcgtgcgccgccgcctcgtcgctgcccaaggggacggttgcgtctaggccgatgaacaccagcttcgccgccagcgcgatctggatcaggtcgccatcctggagttgcacttgggcgctgactaccgccccattcacatgcgtcccattcttgctgcccagatcctcgatccaatagccatcggccttccgccggatccgggcatggcggcgcgatatctggcggtccggtatcaccacctggcaatccacgtcgcggccaatcaccgtctccgcctcggtcagcggccagcggctgccctgtgccgtgccggattggccgatcaggaccgggccttgaggatcgcgcgctgcttccgtcattcgcctaaggccccgcgaccgccgtataggtataatcctggcaacatgcgaacaacatcctgcccggaagatgacggctgtgccgagcctgcttgagcccggtgctgtcctgcgcgagcgctacgccgtgagagagatcgttggccgcggcgggatgggctcgatctaccttgccgaggacctgcgccttcccgggcgctcctgcgccctcaaggaggtcgagtccgatccatccctgccccagacgctgcgcgaccagggccgcgcccagttctatcgggaggcctccgtgctcgcccgtctcgatcatcccaatctccccaaggtgtccgacttcttcgcggagggaaacgccgactacctggtgatggactacgtcccgggcgaggacctcaagtcgaaactggatgaggcgcgccgcgtcgggagcttcctcaatctcaccgaagtcctgcgctgggcggatcagatcaccgatgccctggagtacctccactcccaggacccccctgttgtgcaccgtgacatcaagcccagcaacctcaagttgaccccgtccggcctgatcaagctcgtcgacttcggcctggtcaagcaaatggcccccgacgagatgacggtcacggtgatccaggggcgcggcaccgcctactacaccccgctcgagcagtacggtggggatgacggtcacaccagccctcgcacggacctgtacgcctttgccgccacgctctaccac

SEQ ID NO: 1163 - DNA, 4000 bp, Escherichia coli
tgatgatcctttgaatcaatttttgcagctagtgcaattccaacagaataagacagaccagtacctaacgaacctccacaaaattcaactccaggacattttagatcaggatgtccctgtaatctactgccgaattttcgtaaagtttcaatttcagattctggaaaatatcctgctactgccatattagagaacaaaccaggagcagcatgtcctttagacaatactaaccgatctctatcttcccattgagggttttgaacatcaaatttcaaatgtttgttaaacaaacaacccaaaatttcagccatggaaaaagagccgccaggatgaccggaacctgctgtattagttgccttgattactaatttacgagctcttagaatatttttttttatttgataatagttaagacccatctggaacgtatctctataaatcgaataaaaatctacttctgtaaaattttaatttgatcgcaattatgtctaattatgagaattaaagatgaaattccaattgtgctttttgatgatcagtgttatgtttgtataaaatttgcaacaattgtaaattttttggctaaaggtaaaattacaatggtagggcactattcaaattttggaataaaaattagaaatgaacttttagatgaatcagcattagagatgttttggtttattgatgagaaaagggcaagtgggggaagagctgcattatttccactaattaaagcaattttttctacaaaatcaagaaaaacaaaatttgctcaaatggataacatctgtagcgatgattgtaaaagtgccaaagcagtatttgttagatcatttacactaattacaaatagtaaaaaaatcgacttatagaaaatctaaataatgctttaaaaaacatgattttatcgtgaagattaaaactgagaattccagtaaaagaaaaacagaacttctatgtggatttgtgttagaagattctaacaaagttctaggattaccaaaatttgatacaaaaacatcatcatctatcaatcaatctctaaaagatatgaacggtaaactaggaaaattagcaatcattccagttccaggtaaaaaacaagctcaaagaatacttcttgcaggtattggtaaaaaagaaaacttaacacaagataccataagatttgtttcaggtaaaattgcacagaaaactagggaattaaaattaaaagagttttcaattatagtgccaccaacttttgtaatggattcaatttcatcagtttctcagattatagaaggtgcaaaaatgtcattatacaaatttgataaatttaaagcagaaaaagtggataaaacgccagatatgacaatcatagtttctaaatcaaataaaatctcaaaagcaattaaaattgccgaagctgttgcagaaggtgcaatatttactaaaagtgttgcaaatttaccaccaaacgaatgtactcctacaacactagcaaattttgctaaagatatttctaaaaaaaataaaatgaaatgcactataatttcacagccggaattaaagaaaaaaggttttggaggaattacagcagtaggcaaaggaagtaaaaacgagcctaaactaatcaccatagagcataatcatggacctaaaactcaaaaaccaattgttctagttggaaaagctgtgacatttgatacgggaggaatttcattaaaaccaggtcaaggcatggacgaaatgaaatttgataaatgtgggggttgtacagttttaggaattatgaaatcagtttcagaattaaaattaccaattaacgtagtaggaattatcccatcggtggaaaatatgccgggaggagaggcatacaggccgggagatattataaaattatacaatggaaaaactgcagagattctaaatacagatgcagaaggtagattgattttagcagatgcattagcatacggagaaaaacaatacactccaaaagtaattattgattttgctactttaacaggagcatgtatagtagcattaggaaataacgtagctgcaatcgtatcaaacgacaaacagctaacaaaagaaattacaaattcatccaaaactacaacagaagaagtttgggaattaccattaacacaagactatatggacatgataaaatcagatgtggcggacattaaaaatgtcggaataggaaaagcagcaggaactatcacagctgctgcatttttgaaaagtgcaatcaaagacacgccatgggtacatttcgatattgcgggagttgcatggactcagggagcagctacaaaacaaaaaccatacaatccaaaaggagctacaggttttggagtaagactgattttagattatttgcaaaaattataaaattaataacccctgctatttctatcaggtttgctaacatttggatttctccagccatgtttttccatcatgtgatttagtaatcggatgtcattgtcagatttttctccacagacgctacaatttggcattgaaatcaattcaatccaagattgtggatattaaaagattgattaataattgaaaaatgccagcactattgcttcccaacagctctcgcatgttagtaacacaatagcgctatcaggtttgacttctaagttcggaatgggattaggtcgcaccctgacgctatggccggcttgaaaactgttcaataattcttatctattaaggtaacgaaatatttcaaatcaactcaaaataggtataaagcaaagaaaatatcgaattacaatcatgacacacagagttgcagtactggatcaggatttatgccagccacaaaaatgcggattagagtgtataaagtattgtccagttaacaaatcaggtgcagaatgtgttacaattaacgaagtatcaaaaaaagcccaaattgatgaggatatttgtaacgggtgtggaatatgtgtcaaagtatgtccatttgatgcaataacaattgtaaatttagcaagtgaattggctacagataaaattcaccaatatggaacaaattcctttagattatacaaattaccgactccaagaaagggagaggttgtaggattattaggcagaaatggaatgggaaaaagtactgtagttaacatactttctggaaaattaaaaccaaatcttggaagatacgaagatccgccagaatggaatgaaatttttaaacattatagtggaacagaattaaaaaatcattttcaaaaaatagaacgaaatgaaattcgtgcttcaataaaaccgcaacagattcatcgtcttgcagaagcgtttgatgggacaggaaacgaattacttgagaaatatgatgaacgaggggtaacaagagaattagttagagaattaggattacaaaattccatggaaaaaagtttgaaagaacttagtggaggagaactacaaagaattgcagttgctgcagctgcatcaaaagatacagagttttacttttttgatgagccatcatcatacaatgatgtatatcaaagaataggggttgccagagtaatacaaggtttagcaaaaattggaaaaagcgtgatgattgtagaacacgatttaacattacttgattttcttagtgattatatcgaagtcttgtatggtgaaccaacagcatatggaatcgtatcaaatatcctatcaactaaaattggaatcaatgtttttcttgatggatatttaccaaatgaaaatgtcaggtttagagataaaagattctccatggatgtatcatcatcatctacggatattttccaagaaggtagcgatgttgtaatttatccaaaacttgaaaagaaatttgattcattttcagtagcaattgagccgggaaaagtacgaaagggcgaagttttaggaataatgggtgcaaatgcacttggaaaaacaaccatgatgaaaatgattgcaggtgtggaaaaaccagatagtggttcaattgataaaaaaataaaga

SEQ ID NO: 1164 - DNA, 4000 bp, Escherichia coli
  misc_feature (1)..(6): n is a, c, g, or t
  misc_feature (10)..(17): n is a, c, g, or t
  misc_feature (19)..(24): n is a, c, g, or t
  misc_feature (26)..(28): n is a, c, g, or t
  misc_feature (30)..(31): n is a, c, g, or t
  misc_feature (33)..(36): n is a, c, g, or t
  misc_feature (38)..(49): n is a, c, g, or t
  misc_feature (51)..(52): n is a, c, g, or t
  misc_feature (57)..(60): n is a, c, g, or t
  misc_feature (62)..(64): n is a, c, g, or t
  misc_feature (66)..(74): n is a, c, g, or t
  misc_feature (76)..(80): n is a, c, g, or t
  misc_feature (82)..(82): n is a, c, g, or t
  misc_feature (84)..(92): n is a, c, g, or t
  misc_feature (94)..(94): n is a, c, g, or t
  misc_feature (96)..(96): n is a, c, g, or t
  misc_feature (98)..(100): n is a, c, g, or t
  misc_feature (102)..(109): n is a, c, g, or t
  misc_feature (111)..(114): n is a, c, g, or t
  misc_feature (116)..(118): n is a, c, g, or t
  misc_feature (121)..(124): n is a, c, g, or t
  misc_feature (126)..(138): n is a, c, g, or t
  misc_feature (140)..(143): n is a, c, g, or t
  misc_feature (145)..(150): n is a, c, g, or t
  misc_feature (153)..(156): n is a, c, g, or t
  misc_feature (158)..(163): n is a, c, g, or t
  misc_feature (166)..(167): n is a, c, g, or t
  misc_feature (172)..(180): n is a, c, g, or t
  misc_feature (182)..(182): n is a, c, g, or t
  misc_feature (184)..(185): n is a, c, g, or t
  misc_feature (188)..(190): n is a, c, g, or t
  misc_feature (192)..(192): n is a, c, g, or t
  misc_feature (194)..(196): n is a, c, g, or t
  misc_feature (198)..(199): n is a, c, g, or t
  misc_feature (203)..(210): n is a, c, g, or t
  misc_feature (213)..(213): n is a, c, g, or t
  misc_feature (215)..(215): n is a, c, g, or t
  misc_feature (217)..(222): n is a, c, g, or t
  misc_feature (226)..(226): n is a, c, g, or t
  misc_feature (231)..(233): n is a, c, g, or t
  misc_feature (235)..(241): n is a, c, g, or t
  misc_feature (243)..(243): n is a, c, g, or t
  misc_feature (245)..(247): n is a, c, g, or t
  misc_feature (250)..(250): n is a, c, g, or t
  misc_feature (252)..(253): n is a, c, g, or t
  misc_feature (255)..(256): n is a, c, g, or t
  misc_feature (258)..(260): n is a, c, g, or t
  misc_feature (262)..(265): n is a, c, g, or t
  misc_feature (267)..(268): n is a, c, g, or t
  misc_feature (270)..(272): n is a, c, g, or t
  misc_feature (274)..(275): n is a, c, g, or t
  misc_feature (277)..(279): n is a, c, g, or t
  misc_feature (281)..(284): n is a, c, g, or t
  misc_feature (286)..(291): n is a, c, g, or t
  misc_feature (293)..(294): n is a, c, g, or t
  misc_feature (296)..(297): n is a, c, g, or t
  misc_feature (300)..(304): n is a, c, g, or t
  misc_feature (309)..(309): n is a, c, g, or t
  misc_feature (311)..(311): n is a, c, g, or t
  misc_feature (313)..(319): n is a, c, g, or t
  misc_feature (322)..(335): n is a, c, g, or t
  misc_feature (337)..(338): n is a, c, g, or t
  misc_feature (343)..(343): n is a, c, g, or t
  misc_feature (345)..(347): n is a, c, g, or t
  misc_feature (349)..(349): n is a, c, g, or t
  misc_feature (351)..(352): n is a, c, g, or t
  misc_feature (354)..(357): n is a, c, g, or t
  misc_feature (359)..(366): n is a, c, g, or t
  misc_feature (368)..(374): n is a, c, g, or t
  misc_feature (376)..(376): n is a, c, g, or t
  misc_feature (378)..(381): n is a, c, g, or t
  misc_feature (383)..(384): n is a, c, g, or t
  misc_feature (386)..(387): n is a, c, g, or t
  misc_feature (390)..(392): n is a, c, g, or t
  misc_feature (394)..(396): n is a, c, g, or t
  misc_feature (398)..(400): n is a, c, g, or t
  misc_feature (402)..(418): n is a, c, g, or t
  misc_feature (420)..(422): n is a, c, g, or t
  misc_feature (424)..(425): n is a, c, g, or t
  misc_feature (429)..(430): n is a, c, g, or t
  misc_feature (432)..(435): n is a, c, g, or t
  misc_feature (438)..(438): n is a, c, g, or t
  misc_feature (442)..(445): n is a, c, g, or t
  misc_feature (447)..(459): n is a, c, g, or t
  misc_feature (461)..(464): n is a, c, g, or t
  misc_feature (466)..(478): n is a, c, g, or t
  misc_feature (480)..(480): n is a, c, g, or t
  misc_feature (484)..(498): n is a, c, g, or t
  misc_feature (500)..(500): n is a, c, g, or t
  misc_feature (502)..(504): n is a, c, g, or t
  misc_feature (507)..(510): n is a, c, g, or t
  misc_feature (513)..(515): n is a, c, g, or t
  misc_feature (517)..(517): n is a, c, g, or t
  misc_feature (521)..(526): n is a, c, g, or t
  misc_feature (528)..(529): n is a, c, g, or t
  misc_feature (531)..(532): n is a, c, g, or t
  misc_feature (534)..(537): n is a, c, g, or t
  misc_feature (539)..(542): n is a, c, g, or t
  misc_feature (546)..(547): n is a, c, g, or t
  misc_feature (550)..(551): n is a, c, g, or t
  misc_feature (555)..(555): n is a, c, g, or t
  misc_feature (558)..(559): n is a, c, g, or t
  misc_feature (561)..(561): n is a, c, g, or t
  misc_feature (563)..(563): n is a, c, g, or t
  misc_feature (565)..(566): n is a, c, g, or t
  misc_feature (568)..(569): n is a, c, g, or t
  misc_feature (571)..(574): n is a, c, g, or t
  misc_feature (576)..(579): n is a, c, g, or t
  misc_feature (581)..(582): n is a, c, g, or t
  misc_feature (586)..(587): n is a, c, g, or t
  misc_feature (589)..(590): n is a, c, g, or t
  misc_feature (593)..(594): n is a, c, g, or t
  misc_feature (596)..(597): n is a, c, g, or t
  misc_feature (599)..(599): n is a, c, g, or t
  misc_feature (603)..(605): n is a, c, g, or t
  misc_feature (607)..(607): n is a, c, g, or t
  misc_feature (609)..(609): n is a, c, g, or t
  misc_feature (612)..(612): n is a, c, g, or t
  misc_feature (614)..(616): n is a, c, g, or t
  misc_feature (618)..(624): n is a, c, g, or t
  misc_feature (626)..(627): n is a, c, g, or t
  misc_feature (630)..(631): n is a, c, g, or t
  misc_feature (633)..(633): n is a, c, g, or t
  misc_feature (635)..(635): n is a, c, g, or t
  misc_feature (638)..(639): n is a, c, g, or t
  misc_feature (642)..(643): n is a, c, g, or t
  misc_feature (645)..(655): n is a, c, g, or t
  misc_feature (657)..(657): n is a, c, g, or t
  misc_feature (659)..(665): n is a, c, g, or t
  misc_feature (667)..(668): n is a, c, g, or t
  misc_feature (670)..(671): n is a, c, g, or t
  misc_feature (673)..(675): n is a, c, g, or t
  misc_feature (678)..(678): n is a, c, g, or t
  misc_feature (680)..(681): n is a, c, g, or t
  misc_feature (683)..(685): n is a, c, g, or t
  misc_feature (687)..(688): n is a, c, g, or t
  misc_feature (691)..(691): n is a, c, g, or t
  misc_feature (693)..(696): n is a, c, g, or t
  misc_feature (698)..(702): n is a, c, g, or t
  misc_feature (704)..(704): n is a, c, g, or t
  misc_feature (707)..(712): n is a, c, g, or t
  misc_feature (714)..(716): n is a, c, g, or t
  misc_feature (719)..(721): n is a, c, g, or t
  misc_feature (723)..(723): n is a, c, g, or t
  misc_feature (725)..(725): n is a, c, g, or t
  misc_feature (727)..(729): n is a, c, g, or t
  misc_feature (731)..(736): n is a, c, g, or t
  misc_feature (738)..(740): n is a, c, g, or t
  misc_feature (742)..(742): n is a, c, g, or t
  misc_feature (745)..(751): n is a, c, g, or t
  misc_feature (755)..(755): n is a, c, g, or t
  misc_feature (757)..(758): n is a, c, g, or t
  misc_feature (761)..(762): n is a, c, g, or t
  misc_feature (765)..(766): n is a, c, g, or t
  misc_feature (768)..(769): n is a, c, g, or t
  misc_feature (771)..(771): n is a, c, g, or t
  misc_feature (774)..(783): n is a, c, g, or t
  misc_feature (786)..(788): n is a, c, g, or t
  misc_feature (790)..(790): n is a, c, g, or t
  misc_feature (792)..(794): n is a, c, g, or t
  misc_feature (797)..(802): n is a, c, g, or t
  misc_feature (804)..(804): n is a, c, g, or t
  misc_feature (806)..(807): n is a, c, g, or t
  misc_feature (809)..(810): n is a, c, g, or t
  misc_feature (812)..(812): n is a, c, g, or t
  misc_feature (814)..(814): n is a, c, g, or t
  misc_feature (817)..(820): n is a, c, g, or t
  misc_feature (822)..(822): n is a, c, g, or t
  misc_feature (824)..(824): n is a, c, g, or t
  misc_feature (826)..(830): n is a, c, g, or t
  misc_feature (832)..(832): n is a, c, g, or t
  misc_feature (835)..(836): n is a, c, g, or t
  misc_feature (839)..(841): n is a, c, g, or t
  misc_feature (844)..(847): n is a, c, g, or t
  misc_feature (849)..(849): n is a, c, g, or t
  misc_feature (852)..(853): n is a, c, g, or t
  misc_feature (2657)..(2657): n is a, c, g, or t
  misc_feature (3092)..(3092): n is a, c, g, or t
nnnnnnctgnnnnnnnntnnnnnncnnnanntnnnnannnnnnnnnnnnannatttnnnnannngnnnnnnnnngnnnnnanannnnnnnnntntntnnngnnnnnnnncnnnnannntgnnnngnnnnnnnnnnnnnannnngnnnnnncannnntnnnnnnagnngatgnnnnnnnnntncnntcnnntnannntnntgannnnnnnnctnanannnnnnatgnttatnnngnnnnnnntncnnntgntnntnntnnngnnnntnntnnngnnannncnnnngnnnnnnanngnncannnnnatttnanannnnnnntannnnnnnnnnnnnnanntctantnnnananntnnnntnnnnnnnnannnnnnntntnnnntnngnngcnnnannnannntnnnnnnnnnnnnnnnnntnnngnntatnntnnnnttnatgnnnntnnnnnnnnnnnnntnnnngnnnnnnnnnnnnnangtcnnnnnnnnnnnnnnntntnnngtnnnnctnnnanagannnnnntnntnntnnnncnnnngatnnaanntatnatnnancngnngnntnnnnannnnannaaanngnngcnnanngnatcnnnananaanannntnnnnnnntnnccnnananaannatnngnnnnnnnnnnnanannnnnnngnntnngnnnttnannannnannagnannnnannnnnangannnnnnannnaannntnangnnnannnnnnannnantannnnnnnatanannttnncanntnnancannnnnnnnnntcnnngntnnnacnnnnnnangnntnntngntannnncncngnnnnncnggnnggnnncgnnnngngcnncagcgagaccgtagaatgtattgaatggtacgatccttcaacagatgagccaacaccaccccttgcttttaaaatgacggcatttgattatggcgagtctgcagcaacaaataccctcgctacctccgcacaggatgttagtagtaattcatatcaagcagacttttatgttaattatgaaaacacagcaaaaataattgaaatccctctcactacaagaactctaaaagttgtagataatcctcccacagcccttgatattatgccttatcaggttgtggatgattcacaacagataggatttcacttaaaagatgatacttttgttcctgctacttatccaacaaatattaacgccgacaatttagtgcttcgagatgactatttaaatgccaataatttagcaataagtgataaattagaaattgattctgtgtcgaggagcagatatattcagatctttcgaatgaacgaaaaaccagagaggttttctgattttagtggccacgaaattgctttaatcgatttggcgattcccggctctaatgaggtatcttccacttatcgttttcttgagaaaagagcagcaaacaaaaaatattattatttatttagggcgctaaatgaacacaagcagcctggatatgtatttgagatatatgaagcagagatagtgaacgatggtggttataaacatgcacgattcaactctttatacgaagaagatttagcagtagacgtttataaagaaccgtcacgaacagcgaaaaatttattacaacttaagccaacatatggacagctagcattaaattacaataacgccgattttgacgaaacagcacattcacaattgactaatataagtgttggcgttgaagataatgttttgtggggcaaaacattcaaagttcgtttaacgtctagaaagactggcaaaaaaattgatttgaacattacttatgattatgaggatgcaacataatcatgtcttttttaaacaaagctggcacaatcgtaattgatgcaacgctaactgataccggccgaaaatatatggcagatggaaatttcacaattgctaaatttgctctcggagatgatgaaatagactattcgttgatgagcaccgagatcgacggccatgccggcacgccgacgttaataaatgcatctactactccactttttgaagccttttctcaacaaaatgcaaatatcaattatggcttgatggatcacgagcgaaaagatttgctttacataccgatattaaaaataaacgataaattagaaaattcagcattgcctcaaacaggcgccttagagccagcacatacaaaaggaggagaaatatattatttatctgttaatgatgaaactactagcaaacttaaagatagtattgggtggcaatcggcacacattttagaatctaatgtttctgaaaaaacaaaactcattatagaatctggaattgatttaagtccaactggttcttataatacgagcgccgggaccccggatcctatttccggcaagcgcaccgctgccgatagagaggcttttattttacaaactgagcttttggacagcgcagtctatatttattgtgacaataggttttttactagcgtgttgattcccgctggcgaatctaaatttagtagtgcacgcggaagctcaaaagttaattttgagacactgaaccctgcaacttctatatcagagccgagatatatagaaaattttagtactttttatgcaccgacaattgacaatttagtatatgaaacaggaacanactcttctgatttagatatttcagttgtttgtgggcctcgtggcagcgcgctggcaattaatttagtagtggacaatatgttaacttctaaatcaactggcaccactaattataaatactctacttatggcacttccaatactagcttgcttggtggaagtaataagtttgattatatcgacaccgccctatatatagaaggtgcgaccacttccgctaggttaatgattccaataagaattataagatatgcgggcacctaaaaagtttgaagactaattaatataattactatttatgaaggagagagataaataaatgtcttttttagataactccggcgatatcatcctcgacgctgtgttaacagatgtgggtagaaagaggatggcacagggagctttccagatctcgcgctttgctctcggcgacgangagatagattattcacaatgggttagcgcaacgggctccgcttaccaagacttgactattttgcaaacccctgtttttgtagcacacaccaaagtgcccggtattaattacggacttttaaatattgcccgcaatgatttatattatatgccaggaatacagattagcaactcctcgaaagttgccaacgctgttgatgagaacagtgggatatattatctcgcagtaaatgcagaaacagcgactcaacttgaaaagtctacggcattaaattccaaatataaattcttaactacggccctcacctccggccgaaaattaataatggaattcggccttaaagattcgtcaaacgacggtattgttcccactcctgcgaatataactaattatttatctgcccagaatattggtctgctggatcctgcagcacgcgtaagggtagacagccgatttgtttcagcagttttgggagcctcgaatggctcaaagtttgcaaatgatgccgatggtaatccagatattgacattacacttacctcgcgcgatgctgcctccaacgttgcttctatgtccaattatgtagaatggacaattccgctcattaacaatggggtcacctataatacctcacaaacagaaaacaacataattgttactaatggggttgttggtacagttggagcatttaattttagcgtattcaacgcattgaaaacaaagtctacggctacgacctctcgtagcgcttattatacattatacggctcaacagatgttgttggaacaaacgcacgccttgggttctccggcgcacaaaagtgggattttattgatacaactgtatatatctatggagaggccagcacgactatgaaacagatcaccctaagaatcattcggtatgc

SEQ ID NO: 1165 - DNA, 4000 bp, Escherichia coli
  misc_feature (1237)..(1237): n is a, c, g, or t
  misc_feature (1986)..(1987): n is a, c, g, or t
  misc_feature (2016)..(2016): n is a, c, g, or t
  misc_feature (2246)..(2246): n is a, c, g, or t
  misc_feature (2374)..(2374): n is a, c, g, or t
  misc_feature (2441)..(2441): n is a, c, g, or t
  misc_feature (2496)..(2496): n is a, c, g, or t
  misc_feature (2509)..(2509): n is a, c, g, or t
  misc_feature (2511)..(2512): n is a, c, g, or t
  misc_feature (2518)..(2518): n is a, c, g, or t
  misc_feature (2531)..(2531): n is a, c, g, or t
  misc_feature (2566)..(2569): n is a, c, g, or t
  misc_feature (2572)..(2572): n is a, c, g, or t
  misc_feature (2582)..(2582): n is a, c, g, or t
  misc_feature (2587)..(2587): n is a, c, g, or t
  misc_feature (2605)..(2610): n is a, c, g, or t
  misc_feature (2612)..(2612): n is a, c, g, or t
  misc_feature (2618)..(2620): n is a, c, g, or t
  misc_feature (2624)..(2625): n is a, c, g, or t
  misc_feature (2627)..(2629): n is a, c, g, or t
  misc_feature (2631)..(2631): n is a, c, g, or t
  misc_feature (2633)..(2640): n is a, c, g, or t
  misc_feature (2644)..(2644): n is a, c, g, or t
  misc_feature (2653)..(2653): n is a, c, g, or t
  misc_feature (2659)..(2659): n is a, c, g, or t
  misc_feature (2662)..(2662): n is a, c, g, or t
  misc_feature (2665)..(2665): n is a, c, g, or t
  misc_feature (2668)..(2670): n is a, c, g, or t
  misc_feature (2672)..(2672): n is a, c, g, or t
  misc_feature (2674)..(2675): n is a, c, g, or t
  misc_feature (2677)..(2679): n is a, c, g, or t
  misc_feature (2683)..(2683): n is a, c, g, or t
  misc_feature (2689)..(2690): n is a, c, g, or t
  misc_feature (2692)..(2692): n is a, c, g, or t
  misc_feature (2701)..(2701): n is a, c, g, or t
  misc_feature (2708)..(2708): n is a, c, g, or t
  misc_feature (2712)..(2712): n is a, c, g, or t
  misc_feature (2717)..(2717): n is a, c, g, or t
  misc_feature (2725)..(2725): n is a, c, g, or t
  misc_feature (2727)..(2727): n is a, c, g, or t
  misc_feature (2731)..(2731): n is a, c, g, or t
  misc_feature (2742)..(2744): n is a, c, g, or t
  misc_feature (2747)..(2747): n is a, c, g, or t
  misc_feature (2756)..(2756): n is a, c, g, or t
  misc_feature (2758)..(2759): n is a, c, g, or t
  misc_feature (2789)..(2790): n is a, c, g, or t
  misc_feature (2794)..(2794): n is a, c, g, or t
  misc_feature (2796)..(2796): n is a, c, g, or t
  misc_feature (2807)..(2809): n is a, c, g, or t
  misc_feature (2815)..(2819): n is a, c, g, or t
  misc_feature (2830)..(2831): n is a, c, g, or t
  misc_feature (2836)..(2836): n is a, c, g, or t
  misc_feature (2838)..(2839): n is a, c, g, or t
  misc_feature (2844)..(2844): n is a, c, g, or t
  misc_feature (2850)..(2851): n is a, c, g, or t
  misc_feature (2853)..(2858): n is a, c, g, or t
  misc_feature (2861)..(2864): n is a, c, g, or t
  misc_feature (2867)..(2868): n is a, c, g, or t
  misc_feature (2870)..(2870): n is a, c, g, or t
  misc_feature (2875)..(2876): n is a, c, g, or t
  misc_feature (2879)..(2879): n is a, c, g, or t
  misc_feature (2882)..(2882): n is a, c, g, or t
  misc_feature (2885)..(2886): n is a, c, g, or t
  misc_feature (2888)..(2891): n is a, c, g, or t
  misc_feature (2894)..(2896): n is a, c, g, or t
  misc_feature (2898)..(2905): n is a, c, g, or t
  misc_feature (2907)..(2908): n is a, c, g, or t
  misc_feature (2910)..(2915): n is a, c, g, or t
  misc_feature (2918)..(2921): n is a, c, g, or t
  misc_feature (2924)..(2930): n is a, c, g, or t
  misc_feature (2933)..(2936): n is a, c, g, or t
  misc_feature (2938)..(2939): n is a, c, g, or t
  misc_feature (2941)..(2942): n is a, c, g, or t
  misc_feature (2944)..(2944): n is a, c, g, or t
  misc_feature (2948)..(2949): n is a, c, g, or t
  misc_feature (2954)..(2957): n is a, c, g, or t
  misc_feature (2959)..(2959): n is a, c, g, or t
  misc_feature (2964)..(2964): n is a, c, g, or t
  misc_feature (2967)..(2974): n is a, c, g, or t
  misc_feature (2977)..(2980): n is a, c, g, or t
  misc_feature (2982)..(2985): n is a, c, g, or t
  misc_feature (2989)..(2990): n is a, c, g, or t
  misc_feature (2992)..(2992): n is a, c, g, or t
  misc_feature (2994)..(2996): n is a, c, g, or t
  misc_feature (2998)..(3004): n is a, c, g, or t
  misc_feature (3008)..(3009): n is a, c, g, or t
  misc_feature (3011)..(3014): n is a, c, g, or t
  misc_feature (3017)..(3018): n is a, c, g, or t
  misc_feature (3020)..(3020): n is a, c, g, or t
  misc_feature (3024)..(3026): n is a, c, g, or t
  misc_feature (3030)..(3031): n is a, c, g, or t
  misc_feature (3036)..(3044): n is a, c, g, or t
  misc_feature (3046)..(3048): n is a, c, g, or t
  misc_feature (3052)..(3052): n is a, c, g, or t
  misc_feature (3059)..(3059): n is a, c, g, or t
  misc_feature (3062)..(3062): n is a, c, g, or t
  misc_feature (3065)..(3065): n is a, c, g, or t
  misc_feature (3067)..(3068): n is a, c, g, or t
  misc_feature (3075)..(3076): n is a, c, g, or t
  misc_feature (3079)..(3080): n is a, c, g, or t
  misc_feature (3083)..(3083): n is a, c, g, or t
  misc_feature (3085)..(3088): n is a, c, g, or t
  misc_feature (3090)..(3091): n is a, c, g, or t
  misc_feature (3093)..(3093): n is a, c, g, or t
  misc_feature (3095)..(3095): n is a, c, g, or t
  misc_feature (3097)..(3099): n is a, c, g, or t
  misc_feature (3102)..(3106): n is a, c, g, or t
  misc_feature (3108)..(3108): n is a, c, g, or t
  misc_feature (3110)..(3112): n is a, c, g, or t
  misc_feature (3114)..(3116): n is a, c, g, or t
  misc_feature (3118)..(3119): n is a, c, g, or t
  misc_feature (3121)..(3122): n is a, c, g, or t
  misc_feature (3126)..(3126): n is a, c, g, or t
  misc_feature (3129)..(3130): n is a, c, g, or t
  misc_feature (3132)..(3132): n is a, c, g, or t
  misc_feature (3135)..(3136): n is a, c, g, or t
  misc_feature (3138)..(3143): n is a, c, g, or t
  misc_feature (3145)..(3148): n is a, c, g, or t
  misc_feature (3150)..(3152): n is a, c, g, or t
  misc_feature (3154)..(3158): n is a, c, g, or t
  misc_feature (3160)..(3163): n is a, c, g, or t
  misc_feature (3168)..(3168): n is a, c, g, or t
  misc_feature (3170)..(3170): n is a, c, g, or t
  misc_feature (3172)..(3173): n is a, c, g, or t
  misc_feature (3176)..(3177): n is a, c, g, or t
  misc_feature (3180)..(3183): n is a, c, g, or t
  misc_feature (3185)..(3187): n is a, c, g, or t
  misc_feature (3190)..(3192): n is a, c, g, or t
  misc_feature (3194)..(3198): n is a, c, g, or t
  misc_feature (3200)..(3200): n is a, c, g, or t
  misc_feature (3204)..(3208): n is a, c, g, or t
  misc_feature (3211)..(3215): n is a, c, g, or t
  misc_feature (3218)..(3221): n is a, c, g, or t
  misc_feature (3223)..(3224): n is a, c, g, or t
  misc_feature (3226)..(3227): n is a, c, g, or t
  misc_feature (3229)..(3229): n is a, c, g, or t
  misc_feature (3231)..(3231): n is a, c, g, or t
  misc_feature (3233)..(3234): n is a, c, g, or t
  misc_feature (3238)..(3241): n is a, c, g, or t
  misc_feature (3243)..(3244): n is a, c, g, or t
  misc_feature (3247)..(3247): n is a, c, g, or t
  misc_feature (3253)..(3253): n is a, c, g, or t
  misc_feature (3255)..(3258): n is a, c, g, or t
  misc_feature (3260)..(3260): n is a, c, g, or t
  misc_feature (3263)..(3268): n is a, c, g, or t
  misc_feature (3270)..(3270): n is a, c, g, or t
  misc_feature (3272)..(3273): n is a, c, g, or t
  misc_feature (3275)..(3276): n is a, c, g, or t
  misc_feature (3278)..(3278): n is a, c, g, or t
  misc_feature (3281)..(3282): n is a, c, g, or t
  misc_feature (3285)..(3285): n is a, c, g, or t
  misc_feature (3289)..(3290): n is a, c, g, or t
  misc_feature (3292)..(3292): n is a, c, g, or t
  misc_feature (3295)..(3298): n is a, c, g, or t
  misc_feature (3302)..(3303): n is a, c, g, or t
  misc_feature (3305)..(3308): n is a, c, g, or t
  misc_feature (3310)..(3310): n is a, c, g, or t
  misc_feature (3313)..(3313): n is a, c, g, or t
  misc_feature (3315)..(3317): n is a, c, g, or t
  misc_feature (3321)..(3325): n is a, c, g, or t
  misc_feature (3327)..(3327): n is a, c, g, or t
  misc_feature (3330)..(3334): n is a, c, g, or t
  misc_feature (3338)..(3340): n is a, c, g, or t
  misc_feature (3343)..(3345): n is a, c, g, or t
  misc_feature (3349)..(3350): n is a, c, g, or t
  misc_feature (3352)..(3353): n is a, c, g, or t
  misc_feature (3355)..(3357): n is a, c, g, or t
  misc_feature (3361)..(3363): n is a, c, g, or t
  misc_feature (3367)..(3369): n is a, c, g, or t
  misc_feature (3371)..(3372): n is a, c, g, or t
  misc_feature (3374)..(3374): n is a, c, g, or t
  misc_feature (3376)..(3380): n is a, c, g, or t
  misc_feature (3384)..(3386): n is a, c, g, or t
  misc_feature (3392)..(3392): n is a, c, g, or t
  misc_feature (3394)..(3395): n is a, c, g, or t
  misc_feature (3399)..(3399): n is a, c, g, or t
  misc_feature (3401)..(3401): n is a, c, g, or t
  misc_feature (3403)..(3404): n is a, c, g, or t
  misc_feature (3406)..(3407): n is a, c, g, or t
  misc_feature (3409)..(3409): n is a, c, g, or t
  misc_feature (3419)..(3419): n is a, c, g, or t
  misc_feature (3422)..(3422): n is a, c, g, or t
  misc_feature (3425)..(3425): n is a, c, g, or t
  misc_feature (3428)..(3428): n is a, c, g, or t
  misc_feature (3432)..(3432): n is a, c, g, or t
  misc_feature (3439)..(3439): n is a, c, g, or t
  misc_feature (3442)..(3442): n is a, c, g, or t
  misc_feature (3445)..(3450): n is a, c, g, or t
  misc_feature (3453)..(3454): n is a, c, g, or t
  misc_feature (3457)..(3457): n is a, c, g, or t
  misc_feature (3459)..(3459): n is a, c, g, or t
  misc_feature (3461)..(3463): n is a, c, g, or t
  misc_feature (3467)..(3469): n is a, c, g, or t
  misc_feature (3471)..(3472): n is a, c, g, or t
  misc_feature (3474)..(3477): n is a, c, g, or t
  misc_feature (3479)..(3479): n is a, c, g, or t
  misc_feature (3484)..(3485): n is a, c, g, or t
  misc_feature (3488)..(3488): n is a, c, g, or t
  misc_feature (3491)..(3491): n is a, c, g, or t
  misc_feature (3493)..(3494): n is a, c, g, or t
  misc_feature (3497)..(3498): n is a, c, g, or t
  misc_feature (3501)..(3501): n is a, c, g, or t
  misc_feature (3506)..(3506): n is a, c, g, or t
  misc_feature (3511)..(3512): n is a, c, g, or t
  misc_feature (3514)..(3514): n is a, c, g, or t
  misc_feature (3518)..(3520): n is a, c, g, or t
  misc_feature (3522)..(3522): n is a, c, g, or t
  misc_feature (3524)..(3526): n is a, c, g, or t
  misc_feature (3528)..(3528): n is a, c, g, or t
  misc_feature (3531)..(3531): n is a, c, g, or t
  misc_feature (3537)..(3537): n is a, c, g, or t
  misc_feature (3539)..(3539): n is a, c, g, or t
  misc_feature (3541)..(3543): n is a, c, g, or t
  misc_feature (3545)..(3545): n is a, c, g, or t
  misc_feature (3552)..(3552): n is a, c, g, or t
  misc_feature (3557)..(3558): n is a, c, g, or t
  misc_feature (3560)..(3560): n is a, c, g, or t
  misc_feature (3564)..(3564): n is a, c, g, or t
  misc_feature (3566)..(3568): n is a, c, g, or t
  misc_feature (3571)..(3572): n is a, c, g, or t
  misc_feature (3574)..(3574): n is a, c, g, or t
  misc_feature (3577)..(3578): n is a, c, g, or t
  misc_feature (3583)..(3583): n is a, c, g, or t
  misc_feature (3585)..(3585): n is a, c, g, or t
  misc_feature (3587)..(3587): n is a, c, g, or t
  misc_feature (3590)..(3590): n is a, c, g, or t
  misc_feature (3593)..(3594): n is a, c, g, or t
  misc_feature (3598)..(3598): n is a, c, g, or t
  misc_feature (3600)..(3600): n is a, c, g, or t
  misc_feature (3602)..(3602): n is a, c, g, or t
  misc_feature (3604)..(3604): n is a, c, g, or t
  misc_feature (3607)..(3607): n is a, c, g, or t
  misc_feature (3610)..(3610): n is a, c, g, or t
  misc_feature (3613)..(3613): n is a, c, g, or t
  misc_feature (3615)..(3616): n is a, c, g, or t
  misc_feature (3618)..(3618): n is a, c, g, or t
  misc_feature (3621)..(3621): n is a, c, g, or t
  misc_feature (3624)..(3624): n is a, c, g, or t
  misc_feature (3627)..(3627): n is a, c, g, or t
  misc_feature (3630)..(3634): n is a, c, g, or t
  misc_feature (3636)..(3638): n is a, c, g, or t
  misc_feature (3640)..(3640): n is a, c, g, or t
  misc_feature (3642)..(3642): n is a, c, g, or t
  misc_feature (3644)..(3645): n is a, c, g, or t
  misc_feature (3648)..(3648): n is a, c, g, or t
  misc_feature (3652)..(3654): n is a, c, g, or t
  misc_feature (3658)..(3658): n is a, c, g, or t
  misc_feature (3662)..(3673): n is a, c, g, or t
  misc_feature (3675)..(3677): n is a, c, g, or t
  misc_feature (3680)..(3681): n is a, c, g, or t
  misc_feature (3684)..(3684): n is a, c, g, or t
  misc_feature (3687)..(3687): n is a, c, g, or t
  misc_feature (3690)..(3690): n is a, c, g, or t
  misc_feature (3693)..(3693): n is a, c, g, or t
  misc_feature (3696)..(3696): n is a, c, g, or t
  misc_feature (3698)..(3701): n is a, c, g, or t
  misc_feature (3703)..(3703): n is a, c, g, or t
  misc_feature (3705)..(3708): n is a, c, g, or t
  misc_feature (3710)..(3710): n is a, c, g, or t
  misc_feature (3713)..(3715): n is a, c, g, or t
  misc_feature (3717)..(3722): n is a, c, g, or t
  misc_feature (3725)..(3725): n is a, c, g, or t
  misc_feature (3728)..(3728): n is a, c, g, or t
  misc_feature (3732)..(3732): n is a, c, g, or t
  misc_feature (3735)..(3735): n is a, c, g, or t
  misc_feature (3739)..(3742): n is a, c, g, or t
  misc_feature (3744)..(3747): n is a, c, g, or t
  misc_feature (3749)..(3751): n is a, c, g, or t
  misc_feature (3753)..(3753): n is a, c, g, or t
  misc_feature (3756)..(3759): n is a, c, g, or t
  misc_feature (3763)..(3763): n is a, c, g, or t
  misc_feature (3765)..(3765): n is a, c, g, or t
  misc_feature (3768)..(3768): n is a, c, g, or t
  misc_feature (3770)..(3770): n is a, c, g, or t
  misc_feature (3773)..(3776): n is a, c, g, or t
  misc_feature (3778)..(3778): n is a, c, g, or t
  misc_feature (3781)..(3784): n is a, c, g, or t
  misc_feature (3786)..(3787): n is a, c, g, or t
  misc_feature (3790)..(3792): n is a, c, g, or t
  misc_feature (3795)..(3795): n is a, c, g, or t
  misc_feature (3797)..(3797): n is a, c, g, or t
  misc_feature (3803)..(3807): n is a, c, g, or t
  misc_feature (3809)..(3811): n is a, c, g, or t
  misc_feature (3813)..(3813): n is a, c, g, or t
  misc_feature (3817)..(3817): n is a, c, g, or t
  misc_feature (3819)..(3819): n is a, c, g, or t
  misc_feature (3822)..(3822): n is a, c, g, or t
  misc_feature (3826)..(3826): n is a, c, g, or t
  misc_feature (3828)..(3831): n is a, c, g, or t
  misc_feature (3834)..(3836): n is a, c, g, or t
  misc_feature (3838)..(3847): n is a, c, g, or t
  misc_feature (3849)..(3850): n is a, c, g, or t
  misc_feature (3852)..(3853): n is a, c, g, or t
  misc_feature (3856)..(3856): n is a, c, g, or t
  misc_feature (3859)..(3860): n is a, c, g, or t
  misc_feature (3862)..(3863): n is a, c, g, or t
  misc_feature (3869)..(3869): n is a, c, g, or t
  misc_feature (3872)..(3872): n is a, c, g, or t
  misc_feature (3874)..(3874): n is a, c, g, or t
  misc_feature (3878)..(3884): n is a, c, g, or t
  misc_feature (3886)..(3886): n is a, c, g, or t
  misc_feature (3888)..(3891): n is a, c, g, or t
  misc_feature (3894)..(3896): n is a, c, g, or t
  misc_feature (3898)..(3902): n is a, c, g, or t
  misc_feature (3904)..(3904): n is a, c, g, or t
  misc_feature (3906)..(3907): n is a, c, g, or t
  misc_feature (3909)..(3909): n is a, c, g, or t
  misc_feature (3912)..(3913): n is a, c, g, or t
  misc_feature (3916)..(3916): n is a, c, g, or t
  misc_feature (3919)..(3920): n is a, c, g, or t
  misc_feature (3922)..(3923): n is a, c, g, or t
  misc_feature (3925)..(3925): n is a, c, g, or t
  misc_feature (3932)..(3932): n is a, c, g, or t
  misc_feature (3935)..(3935): n is a, c, g, or t
  misc_feature (3938)..(3941): n is a, c, g, or t
  misc_feature (3943)..(3943): n is a, c, g, or t
  misc_feature (3946)..(3946): n is a, c, g, or t
  misc_feature (3948)..(3948): n is a, c, g, or t
  misc_feature (3951)..(3952): n is a, c, g, or t
  misc_feature (3955)..(3955): n is a, c, g, or t
  misc_feature (3957)..(3958): n is a, c, g, or t
  misc_feature (3961)..(3962): n is a, c, g, or t
  misc_feature (3964)..(3965): n is a, c, g, or t
  misc_feature (3968)..(3968): n is a, c, g, or t
  misc_feature (3970)..(3970): n is a, c, g, or t
  misc_feature (3976)..(3976): n is a, c, g, or t
  misc_feature (3978)..(3980): n is a, c, g, or t
  misc_feature (3983)..(3983): n is a, c, g, or t
  misc_feature (3985)..(3986): n is a, c, g, or t
  misc_feature (3989)..(3991): n is a, c, g, or t
  misc_feature (3994)..(4000): n is a, c, g, or t
ggagtactatcgatggcggcggtgccgttcaattgacgagcgcggatttacataaacacgattcgaactcttttctcaagttcgacgaggaaaacgaagaaagcatcgccaacgtagagatgaagaaagcagtggagcagtagattatatttagttctttatataccaagtacttttcaacacttctcatcaaagctcttcgtttcgtatgtctatgctcgctaaggcgtctacgattcgggaccacaatttttcatccacgtctcgaggtctcgagctcgtgtcgatgacgccagtttctcgggtaacttccgccgcgttgtataacttcatcaacgtttttgtctcggctaagacgacaaagtgtaacgcctgtctcgagtgctctagtttatttctcaagtcgcgctctttgattttcatcttgttctctttcgcttgcacgtccacttcgaggcgagctctcgtttcgacttcttcgttgactttgactaacgcgttggcagcatccaactcagccgctttcacgcggtcttcgcaccgctccaactgtctctctaaactttgcacttgcattttcatcgctcggttttctgagattgccgccgactctttccgcttcaacgccatctccgcgtctgttttcgcgttgcgaacggctctctcggcttgaaatttctcctcttcggctgatttcaacgcctctctcgccgctctgtgcgttttttccaacatttccaagtgtaaatctgccgcttgtaacttttcttccgtgaattcgtgctctcttttgagtttatcgaacgcataagatatgtttttgttctcatcgcgaagcgcgttggcgtctcgaatctccttttcgagttctttttggagggtccatcgagtagcgtctaatcgtttcaattcctccgaacgctcgtactcttcttgtttccgctcggcttgttcgtaccgtgtttgcatttctgtcttcacgccaccttgatggtgatgtgtgttctcttcgtcatggttgtagtatccatcgtcttcttcgtcttcctcgtccagcgggtcgttcaataaaaccgattgttgttttcgctgttgttgcttcttcgcagcgacgttcatagacgaaggggaggaagaagtagaagcattcttcgatctcgcattggccaactccaatcgcaaactcgcaatcttttccgtcttactcttcaactcatcctcgaacgaacaaatcaantccgtcacgtcttttcgttcggcttccagctttctctccgcctcgtccgcttttcgttcggcttcgtgcgtcgcctttgccaacgcttctttgaaatcaactctttgtttcatcgatgaattcgacgcgatcgatcgtgcctcgtctaaaacgaccagcttcttgtcctctaaagcgctgtacaacaaatcgttctccttcctcttgttttctatttgttcggttaaatcttccacctcgctcgataactttacgttttcctcctttgtccgttcattttccactttcagtttcgaacaactcacgacggcttcctcgtgcgctttcgacaacgccacgcacctcgcctgcgtcgctgccaactcctttgcccctctttccgcttcaatcaacgccacgtctctctcgcgcgacatcaacatttctcggccttgactcctagacagcgactgctccaaatcttccacgtgtaacgttttattcttcacctcttcctctaaatcctcgagttctcgcgtttctttattcctcaaccggtcgttctcaatcgtcaaacgttgaatatcctcttttgtttcgttccgtatcgacgccaatttttcatccaaattcgcaacctcctcgtccgccaaccttcgctctcgctcgataactctcagctgtttatacactttctgcgcttccactaaatctttctgcaatcgattgctgtacgcgtcttgttccttgatgtgctcgttcgcgtcgannagctttgcctgtttgaaagtgtgattganaaggaaaatcatcgttttaaaatgtcaatttaaagcgctcatcacgtttacgtcgtcgcgcgcgaaagaaagattgaaaacagtgacgagttcgagaagaagaggaagacatttgagacgaagaattgtacgcacctcgagcgtgtccactctcctgtttaatatcagcaccttatccatcgccgtcgctttaaaacgagcactgctcggagaatttcctcctccgcacnatactccgtgttctttgttccatttccttcgcaccgtcatcggtgagtctttctctcgaactctttgttcgtcctcttcgtcgtcgtcgttgatttccccgagcggcgttcgatggtgatatcttttntgagaaaatgacgacgatatttttttcttcgcgaggacagttgtgactccccctcgcgatgatttcntcatctctctctctctctctctttcggtaccacgcgtcgcggtgaataatactcngtattctttcttntnncgcgtngtaatagccagcngtgttcttttgtatctaaaaatgaagagagagagnnnngantttttctttngtttntcttcccccttttttcannnnnntntgtttnnntttnncnnncncnnnnnnnnaaanaacagacanaaaaanaanaanaannntntnnannntttntttttnncncacaaacanaagaganatgngcaanaaataaananaccnaaaacctcttnnnaangagagagangnntgagagggaaaagagagagagagagagagnncacncncgcgcgcgcgnnnacgggnnnnntttattaaaannaaaanannaaaanaaaaannannnnnnatnnnnagnngnaaaannaanttntanntnnnnaannnannnnnnnnanntnnnnnnaannnntannnnnnnagnnnngnngnntntganngcgannnnanagaangannnnnnnntannnnannnngagnngngnnnannnnnnnacanntnnnncannanaatnnntttnnatgannnnnnnnngnnnaaanaaaaganganggngnnggaaaannagnnggngnnnngnnanangnnnccnnnnnanannntnnngnngnncaanaannanaannannnnnnannnntnnngnnnnngnnnncgacngngnncgnnatnnnngnnncgnnntnnnnngncacnnnnncgnnnnnatnnnnanngnntngnannagannnntnntcncgcacncnnnnangannnnnngngnnannanagnncgngagnngntcnnnntgtnntnnnngngtnannnaaannnnnanaannnnnagannnaannngagnngnngnnngcgnnngcgnnnanngngnnnnngagnnngtgtgngnncgancncnngnnangcgcgagagnganganaangagngagaganaanagnnnnnngannttnanannnagannnanngnnnnanagagnnagngangnngannagnaaaanaaagnngnagannnanannnanagnaaaaananannngngaaggangaggnngnagangnnnagnngnggnngaggngngngcngtnngagnangnanaanaanaanannanaanaanaangannnnnannngnanannaangcgnnngagngagnnnnnnnnnnnntnnncannaanaanaanaanaanannnntntnnnntnttnnntnnnnnnagnganaganaanaaannnnannnnannntntcnnnntttnanaananaannnnantannnntnnacnnnttnantaaaannnnncnnntnctcncnccncccncnnnnacnnnannnnnnnnnncnntnnttntcnngnntccctntcncnttcnnnnnnncncnnnnacnnnannnnnananntnttnnttntcnngnntncctttcnctntcnnnnanacncnctnntananntcnncnnacncnttttcntnnnccntnnccnnnttnnnnnnn

SEQ ID NO: 1166 - DNA, 4000 bp, Escherichia coli
  misc_feature (1359)..(1359): n is a, c, g, or t
  misc_feature (1991)..(1992): n is a, c, g, or t
  misc_feature (2450)..(2450): n is a, c, g, or t
  misc_feature (3234)..(3234): n is a, c, g, or t
  misc_feature (3269)..(3269): n is a, c, g, or t
  misc_feature (3371)..(3371): n is a, c, g, or t
cgctttgtaaaaaatcagaaaaaaagttataatatataagcaagttcatgcttctcggtcaggtcgtccgggaggtatgaaaaatttaaaattaaaacaacaataaagcctaccttagtcacgctctgcgggacttgggcgaggcgctgaccgaagcacatatttatgtgcttggtcgcgaagggaggtgtaaaaaattaaatgtttaagaaaaaacgaggtttcaccttaattgagttattggtggttatcgccattatcggtattctggctacaattgtgctcgtctcattaaacaccgcaagagttaaggcgagagatgctcgacgtcaatccgatatgcaccaaatcgctttggcaatggaaatgtgttatgatgatacagcttgtaatggtggtgccgtaggacagtatctagaagttacagcagtcactgggccaactgcgataggaacttatatgcctgttgttcccactactgcaggtggcgctggcactgcttatagctgggttgttaataccggaaatcaaagtaaatatttagtttgcgctgcgcttgaaataagtggagctgggtatgtttattctacccaaaatggaacaaagactgtaactggaacttgcccaaccgttttagagtaagaactgattgcctcgctttagcggggctagacaagttgctactgcatcaacagaagcaaattgtcactcaggttctgattttatttttaatttaaattttattatataaacgaagaacagccctttttatattggactgttcttttgttttcttaaaacctgtaacttgtggaaaaagatttgtttaaaggaggccaaaaagatataataaaaataaggttccgttctcaagcagattttttagagtgaaaaataaaattttaaaaaaatcaaaaattatgattaaatttttaaataaaaaatccttaagtttcaccctcacgtcaaaatttggtctgggccgtcaaaagcaagcaagctttaccttaatcgaacttttggtcgtcattgccattatcggcattttggctaccattgtccttgtttcattatcaaatgcccggactaaagccagagatgctcggcgtgaaaccgacatgcatcaattctctgttgcaatggaaatgtattatggcgccgacaacaacaatccgcattatcctgatttgccccctgatgtcgcaactgcaattcctgcactcgcccataatttagcaccttttatggatccggcagctttagatccgtcaaatcccagccgtcaatatttttggagcgactgtggcgacattactcatcagcaatattgcgtttgggctacgcttgaaaatcccagcnccccgacaacttattatattgccaatccaagaggtactaaagagacgacaattccaccttcttgttcggctacgccgaagtgttacgatttataaataaagttaatttcattaattttttaaacactatctttttggatagtgttttatgttaataacgagattgtttttagctgttatttttagtaaaatatagagagacattaattttataaattttaagatttaaaatattaaaataaataaaagcgcctttaccccgttagaaattccaaagaacaaattgttaactgggcaagacataaataaacggagtaaatttctaacggggtttactttaattgaacttttggtggtaattgccattatcggtattttggcgactattgttttggttactttaaataatgccaggcaaaaggcgcgcgatgccaggcgatggagcgatatgacacaaatttccaaagccatggctttatattatgatgcggctaacccgaattcttatcccaatatagcaaataatcagcaatcaattactacgaataggtggaataatagcgggctaaataaatacattgttaaggctcctgttgatccgggcggcaggacttattattggaaagacaggannacaccgcttacgtgtttttgcgtctatgttcagatagaaaatgaggccagcaggtggattttggataatccaaacggggtgaaaaaggttaattcaaatcccaacagcggcaactgctgcacccagtaaatatctttgaagctgttgaagtctgacttcaacaagattaaataaaatgctttatttttttatatttatattcggtctttgcgtgggaagttttttgaacgtgcttatatttcgactggggtcagacggcggagagaatgtaattggcggccacgctgagcgtggccaaagtccagctaagctgggcggccgttcccattgccccaagtgcgggcatcagcttgcctggcaggatctggtgccggttttgagttttgttttgctcaaaggccggtgccggtattgtcagaaggcgattagctggcaatacccgatagttgagctggccncgggtttattatttttaatcctatcgctgtccgacagcgataggattttttcgctgtcggacagcataacattgatttattttttgttcattgcttcctgtctaatagtcatttttgtctccgacctaaaatattttattattcctgacgaaattattattgcgggcgtgattgggacgtttttatataaattgttgtcagccttcgacttcgcttcgcttcgctcaggcaataatttataccctgagcttgtcgaagggcttaaattattgttgccgtttgcattgtccgctgtcatagcttcggcttttttcttggtcattgtgcttataactcgcggccgcggtatgggtttgggcgatgcaaagctggcatttttgatgggcttggttttgggctggccgaagattttgcccgctttgcttttggcttttgtttcgggcgccctagtcggccttatcttaattttagccggcaaagccaaaatgaaatccgaaatcccctttggcacatttttggccgccaatacatttttaataatgcttttgggcgagaagattttaattagatatattaatttaataatttaaactttaaattaaagataagataattacaaaagtgccaaaatagattcgacaagctcactataaattttattccctgagctagtttaccctgagtttatcgaagggaagggtaaaattttggcaggaaaccagtgaaattagcttttgactccagttcaccctgagcgaaatcgaagggctcaggcccagctaanctgggcaggcaataacgagttttgtaaccatctcnataagaattattttcagcatctttaaaattgtgtggataactcaattctttttagggagattatattatataattgaaattgatagaactggtagcgagtanaacccacttgtcattcccgcgaaagcgggaatccaggcaaataaggcaaaatctggattccgggtcaagcccggaatgacagcaagagagcatatcgctttttaccttatttggggcatttgtgcagtttactcgctatgacttcataaacagaaataaatacaatgtccaaacatcagaaaggttttacccccacaccttattttttatttatgaataactcagcaacaaaaaaagttttttttaataatagactgcttattggaaaaagaaaggtgtgggggtttactctttttgagatgttggtggttatagctattattggaataatagccgctttaattttggttcgttacagagaaggtcaaaaaacttataccttatcgcaagcggcgcaaatattggtcagcgatttgcgccaagcacaaaccatggcaataactggcgctgacgtgaaaaagcccgacgggacggattatccatcgatagggggctatggtatttatataaacgatgccaattcctattatctctttttaaataccaattccgatcctttgaatggctgtccccaaggtgcagtcccggaagtaatcttaaaaacagttaatttttcaagtggcataact

SEQ ID NO: 1167 - DNA, 4000 bp, Escherichia coli
  misc_feature (58)..(58): n is a, c, g, or t
  misc_feature (79)..(79): n is a, c, g, or t
  misc_feature (82)..(82): n is a, c, g, or t
  misc_feature (103)..(103): n is a, c, g, or t
  misc_feature (118)..(118): n is a, c, g, or t
  misc_feature (121)..(121): n is a, c, g, or t
  misc_feature (127)..(127): n is a, c, g, or t
  misc_feature (133)..(133): n is a, c, g, or t
  misc_feature (178)..(178): n is a, c, g, or t
  misc_feature (181)..(181): n is a, c, g, or t
  misc_feature (199)..(199): n is a, c, g, or t
  misc_feature (202)..(202): n is a, c, g, or t
  misc_feature (214)..(214): n is a, c, g, or t
  misc_feature (220)..(220): n is a, c, g, or t
  misc_feature (256)..(256): n is a, c, g, or t
  misc_feature (262)..(262): n is a, c, g, or t
  misc_feature (289)..(289): n is a, c, g, or t
  misc_feature (354)..(355): n is a, c, g, or t
  misc_feature (367)..(367): n is a, c, g, or t
  misc_feature (385)..(385): n is a, c, g, or t
  misc_feature (714)..(714): n is a, c, g, or t
  misc_feature (749)..(749): n is a, c, g, or t
  misc_feature (752)..(752): n is a, c, g, or t
  misc_feature (1031)..(1031): n is a, c, g, or t
  misc_feature (1046)..(1046): n is a, c, g, or t
  misc_feature (1073)..(1073): n is a, c, g, or t
  misc_feature (1085)..(1085): n is a, c, g, or t
  misc_feature (1091)..(1091): n is a, c, g, or t
  misc_feature (1094)..(1094): n is a, c, g, or t
  misc_feature (1109)..(1109): n is a, c, g, or t
  misc_feature (1130)..(1130): n is a, c, g, or t
  misc_feature (1136)..(1136): n is a, c, g, or t
  misc_feature (1166)..(1166): n is a, c, g, or t
  misc_feature (1175)..(1175): n is a, c, g, or t
  misc_feature (1193)..(1193): n is a, c, g, or t
  misc_feature (1199)..(1199): n is a, c, g, or t
  misc_feature (1313)..(1313): n is a, c, g, or t
  misc_feature (1358)..(1358): n is a, c, g, or t
  misc_feature (1496)..(1496): n is a, c, g, or t
  misc_feature (1508)..(1508): n is a, c, g, or t
  misc_feature (1550)..(1550): n is a, c, g, or t
  misc_feature (1607)..(1607): n is a, c, g, or t
  misc_feature (1613)..(1613): n is a, c, g, or t
  misc_feature (1730)..(1730): n is a, c, g, or t
  misc_feature (1754)..(1754): n is a, c, g, or t
  misc_feature (1757)..(1757): n is a, c, g, or t
  misc_feature (1940)..(1940): n is a, c, g, or t
  misc_feature (2518)..(2518): n is a, c, g, or t
  misc_feature (2810)..(2810): n is a, c, g, or t
  misc_feature (3530)..(3530): n is a, c, g, or t
  misc_feature (3634)..(3634): n is a, c, g, or t
  misc_feature (3748)..(3748): n is a, c, g, or t
  misc_feature (3961)..(3961): n is a, c, g, or t
cgcagtgtacttcatttctatctggaaagcatagcctttgaagcgaacttcgtcgagnggaatggtttcgagcaccttncgncgatagcaaacaaagcctgcngtggtgtcgtgaacntgnaatccngttacnaaacgtacatacttgctggcaaaatagctcatcaaaacacgtccnatnggccagttcaccacattnacnccgcttacatancgtganccaacagccacatcgaagccctcgtcgtgcgtagcngcatanaggcgaggaaggtcgttagggtcgtgnctgaagtctgcgtccatctcaaatatatagtcatagccatgctccaatgcccatttgaaaccacnnatataagcggtnccaagtcctaacttaccngaacgctcaatgataaataagcggtcggcaaactcttcttttatgagtcggtgtacaatctgtgcggttccgtcaggacttccgtcgtcaattactaagatatgaaaacacttctccaaaccgaaaacagctcggataatattctccatattctctttttcgttgtatgtaggaattattactatactatcgcttgtcataccaaatatattctatactgcaaaagtaagataaatatccgaatatcccaaatgttataaacagtttgcacttaaaagcacgttaaatgactttgtgcgtatctattgttagacgaatatattatagcnctttcggtctccattctctatatgtttagacgaanttnatatcatattaaactggatataacgctatattctttagcgcatcacatcatattagaacactgcactttacagatgcacttttttttagacataacactgagttcattatcagccttgattttgtggtaaaactggctttaaatagcaagagccaacacgctgtacggcatgtcggctcttacggttcttatatatattgcaaatgcaaaagagttcctttagtctattcgtcttcgtccttaacttctgcttcgtgttcagcaatgagggtctgctgnagttcgttaggcacnagttcgtagcttgagaacttggtggtnaaacttgcacgnccaccngtnagcgaactcagaganatgctgtagcttgccaattcnttcaanggaatcttggcttgcagcttctggtagccngcttcgctntccattcccattatcatngcacgncgtccttgcaagtcgctcattacgtcgcccatgtaatcgcccggcacataaacttccaaatcgtatataggctcgagaattttcggtcctgcaattttgaaagcatcagagaangcgtggcgagcagcaagtgtaaacgaaagttcattagagtctacngggtgcatcttaccatcgtaaacaaccacgcgaacgtcgcgagcgtagcttccagtcaatggtccgcgttccatacagtccataatacccttcaaaatagctggcataaagcgtgtgtcgatggctccacctacaacngaattgatgaanacgagcttaccgccccaaggcaatgtcttttcttccttaccntttatattcatcttaaactcttgtccgttgaacttatacattgttgggtctggcatnccttcngcgtatggctctacgatgaggtgcacttcgccaaactgtcctgcgccaccgctctgcttcttgtggcgatattcagccttcgcctgcttggtaatggtttcacgataaggtatgcgngcttccttgaatacggtttgaagnttntcattattctccaaacgccacttcaaagtgcgcaagtggaattcgccttgtccttttacgatggtctgacgtaactctttactttgctcaacaagccatgttggatcttcttgacgcatcttcaacaatgccgccataagcttttctgtatcttgagagtttacagcctcgatggcacgcatntactttggattcggatacttaatgaagtcgaagtgctgttctacacccttaccattcaatgtattgcctgtcttaacgtctttcaatttcactgtacaaccaatatctccagcattaacttgctcaacaggtatacggtttgcacctgcacaagcaaacagttgtccgatgcgttctttagatcctcggtctgcgttagttaagtcgtcgcccaccttaatggctccactcataactttaaaatagctcacctctccgatatgtggttctactcctgttttgaagaagtaaacagattcaggaccatttgagtcgggtgtaacttcttctccacgtgcgttatgtatttttggcatctcgctaacgaaaggtacaacgttacccaaaaactccattaagcgacgcacgcccatatctttaccagcacaaacacagaatacaggaaagatgctacgtgcaataagtcctttacgaataccctcgcgcatttcgtcttctgttaatgtttcagtctcaaagaacttttccatcaatgtttcgtcattctctgcggcagcttcaaccaatgctttgtgtanctccatagccttatccatttcttcagcaggaatatcttctatgataggcatacctccttctggtttccaactgtacttcttcatcaacaaaacatctataatactgttaaagtttgcgcctgttgctgtgggatattgtatttgtacacatttaggtccatatatttcccgcatactattcataacgttatcgaagtcgcatttgtcggaatctaattgattgactaagaagattacaggtttcttcaacttctctgtgtagcggaagttgttctgtgttcctacttcaggnccatattgtccgttgataagaatcactgcctggtcggtaacattcaatgctgttatcgcaccacctacgaaatcatcgcttccagggcaatcaattatgtttagctttttgttgttccattctacatggaacactgtaggaaatacagaatagccgtattcttgttctacgggaaagtaatcgcaaacagtattctttgcttctactgtaccacggcgctttattataccagcaccaaataacatactttcggcaagagtagtcttgccgctacccgcactgccaagcaatgcaatgttcttaatctcgtttgttttatatactctcataaccacaatagatttaaaaggtgtttctaaaagtctactatgcaatacatataagtctgttagaacgctaccttaaggttgttagtattatgttttgtgtagggttataagctatgcttattactactgacgcctaagttatacattttattttatctaaccaaactattcgctacaaataataaaagtattaaaagaaattattaattttgcactgaaataattcgtttcaaagcttatcaccttatataatatatggcaggactttatttccatattcctttttgtgcaagccgatgcatttattgtggcttttattctaccataacaccacacgctgagaaagcaaatacgatggatttgtatgtagatgcattatgcaaagaagccntaacagaaaagaattaccttttcggagaatattctaacactgctgaacgcattgaaacaatttactttggaggtggtacaccatcgcaattgcaggcttgccanattgagaagatattccgctgtattgccgataactatgccgacagaatgttaaactacagcgatatggaaatatctttggagtgtaaccctgatgatattactcccgaatttgcngaaaacctcagacacttgcctatcaatcgcatatcgatgggtgcacagactttctcggacgaacgattaaagtttctccgccgacgtcataaagcttccgatgtacgaactgctattgagcgtctgcgccgtgtaggaatagagaatatttccatcgaccttatgtttggctttcctaacgaaaccatagaacaatggcaactcgacatcganaaagccattgccttaaacgttgaacatatttcggcttac

SEQ ID NO: 1168 - DNA, 4000 bp, Escherichia coli
  misc_feature (1)..(3): n is a, c, g, or t
  misc_feature (5)..(5): n is a, c, g, or t
  misc_feature (7)..(10): n is a, c, g, or t
  misc_feature (12)..(16): n is a, c, g, or t
  misc_feature (19)..(20): n is a, c, g, or t
  misc_feature (22)..(23): n is a, c, g, or t
  misc_feature (27)..(28): n is a, c, g, or t
  misc_feature (35)..(35): n is a, c, g, or t
  misc_feature (37)..(38): n is a, c, g, or t
  misc_feature (42)..(44): n is a, c, g, or t
  misc_feature (48)..(48): n is a, c, g, or t
  misc_feature (50)..(51): n is a, c, g, or t
  misc_feature (53)..(54): n is a, c, g, or t
  misc_feature (58)..(59): n is a, c, g, or t
  misc_feature (64)..(64): n is a, c, g, or t
  misc_feature (67)..(67): n is a, c, g, or t
  misc_feature (71)..(71): n is a, c, g, or t
  misc_feature (73)..(74): n is a, c, g, or t
  misc_feature (77)..(78): n is a, c, g, or t
  misc_feature (80)..(80): n is a, c, g, or t
  misc_feature (83)..(84): n is a, c, g, or t
  misc_feature (87)..(87): n is a, c, g, or t
  misc_feature (89)..(90): n is a, c, g, or t
  misc_feature (92)..(97): n is a, c, g, or t
  misc_feature (100)..(100): n is a, c, g, or t
  misc_feature (103)..(103): n is a, c, g, or t
  misc_feature (105)..(105): n is a, c, g, or t
  misc_feature (113)..(114): n is a, c, g, or t
  misc_feature (116)..(117): n is a, c, g, or t
  misc_feature (119)..(119): n is a, c, g, or t
  misc_feature (121)..(125): n is a, c, g, or t
  misc_feature (127)..(128): n is a, c, g, or t
  misc_feature (135)..(137): n is a, c, g, or t
  misc_feature (140)..(142): n is a, c, g, or t
  misc_feature (148)..(148): n is a, c, g, or t
  misc_feature (153)..(153): n is a, c, g, or t
  misc_feature (161)..(162): n is a, c, g, or t
  misc_feature (169)..(171): n is a, c, g, or t
  misc_feature (173)..(175): n is a, c, g, or t
  misc_feature (178)..(179): n is a, c, g, or t
  misc_feature (184)..(184): n is a, c, g, or t
  misc_feature (186)..(187): n is a, c, g, or t
  misc_feature (190)..(190): n is a, c, g, or t
  misc_feature (194)..(200): n is a, c, g, or t
  misc_feature (202)..(202): n is a, c, g, or t
  misc_feature (205)..(207): n is a, c, g, or t
  misc_feature (209)..(211): n is a, c, g, or t
  misc_feature (214)..(214): n is a, c, g, or t
  misc_feature (217)..(217): n is a, c, g, or t
  misc_feature (220)..(220): n is a, c, g, or t
  misc_feature (222)..(222): n is a, c, g, or t
  misc_feature (225)..(227): n is a, c, g, or t
  misc_feature (231)..(231): n is a, c, g, or t
  misc_feature (235)..(236): n is a, c, g, or t
  misc_feature (239)..(240): n is a, c, g, or t
  misc_feature (243)..(243): n is a, c, g, or t
  misc_feature (252)..(253): n is a, c, g, or t
  misc_feature (257)..(258): n is a, c, g, or t
  misc_feature (264)..(264): n is a, c, g, or t
  misc_feature (266)..(267): n is a, c, g, or t
  misc_feature (271)..(273): n is a, c, g, or t
  misc_feature (276)..(276): n is a, c, g, or t
  misc_feature (279)..(281): n is a, c, g, or t
  misc_feature (284)..(284): n is a, c, g, or t
  misc_feature (287)..(288): n is a, c, g, or t
  misc_feature (290)..(290): n is a, c, g, or t
  misc_feature (292)..(292): n is a, c, g, or t
  misc_feature (303)..(303): n is a, c, g, or t
  misc_feature (305)..(305): n is a, c, g, or t
  misc_feature (308)..(308): n is a, c, g, or t
  misc_feature (310)..(310): n is a, c, g, or t
  misc_feature (316)..(316): n is a, c, g, or t
  misc_feature (318)..(319): n is a, c, g, or t
  misc_feature (321)..(321): n is a, c, g, or t
  misc_feature (324)..(324): n is a, c, g, or t
  misc_feature (326)..(326): n is a, c, g, or t
  misc_feature (328)..(329): n is a, c, g, or t
  misc_feature (331)..(331): n is a, c, g, or t
  misc_feature (336)..(337): n is a, c, g, or t
  misc_feature (339)..(341): n is a, c, g, or t
  misc_feature (343)..(343): n is a, c, g, or t
  misc_feature (346)..(346): n is a, c, g, or t
  misc_feature (349)..(349): n is a, c, g, or t
  misc_feature (355)..(355): n is a, c, g, or t
  misc_feature (362)..(362): n is a, c, g, or t
  misc_feature (364)..(366): n is a, c, g, or t
  misc_feature (369)..(371): n is a, c, g, or t
  misc_feature (374)..(376): n is a, c, g, or t
  misc_feature (378)..(378): n is a, c, g, or t
  misc_feature (380)..(382): n is a, c, g, or t
  misc_feature (385)..(386): n is a, c, g, or t
  misc_feature (388)..(390): n is a, c, g, or t
  misc_feature (392)..(392): n is a, c, g, or t
  misc_feature (394)..(396): n is a, c, g, or t
  misc_feature (398)..(398): n is a, c, g, or t
  misc_feature (404)..(404): n is a, c, g, or t
  misc_feature (407)..(408): n is a, c, g, or t
  misc_feature (410)..(411): n is a, c, g, or t
  misc_feature (413)..(415): n is a, c, g, or t
  misc_feature (419)..(419): n is a, c, g, or t
  misc_feature (423)..(423): n is a, c, g, or t
  misc_feature (425)..(425): n is a, c, g, or t
  misc_feature (429)..(432): n is a, c, g, or t
  misc_feature (436)..(437): n is a, c, g, or t
  misc_feature (445)..(445): n is a, c, g, or t
  misc_feature (448)..(450): n is a, c, g, or t
  misc_feature (454)..(454): n is a, c, g, or t
  misc_feature (456)..(457): n is a, c, g, or t
  misc_feature (465)..(467): n is a, c, g, or t
  misc_feature (470)..(470): n is a, c, g, or t
  misc_feature (474)..(475): n is a, c, g, or t
  misc_feature (479)..(479): n is a, c, g, or t
  misc_feature (486)..(488): n is a, c, g, or t
  misc_feature (492)..(493): n is a, c, g, or t
  misc_feature (496)..(496): n is a, c, g, or t
  misc_feature (499)..(499): n is a, c, g, or t
  misc_feature (501)..(501): n is a, c, g, or t
  misc_feature (504)..(505): n is a, c, g, or t
  misc_feature (507)..(508): n is a, c, g, or t
  misc_feature (514)..(516): n is a, c, g, or t
  misc_feature (518)..(522): n is a, c, g, or t
  misc_feature (524)..(524): n is a, c, g, or t
  misc_feature (528)..(528): n is a, c, g, or t
  misc_feature (533)..(533): n is a, c, g, or t
  misc_feature (536)..(538): n is a, c, g, or t
  misc_feature (540)..(542): n is a, c, g, or t
  misc_feature (544)..(545): n is a, c, g, or t
  misc_feature (548)..(548): n is a, c, g, or t
  misc_feature (551)..(552): n is a, c, g, or t
  misc_feature (554)..(558): n is a, c, g, or t
  misc_feature (560)..(564): n is a, c, g, or t
  misc_feature (568)..(568): n is a, c, g, or t
  misc_feature (570)..(572): n is a, c, g, or t
  misc_feature (576)..(576): n is a, c, g, or t
  misc_feature (579)..(579): n is a, c, g, or t
  misc_feature (581)..(581): n is a, c, g, or t
  misc_feature (584)..(584): n is a, c, g, or t
  misc_feature (586)..(589): n is a, c, g, or t
  misc_feature (591)..(591): n is a, c, g, or t
  misc_feature (596)..(597): n is a, c, g, or t
  misc_feature (599)..(600): n is a, c, g, or t
  misc_feature (602)..(602): n is a, c, g, or t
  misc_feature (608)..(608): n is a, c, g, or t
  misc_feature (614)..(614): n is a, c, g, or t
  misc_feature (621)..(621): n is a, c, g, or t
  misc_feature (624)..(626): n is a, c, g, or t
  misc_feature (630)..(630): n is a, c, g, or t
  misc_feature (632)..(632): n is a, c, g, or t
  misc_feature (636)..(637): n is a, c, g, or t
  misc_feature (643)..(644): n is a, c, g, or t
  misc_feature (646)..(647): n is a, c, g, or t
  misc_feature (652)..(652): n is a, c, g, or t
  misc_feature (654)..(657): n is a, c, g, or t
  misc_feature (659)..(659): n is a, c, g, or t
  misc_feature (667)..(668): n is a, c, g, or t
  misc_feature (670)..(670): n is a, c, g, or t
  misc_feature (672)..(672): n is a, c, g, or t
  misc_feature (676)..(676): n is a, c, g, or t
  misc_feature (679)..(680): n is a, c, g, or t
  misc_feature (683)..(685): n is a, c, g, or t
  misc_feature (688)..(689): n is a, c, g, or t
  misc_feature (694)..(694): n is a, c, g, or t
  misc_feature (697)..(697): n is a, c, g, or t
  misc_feature (700)..(701): n is a, c, g, or t
  misc_feature (707)..(707): n is a, c, g, or t
  misc_feature (712)..(713): n is a, c, g, or t
  misc_feature (716)..(716): n is a, c, g, or t
  misc_feature (719)..(719): n is a, c, g, or t
  misc_feature (721)..(721): n is a, c, g, or t
  misc_feature (725)..(725): n is a, c, g, or t
  misc_feature (737)..(737): n is a, c, g, or t
  misc_feature (739)..(741): n is a, c, g, or t
  misc_feature (747)..(747): n is a, c, g, or t
  misc_feature (751)..(752): n is a, c, g, or t
  misc_feature (755)..(755): n is a, c, g, or t
  misc_feature (758)..(759): n is a, c, g, or t
  misc_feature (762)..(762): n is a, c, g, or t
  misc_feature (764)..(766): n is a, c, g, or t
  misc_feature (768)..(768): n is a, c, g, or t
  misc_feature (771)..(771): n is a, c, g, or t
  misc_feature (1269)..(1269): n is a, c, g, or t
  misc_feature (1452)..(1452): n is a, c, g, or t
  misc_feature (1859)..(1859): n is a, c, g, or t
  misc_feature (1878)..(1878): n is a, c, g, or t
  misc_feature (1977)..(1977): n is a, c, g, or t
  misc_feature (1986)..(1986): n is a, c, g, or t
  misc_feature (1998)..(1998): n is a, c, g, or t
  misc_feature (2209)..(2209): n is a, c, g, or t
  misc_feature (2253)..(2253): n is a, c, g, or t
  misc_feature (2361)..(2361): n is a, c, g, or t
  misc_feature (2428)..(2428): n is a, c, g, or t
  misc_feature (2431)..(2431): n is a, c, g, or t
  misc_feature (2556)..(2556): n is a, c, g, or t
  misc_feature (2610)..(2610): n is a, c, g, or t
  misc_feature (2643)..(2643): n is a, c, g, or t
  misc_feature (2655)..(2655): n is a, c, g, or t
  misc_feature (2686)..(2686): n is a, c, g, or t
  misc_feature (2694)..(2694): n is a, c, g, or t
  misc_feature (2709)..(2709): n is a, c, g, or t
  misc_feature (2712)..(2712): n is a, c, g, or t
  misc_feature (2715)..(2715): n is a, c, g, or t
  misc_feature (2717)..(2717): n is a, c, g, or t
  misc_feature (2811)..(2811): n is a, c, g, or t
  misc_feature (2934)..(2934): n is a, c, g, or t
  misc_feature (2962)..(2962): n is a, c, g, or t
  misc_feature (2995)..(2995): n is a, c, g, or t
  misc_feature (3089)..(3089): n is a, c, g, or t
  misc_feature (3099)..(3100): n is a, c, g, or t
  misc_feature (3103)..(3104): n is a, c, g, or t
  misc_feature (3109)..(3112): n is a, c, g, or t
  misc_feature (3115)..(3115): n is a, c, g, or t
  misc_feature (3120)..(3120): n is a, c, g, or t
  misc_feature (3123)..(3123): n is a, c, g, or t
  misc_feature (3126)..(3126): n is a, c, g, or t
  misc_feature (3129)..(3129): n is a, c, g, or t
  misc_feature (3132)..(3132): n is a, c, g, or t
  misc_feature (3135)..(3135): n is a, c, g, or t
  misc_feature (3139)..(3139): n is a, c, g, or t
  misc_feature (3144)..(3145): n is a, c, g, or t
  misc_feature (3154)..(3156): n is a, c, g, or t
  misc_feature (3159)..(3159): n is a, c, g, or t
  misc_feature (3163)..(3163): n is a, c, g, or t
  misc_feature (3167)..(3167): n is a, c, g, or t
  misc_feature (3172)..(3174): n is a, c, g, or t
  misc_feature (3180)..(3181): n is a, c, g, or t
  misc_feature (3184)..(3184): n is a, c, g, or t
  misc_feature (3188)..(3190): n is a, c, g, or t
  misc_feature (3193)..(3194): n is a, c, g, or t
  misc_feature (3198)..(3198): n is a, c, g, or t
  misc_feature (3200)..(3200): n is a, c, g, or t
  misc_feature (3210)..(3212): n is a, c, g, or t
  misc_feature (3215)..(3215): n is a, c, g, or t
  misc_feature (3221)..(3221): n is a, c, g, or t
  misc_feature (3223)..(3223): n is a, c, g, or t
  misc_feature (3225)..(3229): n is a, c, g, or t
  misc_feature (3232)..(3233): n is a, c, g, or t
  misc_feature (3235)..(3235): n is a, c, g, or t
  misc_feature (3238)..(3239): n is a, c, g, or t
  misc_feature (3241)..(3242): n is a, c, g, or t
  misc_feature (3245)..(3246): n is a, c, g, or t
  misc_feature (3248)..(3248): n is a, c, g, or t
  misc_feature (3250)..(3250): n is a, c, g, or t
  misc_feature (3254)..(3255): n is a, c, g, or t
  misc_feature (3257)..(3257): n is a, c, g, or t
  misc_feature (3259)..(3259): n is a, c, g, or t
  misc_feature (3262)..(3262): n is a, c, g, or t
  misc_feature (3264)..(3265): n is a, c, g, or t
  misc_feature (3268)..(3269): n is a, c, g, or t
  misc_feature (3274)..(3274): n is a, c, g, or t
  misc_feature (3277)..(3277): n is a, c, g, or t
  misc_feature (3283)..(3283): n is a, c, g, or t
  misc_feature (3287)..(3288): n is a, c, g, or t
  misc_feature (3291)..(3291): n is a, c, g, or t
  misc_feature (3295)..(3299): n is a, c, g, or t
  misc_feature (3302)..(3302): n is a, c, g, or t
  misc_feature (3310)..(3310): n is a, c, g, or t
  misc_feature (3312)..(3312): n is a, c, g, or t
  misc_feature (3314)..(3315): n is a, c, g, or t
  misc_feature (3317)..(3322): n is a, c, g, or t
  misc_feature (3331)..(3331): n is a, c, g, or t
  misc_feature (3343)..(3343): n is a, c, g, or t
  misc_feature (3346)..(3346): n is a, c, g, or t
  misc_feature (3364)..(3364): n is a, c, g, or t
  misc_feature (3403)..(3403): n is a, c, g, or t
  misc_feature (3411)..(3411): n is a, c, g, or t
  misc_feature (3445)..(3445): n is a, c, g, or t
  misc_feature (3490)..(3490): n is a, c, g, or t
  misc_feature (3505)..(3505): n is a, c, g, or t
  misc_feature (3517)..(3517): n is a, c, g, or t
  misc_feature (3523)..(3523): n is a, c, g, or t
  misc_feature (3544)..(3544): n is a, c, g, or t
  misc_feature (3550)..(3550): n is a, c, g, or t
  misc_feature (3553)..(3553): n is a, c, g, or t
  misc_feature (3559)..(3559): n is a, c, g, or t
  misc_feature (3568)..(3568): n is a, c, g, or t
  misc_feature (3571)..(3571): n is a, c, g, or t
  misc_feature (3598)..(3598): n is a, c, g, or t
  misc_feature (3606)..(3606): n is a, c, g, or t
  misc_feature (3615)..(3615): n is a, c, g, or t
  misc_feature (3630)..(3631): n is a, c, g, or t
  misc_feature (3633)..(3633): n is a, c, g, or t
  misc_feature (3635)..(3635): n is a, c, g, or t
  misc_feature (3644)..(3646): n is a, c, g, or t
  misc_feature (3649)..(3653): n is a, c, g, or t
  misc_feature (3658)..(3658): n is a, c, g, or t
  misc_feature (3660)..(3661): n is a, c, g, or t
  misc_feature (3664)..(3666): n is a, c, g, or t
  misc_feature (3668)..(3674): n is a, c, g, or t
  misc_feature (3677)..(3679): n is a, c, g, or t
  misc_feature (3681)..(3685): n is a, c, g, or t
  misc_feature (3688)..(3690): n is a, c, g, or t
  misc_feature (3695)..(3695): n is a, c, g, or t
  misc_feature (3700)..(3705): n is a, c, g, or t
  misc_feature (3707)..(3709): n is a, c, g, or t
  misc_feature (3712)..(3713): n is a, c, g, or t
  misc_feature (3716)..(3719): n is a, c, g, or t
  misc_feature (3723)..(3723): n is a, c, g, or t
  misc_feature (3726)..(3728): n is a, c, g, or t
  misc_feature (3730)..(3730): n is a, c, g, or t
  misc_feature (3732)..(3738): n is a, c, g, or t
  misc_feature (3741)..(3744): n is a, c, g, or t
  misc_feature (3747)..(3747): n is a, c, g, or t
  misc_feature (3751)..(3751): n is a, c, g, or t
  misc_feature (3757)..(3758): n is a, c, g, or t
  misc_feature (3760)..(3760): n is a, c, g, or t
  misc_feature (3763)..(3764): n is a, c, g, or t
  misc_feature (3766)..(3769): n is a, c, g, or t
  misc_feature (3771)..(3771): n is a, c, g, or t
  misc_feature (3773)..(3775): n is a, c, g, or t
  misc_feature (3777)..(3778): n is a, c, g, or t
  misc_feature (3781)..(3781): n is a, c, g, or t
  misc_feature (3783)..(3785): n is a, c, g, or t
  misc_feature (3789)..(3789): n is a, c, g, or t
  misc_feature (3792)..(3800): n is a, c, g, or t
  misc_feature (3802)..(3802): n is a, c, g, or t
  misc_feature (3804)..(3806): n is a, c, g, or t
  misc_feature (3808)..(3808): n is a, c, g, or t
  misc_feature (3810)..(3814): n is a, c, g, or t
  misc_feature (3816)..(3816): n is a, c, g, or t
  misc_feature (3819)..(3823): n is a, c, g, or t
  misc_feature (3825)..(3826): n is a, c, g, or t
  misc_feature (3830)..(3831): n is a, c, g, or t
  misc_feature (3834)..(3836): n is a, c, g, or t
  misc_feature (3840)..(3842): n is a, c, g, or t
  misc_feature (3844)..(3844): n is a, c, g, or t
  misc_feature (3846)..(3848): n is a, c, g, or t
  misc_feature (3851)..(3852): n is a, c, g, or t
  misc_feature (3855)..(3855): n is a, c, g, or t
  misc_feature (3857)..(3859): n is a, c, g, or t
  misc_feature (3861)..(3862): n is a, c, g, or t
  misc_feature (3864)..(3868): n is a, c, g, or t
  misc_feature (3870)..(3870): n is a, c, g, or t
  misc_feature (3872)..(3881): n is a, c, g, or t
  misc_feature (3883)..(3883): n is a, c, g, or t
  misc_feature (3885)..(3894): n is a, c, g, or t
  misc_feature (3896)..(3899): n is a, c, g, or t
  misc_feature (3901)..(3901): n is a, c, g, or t
  misc_feature (3903)..(3911): n is a, c, g, or t
  misc_feature (3915)..(3920): n is a, c, g, or t
  misc_feature (3922)..(3925): n is a, c, g, or t
  misc_feature (3928)..(3929): n is a, c, g, or t
  misc_feature (3931)..(3934): n is a, c, g, or t
  misc_feature (3936)..(3940): n is a, c, g, or t
  misc_feature (3942)..(3946): n is a, c, g, or t
  misc_feature (3948)..(3950): n is a, c, g, or t
  misc_feature (3953)..(3953): n is a, c, g, or t
  misc_feature (3955)..(3955): n is a, c, g, or t
  misc_feature (3959)..(3964): n is a, c, g, or t
  misc_feature (3966)..(3966): n is a, c, g, or t
  misc_feature (3968)..(3968): n is a, c, g, or t
  misc_feature (3970)..(3980): n is a, c, g, or t
  misc_feature (3982)..(3982): n is a, c, g, or t
  misc_feature (3984)..(3984): n is a, c, g, or t
  misc_feature (3986)..(3986): n is a, c, g, or t
  misc_feature (3988)..(3989): n is a, c, g, or t
  misc_feature (3991)..(3998): n is a, c, g, or t
  misc_feature (4000)..(4000): n is a, c, g, or t
nnntntnnnncnnnnnttnngnnaaannccaaatntnnttcnnnaagnanncnnaaannttttnttncctntnngtnnanatnnttntnngnnnnnnttnttncncttttttnnanngngnnnnnanntgttttnnnatnnnattgcnttccnaaaagagnnaaagagnnntnnntcnnattanannctntttnnnnnnntnttnnntnnntanccnccnanaannntttntttnncannacnttaaagaannttanngtttgntnntccnnnggnttnnngtntanncngnttttgtatatntnttnantttttngnnanaanancnntncaganntnnntnttncgnggaggngttcttnannntgnnnaannnantnnnttnnannncntnnntnaaaacnctnntnntnnngcanaaancntttnnnnaaannctctttangtnnntgantnncccaaatnnnaanccgnnttcnttgttgnnntttnnccngananccnncnnaaatannnannnnnanattntaatnttnnncnnnannttnttnncnnnnngnnnnngttntnnnaaanttngnaanannnnantttcnntnnanttctcnttcttnaaaaatnttnnnaatntntcgnnatatannanntttancnnnncnaaaaagannancnattnggnntannnaannccatnttnttnnatcttnaaagnntanatntntttnaatatcaccttntnnnttttgntatnnganaanntgngnnncnatngggggtatgaatttcctttttactaattgtaaaaaaggctaccacattactgaggcagccttttttaggattgctatgcttattttttaaacttagcgtatttgtttttaaatttatcgatacgtccggcagtatcaataagtttagatttacctgtgtagtaagggtgtgaagtgcgtgaaatttccaactttactaaaggatactctaccccttctacttcaatggtttctttggtctctactgtcgatttggtgataaagatatcgtcgttcgacatatctttgaaagccaccaaacgataagattctgggtgaatttcttttttcattgcaatgttaattcttttattacgtaattttcagggcgcaaaagtataacattttttttaaatagccaaattactccgagtattttttgatgaggcgcaccattaggtcgcttagtttctctacctgatactcgccaacgctgggctctaaatgcttgtttcctatnccgctatggtcggtgataaacacataggtaccattggtgtacatcgctataaatcgcatcagaaactcagtagttttatctattccactggctactacaggtatgagtttaatgccactagcagcagccgttttcactgagtattgtatactgctgattaccgcaggcttattatgagggggngcatcgagtactaagaaagcgatacgtgtgcgtgcctcaggttgccattgcagttggtttagctgtacgagggctttgtctaccgcttcagggaaatcacccccaccatcagcgcgctgttggctgataaactctgtagtctggttaatatcttcagtaaaaggactgtgttttaccacatactcatcaccctcatcgcgatagaaaaccgtagccgtactgattttcagttgcgtattagtcttttgtacctcattaatcacctttttcaagtccattttcaggaactcaagttcatcgcccatagagcctgtagcatctaccataaaggctatttgcacaaggttagtaggcgaggggagagtctcatcaagggcaatacggttcacctgagtttcgctgatagnagctgtagatacccactgntcattcacttttagccgaagcagagcggtgttgagttctttttctttctgaaaagctcctacccacagttcagcccttccgaggttatcggttttagcngtccaaatnggggtatcgttncgaaagagtgtaacggtagcattagcagccggcttatttttagcggttatggctactgctatacggtgattggtatacatttgccaatcgtcaggaaaacctttgaatggctctttcataagagttttttgatagaaatcccagttgtctaggtcgttccattcgccggcagtcactaagccaccttgaggttgaatacctccttgaccanctttgctttctttagaatgcatagaataatcgtcgtgcattccntcatcaggtctagcgcacgcacttagtaaaagtgctgctataaacgaaagaaaatacagttttttcatatcttaaaatgatttattgattttatttccagccctatcnacagccgttactaccactttactatcagtggcagcagcgtttagtgccgtagtaacatactcccacntantatctacaaatatagcgcttccctcttctattatcgtcacatcatttataatgctaaccgttacccccactactttaaaagtatcagctacctcaatagttatgacctctccctgtttgctaccngtatagttcgcaacatctattgccttaatttcaggcagtctcaaacaatccganagcgccatattataggcattgataaccccgcgncgtttagcttcngcactgtagagagcctttagttcaggatttngcataacncttttagcataagcngtngcnantttaaatccttgagcgcacatctgctgcttggcactgcgggcagcaggttttttcggcattttcgataagaccgtctttccgtgcacccgcttnagcaccacctgttttcctatatttccagagactttttgtagtataatattatcatttgtccgcgccataatccatcgttttatcaaagcacaaagatacaaaataatccctaaactaccaaancttttgtgtaggaaaatcagcgaactgncgcagcttagtatatgatgtaaagtcagtgtangatcagtgtaggattagtgtaagatcagtgtaggatcaaagtatcagcaagcagctaaaatcatttatttgctaaatttcaatcttgcacattnaaaaaaaaannctnnttttnnnncantaaanttnatnatnaancanaatnaaaannaaaatattnnnatntgcnaaantattnnnaatggnngtnatcnnnttnngcancnttgtttttannnccngttcancncnnnnnctnnanttnnannagnnananttgnncntnacnannctnnacggnaanaccatncccnnaanagtnnnnnttnctcgctcnanannannnnnntcaaaaggntatatggggcgnganaatattcccgaaggaacnggtatgctttttatttttaaaagagacgaaaagttaagnttttggangaaaaatacgcctacccccctttcaattgcgttnattaactcgagtggtgaaatccgcgaaacacgcaatatgacaccnttcagccatcaaagngtggactcatcngaaccngtgcgttatgcccttgaagtncctcanggntggttngaaaagaanaanataggaaagggttgtataatcaaactnccatagcngataaagtnaaattaaataataannanantgaaaaaannnaannnnnttttntnnacnnnannnnnnnaannntnnnnnaannnaatanaaatnnnnnnannnatnnatnnnntttnagnnnanannnnnnnttnnnnaanaaanactccnngnganntnnnnanannncnnggngnnntttnttnnnnnnnnnantnnnantnnnnngntannnnntnnaaannttnnntctnnntntnnncgnntanannnannannnnnanannnnnnnnnngntnnnnnnnnnngnnnntnannnnnnnnnagcnnnnnntnnnntanntnnnntnnnnngnnnnngnnnaananaaannnnnnantntnnnnnnnnnnnananananntnnnnnnnnan

SEQ ID NO: 1169 - DNA, 4000 bp, Escherichia coli
  misc_feature (429)..(429): n is a, c, g, or t
  misc_feature (776)..(776): n is a, c, g, or t
  misc_feature (858)..(858): n is a, c, g, or t
  misc_feature (861)..(861): n is a, c, g, or t
  misc_feature (1493)..(1493): n is a, c, g, or t
  misc_feature (1990)..(1990): n is a, c, g, or t
  misc_feature (1999)..(1999): n is a, c, g, or t
  misc_feature (2005)..(2005): n is a, c, g, or t
  misc_feature (2021)..(2021): n is a, c, g, or t
  misc_feature (2031)..(2031): n is a, c, g, or t
ctacatcggcgtgaagaaagcacatgcggtgctcagggaccgggacgcgagcgcgccgaagacgtactcgttttgagaacgagaaagacgagagagaagaaaaagcggggacgcgacgcacggcgtgggaaccaggcaaatagacttagcaagacaagcgagcgcgcgtaagaacaagaatttaatcagcgcaatagaaagacatcgtataactaacatctcgtaccctacacggaaggctggagacgtcgagcagatgcggtggcggaataaatattgacttgagcatcacccccgtggcaccttcggaggcatcctgggcgccaaaagatgtgtttccccgcggggactcgaaccccggaaggccgggtgaaagccgacactgataaccactacatcacgtctccctggtgaaacccagcacggggngcgcgggtgatgagacaattattttttgttctatcttaaaacaaaacgttcacgtctaccacagcccctgaacaaacaccttcatggatccagcccacgcgcgggtgttgtcacttcatggggcagccgttcgcttttgcccacttccacaccttgagttgcctgcgctttgtcgcgtgtgagcacgtcctcctgtcccacgggcagccgttcgagtgcgcccactgcagcgtctcgaggtgcccgccctccgccgcggactcgcacgtctcctcgttccaggggcagccgttcgcgcgcaaccactgcagcacctcgaggtgtccttctctcgccgcccacgcgcncgtcttcttgtcaaacgggcagccgttcgagtgcgcccaccgcagtatctcgaggtgcccgcctcccgccgccaatctgcangtnttctcgtcccacgggaagtcattctcgcgcaaccactttagtattcgagttgtccctccttcgccgcccaaacgcacaacctatcggagtcgtcatccaggtcacctcgctgatgcataagttgcagcccgattgggtctccgaactctatggctttctcagctcccagttcgtacactttacgccccgtcgccgccaccgcatcgcgcatctcacgactcaccgctcggagccgtgcgagatctgagggatcgggcagattgcgcgaactcaggacgtgcgtaatgaggatgtggactggcagagccgcgaaggcggcgccagcatcacgctggtgcgcgatattactaaagtcaggagtgttggggtgggatgtcggcatgctgcgtcgttgcgcgggcgagtgtgacttgagacgcgtttcgtcgcttccgagaaaaggcgtttttttttaaattaaaagtctgaaaataaattcacttctcgcttccttctcgacaccaaaacgctcaaggacgcgcgacggcgccgtcaaccacaacctgcgccgcgtcacaaaccgccgtgacgagcggcgatgtcgcgacttggaacacgtcagtcgaggtggggaggctgtccggccggcagcnaaaaggcaaaaacattttcgcaaaaagtgtgagtttttgtttgcgcgcgtctgtgctcgataagcttcactgcttcaggctcaattttgaccggcatggcggtttcgaagggggcttcaccgaggcggtcaagatgcaaaaacgggctggcagatatgccatgcatcgaaccgccgacgcaacaaacgtcaaaattttggacatcgtttttccaaaaatgatttcccaagattgagcttcacccatgcgacagtgcgatgctcacggaggcactgatggatgcaaaaactgatggatgcaaaagatgtgtttccccgcggggattcgaaccccggtatgccacgtgagaggcgactatgctaaccaactacatcacggggaacacaggcgcaacttccgtaaagttgttgcggtctgtatttcagccaggagttaaccggcttggtggcgattttcgaatctgtctctccattaggagaggcggtttgagcagcagnccacggaangaaggnttataaccacagatanaaaatatacnatctcagagcttatttagtcggcgaaaaacgcaaatccttacgactcaagatcgaggggttaaacgtgccatatacactctagggaaaaacaaaactgagaagcccaaggggcgaagcaacgacacttcccgacactccaacaccgcgccgtgctgtcccctctccacgctcttctcccgcgaagacaccacaccacgccttctctgcgtctcacacgagtctctcacgaaatacgcaccatgcgctcgctgaactggaacacgcgaaccgtcgcggtcgccgcgctggtactcgccgtcgcgtcacaccttcctcacgtcgcactcgcctcgggagacccggaggtggttgacggcgtcgagcctacccacgaaggctccaccgcgttcatcatgggagatgtcgccacgctccttgacgtgaaagacatgcaagaaaccgactcagccgctccggacgagctcgcgaaagggtgggaggacgccttggaagtctcaacgcagcctcgtaggttcgactttgttttcacctcgcctcgccgcgcggtggaaaccatgttccccatgtcttgggacgtccccctgacgccttccacgatgatcacgtccgtgccgcgacggagcttacgaccgtgccatcacggcggtgatgacatgatgcgatacgctgatctgttttccctgacccgcgcgcgcgacgaaaccgacgacgctccgtggttgcgtccgtccatggcgttcaccaccacgaacacgaaaacgctcaccacctgggtcgtgtgcgttgacgtcatcgcgcttctagtcaccgtcgtcgcgctggtgatcattaccgtcctcgccatgcttctcctcgatctgtgcatgtgctgtttcggagtgcgggacggagacgacgaggacggaccggaaaccgcggacgcgtcgacggaaacgcttctcccgttgacggattcgcgtacggagaaacaaaaacaattcgcggaagacgaattgctggttacacaccaatgctgaacactacctctccgtcgctgctgaacacgcgatgtgcgtaccgccgcttgaaacaaacgcgcctacggtgcgttccgggaggtgagaaaataagatcgaaagaacgtgaatcgagaacagacgaaagaacgcaaacagagagactgaaattggacgtaatagtacggacgtagagactgagattggatgtaatacggatgtagagatacggatgtagagactgaggttggatgtaattggatgcataaattggatctccatacaaaacaacgctcatcatcatcatcatccctccttctttctattgctgcagaagccgttccgcgatgaacatgtcttccggcgtggtgactttgatgttgacgtacgacccttccgtgatctgcacgcgtccccccatgaactccacgattgacacgtcgtcggtgacttcgtaccctttttcgttgaccagcgcgaacccgcgtttcagtaaatcgggcttgatcacctgcggcgtttgcatttcccacagtttgcttcggtccaaggtcttggcgattgataaatcgtcgttcacctccttcaccgttgctttgcacggcaccgctaagaccgcggcgccgtgcgtcatggcgtctacgaaacaccgcgccgcgtctttcacgtcggtcaggggacgcgcgctgtcgtggatcgcggcaagcgcggcgccgtcgcgaacggcggacaagccgttgaacaccgaatcctgacgttccttgccgggcagcgcgaaaatcacgggcttgggcactttacagttctcgaacacgtcccggtacgacgggtcgcacaccaccacgatctcccccacctcgtccatctccgcgaacttctggaagctgtacagcgcgatgggcgtgccgagcaggggcaggtactgtttcggcatgtcagcgcccatgcgcttacccacgccgcccgcgagcag

SEQ ID NO: 1170 - DNA, 4000 bp, Escherichia coli
  misc_feature (113)..(113): n is a, c, g, or t
  misc_feature (1168)..(1168): n is a, c, g, or t
  misc_feature (1176)..(1176): n is a, c, g, or t
  misc_feature (1204)..(1204): n is a, c, g, or t
  misc_feature (2003)..(2003): n is a, c, g, or t
  misc_feature (2408)..(2408): n is a, c, g, or t
  misc_feature (2702)..(2702): n is a, c, g, or t
  misc_feature (3053)..(3053): n is a, c, g, or t
atttgctggagcctaccttgaacctcttgagctatattctctctaccaactgttaatgtttgttctaaagtgttgtcaccaacaacatgtcttaacgcactttcaattgcttntcttaggctgccttctggatctttaacatttaaaacaaaatcttttaaattagcaattctatattgtgctgacacagttacatctacaatattttcgtctttggttaacatgctattggtctgggtataacgtctagtcaatgaaacattctcaatatagcgttcgtctattccagccaacctaaagtttaaaccctcttgttgttcttcataaaacttaccaaatctcaaaatgacagctctctcagaagcatctagctgataaatacactgtgatccatagattattaaaaatgcaaaaaaaccatataaaaagattcttgttgttggtattttcatacctccgccatttccagatccagttccagaaccttttccagatgagctatctttaccgccaataaatgctgaaaactttttaattagatcatcgaagtcaggggcatcatttttgcctccccacggatctttatcttgattatcccaattcacaatagattacctcttaatttattctttattataaacctaatttaaggccataaacctttatttaaagggtaaaagacaaactttctacctcttctttgatttgttcttttgaactaaggtcatatttctttaaatccttccatgatctcatccatgttgtttgtctttttgctaattgccttgttgcaaagagagctctatcaaaaaactcactgtcatcatactcattattgattctagctatagcttgtttgtaatttacagattttcggattggatgattttcagaaatattgtattttttaaggagcgagctaacctcatcaagcaggcctgatttaataatttgtttaagtctttgttctattcttgagtgaatcaaggacctatcatcttcaaaaataccatattgatgcacattaaagcgatttgaaagatttgcttcactatttaaccctatttgagagctaaatgactttcctgttatctctattacctcaagagctcttacaattctttgctcatctaactcattaacttggtttgcataattgatatctttntcgatcancataagatggagctcttttatccctttngttaatataattttttcaagattttctctaatctcattatccctttcaggtaaatcatctaagccatttagcaaagatttgaaatacatcattgttccgccaacaaaaacaggaattttttctctctcatgaatagaattaatcagttttattgattgtttataaaaatctgaaactgtaaaaatagattctggttcgatgcaattaactagatggtgaggatacttccttaagatctctttgtttggctttgcagatcctatatcgcaacctttgtagaccattacagaatctacactaattatttctattgcagatgaatcatatatatcaatggccagatcagtcttgcctgatgctgttgaccctaaaataaaaacaattgattttttgatactattcttttttataaggcttcttcgttagtctcacccgttcttattctaataacttcatctatttgcgttatgaatatcttgccatcaccaatttttccagatccagcagattcaataatcgcattctttacagactcgactaattcatcagatgttgctatttcaattttaatttttggaagaaaatcaatagtatattctgcacctctatatagctcagtgtgccccttctgtcttccaaagccctttacctcagtcatggtcatacctgaaacacctattttatctaaagatgctcttacttcttctactttaaatggtttaattattgctgttactagtttcaacttatcacctcttttatattaatcatttctataatgcccgtacactgcttatcngttgagcctttgttctttaaacaaatttcaaaagccttagaagacatattttctcttaaaccattgttattaagcaagtctttgaatccacttaacacatctaaatttttatctatctgcaaacatgcatcttcatcgacaaataattttaagatatcttgaaagttatgcatatgtgggccaacaataaatgggcatctttcaaaggctggctcaataatattatgaccaccattactctgaaataaactcccgccaacaaaagcaaattgagcttttgaataaagctctcttaacattccagtgccctgaattatttcaatgcttttattagcaatatctatgggtacttcttctaagattcttgcattgagattcgatttatctaatagttttttgatcgcnaaggctctctctggatgtctaggggctattacaagaccaattcctggattctctttaacaatcttcttataagcatcaatgattatttcatcttcaccagcatgagtgctcgcagctaaaataaatggtttgttatttttaaaaaaggtttcttctgcattatgatcaatatcaaactttaccgatccaacacactctattttttctgatagtgccccaagtttttcaaaacgtgacgcatgagatttactttgtgtataaattattgatatttttgaaattattttcttaganaagagattaagttttttatagtttttaaatgatttttcagacattcgtgcatttgaaagaatgattggaatattttttgagtgagcaatcgatatcatgcttggccaaatctctgtttcaaaaagtattaatgcttttggattgaaggatctaaaaaaccctgaggtaaaaaatttaaaatcccatggtgcatatacgaccttcaaccttgatccaaatattttatttgcctctctgagaccggtaggagttgagaccgtcaatataacatcatggttttcgagtatcttattaacgatcttagctgaagaaataacttctccaaggctaacagcatgaaaccaaacactnttatcagcttttgagttgtatattccaaatctatttaaaaaattagatctgtagtccttgtcattaaagcttttaaataggattctaataatcagaactggaatcattagaaaaataaaaaggttatataaaaagagaatcatttcttagtcatgcacatttataatgtaataatacagcttaaaagacatgaatagaattttattaaaccttcttataagtttctggaagataatactgctttttcctagacctgttcatataaagcttggttttgccttggggtatttcttttataaatcaaatatgaaaagaaatagatttagtaaggcaaatattgatttatgttttagtattttaagtcctgttgaaagagccaatatagttaaatcaaatatcctaatgtcagggtccattctgtttgatactggaatagcctggttttggtctgacaaaaaaataaataaaaatattaactatgagataagtggcttggatcaacttattgaagagcaaaataataacaatggagtgcttctgttttttaagcattctcttcatctagagctagatgctagattattaggtatgaatgctgacatctatggagtggaaagagttcataattcaaattcatttgactccattcagaactcgggaagactaaaaagccttaaaggtgcttgtgatagaaacaatccaattaaatttatacgctggttaaaaaaaggtaaaacagtcttatatgcaactgaccaagactatggcctaggtcagtcagatgttgttaatttctttggcaatcctgcagcaactatttctgcgcctctaaagattgttaaagccacatcatgcaagacatattttttaaatagctttgttaaaaataataagtacttcatagaaattgaagagttggatttaaataaagagtctggaataacttt

SEQ ID NO: 1171 - DNA, 4000 bp, Escherichia coli
  misc_feature (11)..(11): n is a, c, g, or t
  misc_feature (342)..(343): n is a, c, g, or t
  misc_feature (373)..(373): n is a, c, g, or t
  misc_feature (561)..(561): n is a, c, g, or t
  misc_feature (619)..(619): n is a, c, g, or t
  misc_feature (1473)..(1473): n is a, c, g, or t
  misc_feature (1497)..(1497): n is a, c, g, or t
  misc_feature (1987)..(1988): n is a, c, g, or t
  misc_feature (2007)..(2007): n is a, c, g, or t
  misc_feature (2307)..(2307): n is a, c, g, or t
  misc_feature (2350)..(2350): n is a, c, g, or t
  misc_feature (3196)..(3196): n is a, c, g, or t
  misc_feature (3219)..(3219): n is a, c, g, or t
  misc_feature (3423)..(3423): n is a, c, g, or t
  misc_feature (3564)..(3564): n is a, c, g, or t
  misc_feature (3567)..(3567): n is a, c, g, or t
  misc_feature (3576)..(3576): n is a, c, g, or t
  misc_feature (3591)..(3591): n is a, c, g, or t
ggcacgtcaanctgtcaccatcgaagaaggtttgtcagcactcaatcattttggattttcactcattagttttttattagcactcccgtttatgcagccatttccagtgggtcctatcagtgtattaggaggggttactttcgcagcatttggctggcaaattttaaaagggtataccgtcccgcatttgcctcagaaaataaacgggattgttttaagtgctgataattggcgacgcattacaaatgctgccattaaaattattcagtggactgaaaaatttactaggccacgtttagctttgttaattcgaggttctttaggtgtcaaaattgaagcttnnattctcattctctcaggtgtcctcatggcngttccttttggcatactcccattaaataatttcttcccaggccttgccattgtattttgtgcattaggtcaactccataaagatggattttttattttgattgcattcttttggattctttttaccattctttattttgctgcattttttataggtctctatcttttagggctagaaggactgcatantttcagccactggctccatcaactcgtttcatgaaatcatttgctgacctcttaattncttggcatgccaagtcaggtcggcaccatttaccctggcagcaatcaaaagacccttacaatgtttgggtatcagaaatcatgttgcaacaaactcaagttgcaattgtcattgattattatcatcgattcatgaaaaaattcccgaccattaaggcattggcagatgccgatgaagaagaagtcatgcaattatggagtggtttaggatattaccgccgtgcgcgttttttacacgaaggtgctcaaatgattatggaagagatggaaggtgtctttccttctcaattcgatatgatgatgaaaatacctggcattggacgctctaccgcaggtgccatttcagcattttcgttcaatcaaaaaaaagcaattctcgatggtaatgtaaaacgtgtcttgagccgctattttttagttagagaatggacaggattacctaaaacagaaaaaaaattatggggttatgctgagtcgcttcttccagataaaaacattgcaacttatacgcaagcactgatggatttaggcgctaccgtatgcagcaaaaaaactttgtgtgaaacttgcccattaaaaaaaacatgccttgcatttcagaagaataaagtgcatctggtaccagcttctcgacctcataaaaaaattccaaatgaaacaacacacatggtcattgttaaacatcatgacgaagttttacttattaagagacctcagggaggtatatggggtgggctatggtcgctacctcagtatgaagatcaagctgcgacatctaaagcttggattaaaaaacatttcggattagaaacgagcttgatagaaaaggatcttaaagcttcaacgacattcacncattacaagctcgatattacttanagtatattggaagctaaatcacagcgcgctaaatctcctcacacgtggctctcaataaatactcttgagggtgcagccattcctgccatcatcaggaaaatacttttaaaactctaatgtcatatcgcggtgcagtatttcagcatccaaatatgtgtcgcccgtaacttcaaatccaaacttcacataaaaattgatggcgttacattgagcactgatatgaatactagagagttgtttaagttttgcagtcacaatcgcattttctattaaagtgctcccaacaccttgacctcgatattcttttaatactgccatgcgtcctaattgcatttgacttttaattacaatagccctcgcacacccaatagcttcctcatctttaaaaactaaaaagtgtattgccttttcatccatgccatcccactctaattcaggcgtcactttttgttcttgaataaatactttctcgcgaatattcttgagttgnncatggctatctatccactntacgatctcaactttcagattatttttcataagtgaaatgcttgcatcttaatgctgttagaggcatgatgtgttttctttatatctaattttaaggattatatgaataaatttttacctgctattggacgtgtatttattgcacaaatttttcttgtatccattcttatatcacttaacggcattatgaacacacctgatggttatattgcctaccaaaatggattgatgagtcatggtcttccaggtatttttgctccgatctccgtcattgtgcaacttttgggtggctttgctctntttgtgggttttaagacaagactgtttgcacttatattaacgntttatacatttatcaatgcattgtcttatttttataccgctacattactgccctctccggtgttcctcattccgcttcaacaagcacttcagtacacagcgattacaggcggccttattattttaatgcagaatccggtcacgatctttgcgcttgataatgtaacaaacacaaaaaaacgtaaataagatttatgagcatttaaaaaagcagccatcaaggctgctttttttatattgatctatgtcacatattgttatcaatcatggttagcattaaaatatctcattaagttagaatagaacttatagtttactaatattaaggaatttattatggcagcagcatccacaaaatatacaaagaccgcgatcgtccttcattggctcattggttttggcattatctttatgtttttattaggctggtatatggagggcttaccgaaagaagctcctaaagctatgagttttgatttatttgatttaggcatttatacatggcaattatctgaagaaacttcaccgcgttctttttactttaatttacataaatcaattggtattacgatcttagctcttattgtatttagaattttttggagaattacacatccagcaccagcgcttattaaaaccatgaaagcttgggaaaagaaattagcgaatgctacccaccatgctttatatctcattatggtgttattgcctgtatcgggtgtagtaatggcactctctagtaaatacggcattaaatggtttggtatccctttagcagaaggctttggcaatgaaactgtgagagacttctttaaagtgacacatgaaaatattggtatattactantcgctctttttgcccttcacgtncttggtgttcttaaacatacatttgtgaataaagatggcactttaaagcgcatgacgtttaaataaatttattgatatcttaaagcttcaattggatgaagcttggcggccttagttgctggataataaccaaagaagacgcccacactcgcggccactgaaaaagctaatacgatggatcgcattgaaattaaaatttcagcncccaccattttttttacaagaagtgcaccgcccaatccaagcgcaattccaatcacgcaacctacaatagaaatcacacacgcctctaaaagaaactgaagcagaatatctttttcacgcgcgcctatcgccatacgaatnccnatttcacgngtgcgctcagtgacngacaccaacatgatattcataataccgatgccacctacaagaagcgagatagaagcaatggctcccaataacatcgacatcgtttttgcagtttcacttgcagttttggccatagccgttaaatttctcactgaaaaatcactttctgcattttcacggatattatgtcgctgacgaatcaaatcgttaatcgcatcttcagcaacccccatatatttttctgatttggcttgcgccatgatcatacgaacacttcctggaatttgattaccaaataattttctctgcgctgttgtgatggggacaataatagtatcgtcctgatctcggccatcgaagctttgtcctttactttctaatacacccaaaatcataaatgggctttttttaatacgaatcgttttaccaa

SEQ ID NO: 1172 - DNA, 4000 bp, Escherichia coli
  misc_feature (1973)..(1973): n is a, c, g, or t
  misc_feature (1990)..(1990): n is a, c, g, or t
  misc_feature (2077)..(2077): n is a, c, g, or t
  misc_feature (2079)..(2079): n is a, c, g, or t
  misc_feature (2139)..(2141): n is a, c, g, or t
  misc_feature (2145)..(2145): n is a, c, g, or t
  misc_feature (2147)..(2148): n is a, c, g, or t
  misc_feature (2150)..(2157): n is a, c, g, or t
  misc_feature (2159)..(2160): n is a, c, g, or t
  misc_feature (2163)..(2169): n is a, c, g, or t
  misc_feature (2171)..(2177): n is a, c, g, or t
  misc_feature (2179)..(2181): n is a, c, g, or t
  misc_feature (2183)..(2183): n is a, c, g, or t
  misc_feature (2185)..(2189): n is a, c, g, or t
  misc_feature (2197)..(2197): n is a, c, g, or t
  misc_feature (2201)..(2208): n is a, c, g, or t
  misc_feature (2211)..(2212): n is a, c, g, or t
  misc_feature (2214)..(2218): n is a, c, g, or t
  misc_feature (2221)..(2223): n is a, c, g, or t
  misc_feature (2225)..(2228): n is a, c, g, or t
  misc_feature (2230)..(2238): n is a, c, g, or t
  misc_feature (2240)..(2250): n is a, c, g, or t
  misc_feature (2252)..(2254): n is a, c, g, or t
  misc_feature (2256)..(2256): n is a, c, g, or t
  misc_feature (2258)..(2263): n is a, c, g, or t
  misc_feature (2268)..(2269): n is a, c, g, or t
  misc_feature (2274)..(2276): n is a, c, g, or t
  misc_feature (2278)..(2282): n is a, c, g, or t
  misc_feature (2284)..(2297): n is a, c, g, or t
  misc_feature (2299)..(2299): n is a, c, g, or t
  misc_feature (2301)..(2304): n is a, c, g, or t
  misc_feature (2306)..(2322): n is a, c, g, or t
  misc_feature (2325)..(2326): n is a, c, g, or t
  misc_feature (2328)..(2329): n is a, c, g, or t
  misc_feature (2331)..(2332): n is a, c, g, or t
  misc_feature (2336)..(2339): n is a, c, g, or t
  misc_feature (2341)..(2343): n is a, c, g, or t
  misc_feature (2346)..(2351): n is a, c, g, or t
  misc_feature (2355)..(2356): n is a, c, g, or t
  misc_feature (2359)..(2359): n is a, c, g, or t
  misc_feature (2361)..(2361): n is a, c, g, or t
  misc_feature (2363)..(2363): n is a, c, g, or t
  misc_feature (2365)..(2365): n is a, c, g, or t
  misc_feature (2367)..(2370): n is a, c, g, or t
  misc_feature (2372)..(2373): n is a, c, g, or t
  misc_feature (2375)..(2379): n is a, c, g, or t
  misc_feature (2382)..(2394): n is a, c, g, or t
  misc_feature (2401)..(2405): n is a, c, g, or t
  misc_feature (2411)..(2412): n is a, c, g, or t
  misc_feature (2414)..(2414): n is a, c, g, or t
  misc_feature (2419)..(2419): n is a, c, g, or t
  misc_feature (2423)..(2423): n is a, c, g, or t
  misc_feature (2426)..(2427): n is a, c, g, or t
  misc_feature (2430)..(2430): n is a, c, g, or t
  misc_feature (2432)..(2433): n is a, c, g, or t
  misc_feature (2436)..(2436): n is a, c, g, or t
  misc_feature (2439)..(2440): n is a, c, g, or t
  misc_feature (2442)..(2443): n is a, c, g, or t
  misc_feature (2445)..(2445): n is a, c, g, or t
  misc_feature (2447)..(2447): n is a, c, g, or t
  misc_feature (2449)..(2449): n is a, c, g, or t
  misc_feature (2451)..(2459): n is a, c, g, or t
  misc_feature (2462)..(2462): n is a, c, g, or t
  misc_feature (2466)..(2471): n is a, c, g, or t
  misc_feature (2475)..(2475): n is a, c, g, or t
  misc_feature (2480)..(2491): n is a, c, g, or t
  misc_feature (2493)..(2501): n is a, c, g, or t
  misc_feature (2504)..(2506): n is a, c, g, or t
  misc_feature (2509)..(2516): n is a, c, g, or t
  misc_feature (2518)..(2519): n is a, c, g, or t
  misc_feature (2525)..(2525): n is a, c, g, or t
  misc_feature (2528)..(2529): n is a, c, g, or t
  misc_feature (2531)..(2534): n is a, c, g, or t
  misc_feature (2538)..(2538): n is a, c, g, or t
  misc_feature (2541)..(2549): n is a, c, g, or t
  misc_feature (2551)..(2551): n is a, c, g, or t
  misc_feature (2553)..(2553): n is a, c, g, or t
  misc_feature (2559)..(2559): n is a, c, g, or t
  misc_feature (2561)..(2561): n is a, c, g, or t
  misc_feature (2564)..(2567): n is a, c, g, or t
  misc_feature (2569)..(2569): n is a, c, g, or t
  misc_feature (2571)..(2571): n is a, c, g, or t
  misc_feature (2573)..(2578): n is a, c, g, or t
  misc_feature (2580)..(2580): n is a, c, g, or t
  misc_feature (2583)..(2584): n is a, c, g, or t
  misc_feature (2586)..(2593): n is a, c, g, or t
  misc_feature (2595)..(2602): n is a, c, g, or t
  misc_feature (2604)..(2608): n is a, c, g, or t
  misc_feature (2611)..(2614): n is a, c, g, or t
  misc_feature (2616)..(2618): n is a, c, g, or t
  misc_feature (2627)..(2629): n is a, c, g, or t
  misc_feature (2632)..(2634): n is a, c, g, or t
  misc_feature (2636)..(2636): n is a, c, g, or t
  misc_feature (2641)..(2641): n is a, c, g, or t
  misc_feature (2643)..(2643): n is a, c, g, or t
  misc_feature (2646)..(2647): n is a, c, g, or t
  misc_feature (2649)..(2649): n is a, c, g, or t
  misc_feature (2651)..(2652): n is a, c, g, or t
  misc_feature (2658)..(2662): n is a, c, g, or t
  misc_feature (2664)..(2664): n is a, c, g, or t
  misc_feature (2667)..(2669): n is a, c, g, or t
  misc_feature (2674)..(2676): n is a, c, g, or t
  misc_feature (2679)..(2680): n is a, c, g, or t
  misc_feature (2682)..(2682): n is a, c, g, or t
  misc_feature (2686)..(2686): n is a, c, g, or t
  misc_feature (2690)..(2690): n is a, c, g, or t
  misc_feature (2693)..(2693): n is a, c, g, or t
  misc_feature (2696)..(2697): n is a, c, g, or t
  misc_feature (2700)..(2702): n is a, c, g, or t
  misc_feature (2706)..(2706): n is a, c, g, or t
  misc_feature (2708)..(2708): n is a, c, g, or t
  misc_feature (2710)..(2715): n is a, c, g, or t
  misc_feature (2718)..(2723): n is a, c, g, or t
  misc_feature (2725)..(2725): n is a, c, g, or t
  misc_feature (2727)..(2727): n is a, c, g, or t
  misc_feature (2730)..(2733): n is a, c, g, or t
  misc_feature (2736)..(2737): n is a, c, g, or t
  misc_feature (2742)..(2743): n is a, c, g, or t
  misc_feature (2746)..(2747): n is a, c, g, or t
  misc_feature (2751)..(2751): n is a, c, g, or t
  misc_feature (2753)..(2753): n is a, c, g, or t
  misc_feature (2756)..(2756): n is a, c, g, or t
  misc_feature (2758)..(2758): n is a, c, g, or t
  misc_feature (2760)..(2760): n is a, c, g, or t
  misc_feature (2763)..(2764): n is a, c, g, or t
  misc_feature (2767)..(2771): n is a, c, g, or t
  misc_feature (2773)..(2774): n is a, c, g, or t
  misc_feature (2776)..(2777): n is a, c, g, or t
  misc_feature (2779)..(2779): n is a, c, g, or t
  misc_feature (2781)..(2784): n is a, c, g, or t
  misc_feature (2789)..(2790): n is a, c, g, or t
  misc_feature (2793)..(2794): n is a, c, g, or t
  misc_feature (2796)..(2815): n is a, c, g, or t
  misc_feature (2817)..(2817): n is a, c, g, or t
  misc_feature (2821)..(2821): n is a, c, g, or t
  misc_feature (2824)..(2824): n is a, c, g, or t
  misc_feature (2826)..(2828): n is a, c, g, or t
  misc_feature (2830)..(2830): n is a, c, g, or t
  misc_feature (2832)..(2833): n is a, c, g, or t
  misc_feature (2835)..(2835): n is a, c, g, or t
  misc_feature (2837)..(2838): n is a, c, g, or t
  misc_feature (2841)..(2842): n is a, c, g, or t
  misc_feature (2844)..(2846): n is a, c, g, or t
  misc_feature (2851)..(2851): n is a, c, g, or t
  misc_feature (2856)..(2856): n is a, c, g, or t
  misc_feature (2859)..(2859): n is a, c, g, or t
  misc_feature (2863)..(2863): n is a, c, g, or t
  misc_feature (2866)..(2868): n is a, c, g, or t
  misc_feature (2870)..(2872): n is a, c, g, or t
  misc_feature (2874)..(2875): n is a, c, g, or t
  misc_feature (2877)..(2877): n is a, c, g, or t
  misc_feature (2880)..(2884): n is a, c, g, or t
  misc_feature (2889)..(2891): n is a, c, g, or t
  misc_feature (2897)..(2902): n is a, c, g, or t
  misc_feature (2904)..(2906): n is a, c, g, or t
  misc_feature (2914)..(2915): n is a, c, g, or t
  misc_feature (2917)..(2917): n is a, c, g, or t
  misc_feature (2922)..(2922): n is a, c, g, or t
  misc_feature (2925)..(2926): n is a, c, g, or t
  misc_feature (2929)..(2932): n is a, c, g, or t
  misc_feature (2934)..(2935): n is a, c, g, or t
  misc_feature (2937)..(2937): n is a, c, g, or t
  misc_feature (2940)..(2941): n is a, c, g, or t
  misc_feature (2944)..(2950): n is a, c, g, or t
  misc_feature (2952)..(2953): n is a, c, g, or t
  misc_feature (2955)..(2956): n is a, c, g, or t
  misc_feature (2958)..(2958): n is a, c, g, or t
  misc_feature (2962)..(2962): n is a, c, g, or t
  misc_feature (2964)..(2964): n is a, c, g, or t
  misc_feature (2967)..(2974): n is a, c, g, or t
  misc_feature (2976)..(2978): n is a, c, g, or t
  misc_feature (2981)..(2982): n is a, c, g, or t
  misc_feature (2984)..(2986): n is a, c, g, or t
  misc_feature (2988)..(2991): n is a, c, g, or t
  misc_feature (2993)..(2995): n is a, c, g, or t
  misc_feature (2997)..(2997): n is a, c, g, or t
  misc_feature (2999)..(3000): n is a, c, g, or t
  misc_feature (3004)..(3004): n is a, c, g, or t
  misc_feature (3006)..(3008): n is a, c, g, or t
  misc_feature (3010)..(3011): n is a, c, g, or t
  misc_feature (3013)..(3016): n is a, c, g, or t
  misc_feature (3018)..(3021): n is a, c, g, or t
  misc_feature (3023)..(3023): n is a, c, g, or t
  misc_feature (3025)..(3029): n is a, c, g, or t
  misc_feature (3032)..(3037): n is a, c, g, or t
  misc_feature (3039)..(3048): n is a, c, g, or t
  misc_feature (3050)..(3050): n is a, c, g, or t
  misc_feature (3052)..(3052): n is a, c, g, or t
  misc_feature (3057)..(3062): n is a, c, g, or t
  misc_feature (3065)..(3067): n is a, c, g, or t
  misc_feature (3071)..(3071): n is a, c, g, or t
  misc_feature (3073)..(3073): n is a, c, g, or t
  misc_feature (3078)..(3081): n is a, c, g, or t
  misc_feature (3083)..(3083): n is a, c, g, or t
  misc_feature (3085)..(3085): n is a, c, g, or t
  misc_feature (3087)..(3087): n is a, c, g, or t
  misc_feature (3089)..(3089): n is a, c, g, or t
  misc_feature (3091)..(3092): n is a, c, g, or t
  misc_feature (3094)..(3101): n is a, c, g, or t
  misc_feature (3103)..(3105): n is a, c, g, or t
  misc_feature (3107)..(3110): n is a, c, g, or t
  misc_feature (3112)..(3115): n is a, c, g, or t
  misc_feature (3117)..(3117): n is a, c, g, or t
  misc_feature (3120)..(3120): n is a, c, g, or t
  misc_feature (3123)..(3123): n is a, c, g, or t
  misc_feature (3126)..(3127): n is a, c, g, or t
  misc_feature (3130)..(3130): n is a, c, g, or t
  misc_feature (3133)..(3135): n is a, c, g, or t
  misc_feature (3137)..(3137): n is a, c, g, or t
  misc_feature (3140)..(3141): n is a, c, g, or t
  misc_feature (3147)..(3147): n is a, c, g, or t
  misc_feature (3151)..(3152): n is a, c, g, or t
  misc_feature (3155)..(3156): n is a, c, g, or t
  misc_feature (3158)..(3159): n is a, c, g, or t
  misc_feature (3163)..(3163): n is a, c, g, or t
  misc_feature (3166)..(3166): n is a, c, g, or t
  misc_feature (3168)..(3168): n is a, c, g, or t
  misc_feature (3170)..(3171): n is a, c, g, or t
  misc_feature (3175)..(3176): n is a, c, g, or t
  misc_feature (3180)..(3180): n is a, c, g, or t
  misc_feature (3183)..(3189): n is a, c, g, or t
  misc_feature (3191)..(3191): n is a, c, g, or t
  misc_feature (3193)..(3193): n is a, c, g, or t
  misc_feature (3195)..(3196): n is a, c, g, or t
  misc_feature (3200)..(3205): n is a, c, g, or t
  misc_feature (3207)..(3213): n is a, c, g, or t
  misc_feature (3215)..(3215): n is a, c, g, or t
  misc_feature (3217)..(3218): n is a, c, g, or t
  misc_feature (3220)..(3225): n is a, c, g, or t
  misc_feature (3231)..(3231): n is a, c, g, or t
  misc_feature (3234)..(3236): n is a, c, g, or t
  misc_feature (3238)..(3239): n is a, c, g, or t
  misc_feature (3241)..(3242): n is a, c, g, or t
  misc_feature (3244)..(3247): n is a, c, g, or t
  misc_feature (3250)..(3250): n is a, c, g, or t
  misc_feature (3252)..(3253): n is a, c, g, or t
  misc_feature (3255)..(3256): n is a, c, g, or t
  misc_feature (3258)..(3259): n is a, c, g, or t
  misc_feature (3261)..(3262): n is a, c, g, or t
  misc_feature (3264)..(3264): n is a, c, g, or t
  misc_feature (3267)..(3267): n is a, c, g, or t
  misc_feature (3270)..(3270): n is a, c, g, or t
  misc_feature (3272)..(3272): n is a, c, g, or t
  misc_feature (3276)..(3277): n is a, c, g, or t
  misc_feature (3280)..(3283): n is a, c, g, or t
  misc_feature (3285)..(3285): n is a, c, g, or t
  misc_feature (3287)..(3288): n is a, c, g, or t
  misc_feature (3291)..(3292): n is a, c, g, or t
  misc_feature (3295)..(3299): n is a, c, g, or t
  misc_feature (3301)..(3301): n is a, c, g, or t
  misc_feature (3303)..(3303): n is a, c, g, or t
  misc_feature (3306)..(3310): n is a, c, g, or t
  misc_feature (3312)..(3313): n is a, c, g, or t
  misc_feature (3315)..(3319): n is a, c, g, or t
  misc_feature (3321)..(3322): n is a, c, g, or t
  misc_feature (3324)..(3327): n is a, c, g, or t
  misc_feature (3329)..(3329): n is a, c, g, or t
  misc_feature (3333)..(3335): n is a, c, g, or t
  misc_feature (3337)..(3342): n is a, c, g, or t
  misc_feature (3345)..(3345): n is a, c, g, or t
  misc_feature (3347)..(3347): n is a, c, g, or t
  misc_feature (3349)..(3349): n is a, c, g, or t
  misc_feature (3354)..(3354): n is a, c, g, or t
  misc_feature (3356)..(3356): n is a, c, g, or t
  misc_feature (3359)..(3361): n is a, c, g, or t
  misc_feature (3364)..(3365): n is a, c, g, or t
  misc_feature (3368)..(3371): n is a, c, g, or t
  misc_feature (3378)..(3381): n is a, c, g, or t
  misc_feature (3383)..(3384): n is a, c, g, or t
  misc_feature (3387)..(3388): n is a, c, g, or t
  misc_feature (3392)..(3396): n is a, c, g, or t
  misc_feature (3401)..(3401): n is a, c, g, or t
  misc_feature (3403)..(3404): n is a, c, g, or t
  misc_feature (3406)..(3406): n is a, c, g, or t
  misc_feature (3410)..(3410): n is a, c, g, or t
  misc_feature (3412)..(3412): n is a, c, g, or t
  misc_feature (3415)..(3419): n is a, c, g, or t
  misc_feature (3422)..(3424): n is a, c, g, or t
  misc_feature (3428)..(3428): n is a, c, g, or t
  misc_feature (3433)..(3433): n is a, c, g, or t
  misc_feature (3435)..(3435): n is a, c, g, or t
  misc_feature (3438)..(3439): n is a, c, g, or t
  misc_feature (3442)..(3444): n is a, c, g, or t
  misc_feature (3447)..(3451): n is a, c, g, or t
  misc_feature (3454)..(3454): n is a, c, g, or t
  misc_feature (3456)..(3457): n is a, c, g, or t
  misc_feature (3459)..(3459): n is a, c, g, or t
  misc_feature (3461)..(3461): n is a, c, g, or t
  misc_feature (3463)..(3463): n is a, c, g, or t
  misc_feature (3465)..(3469): n is a, c, g, or t
  misc_feature (3471)..(3471): n is a, c, g, or t
  misc_feature (3473)..(3473): n is a, c, g, or t
  misc_feature (3475)..(3475): n is a, c, g, or t
  misc_feature (3477)..(3479): n is a, c, g, or t
  misc_feature (3481)..(3482): n is a, c, g, or t
  misc_feature (3484)..(3484): n is a, c, g, or t
  misc_feature (3489)..(3490): n is a, c, g, or t
  misc_feature (3493)..(3496): n is a, c, g, or t
  misc_feature (3498)..(3498): n is a, c, g, or t
  misc_feature (3502)..(3503): n is a, c, g, or t
  misc_feature (3505)..(3507): n is a, c, g, or t
  misc_feature (3509)..(3509): n is a, c, g, or t
  misc_feature (3512)..(3514): n is a, c, g, or t
  misc_feature (3516)..(3518): n is a, c, g, or t
  misc_feature (3521)..(3530): n is a, c, g, or t
  misc_feature (3532)..(3532): n is a, c, g, or t
  misc_feature (3534)..(3534): n is a, c, g, or t
  misc_feature (3537)..(3543): n is a, c, g, or t
  misc_feature (3545)..(3546): n is a, c, g, or t
  misc_feature (3550)..(3556): n is a, c, g, or t
  misc_feature (3558)..(3559): n is a, c, g, or t
  misc_feature (3564)..(3565): n is a, c, g, or t
  misc_feature (3567)..(3568): n is a, c, g, or t
  misc_feature (3570)..(3572): n is a, c, g, or t
  misc_feature (3574)..(3576): n is a, c, g, or t
  misc_feature (3581)..(3583): n is a, c, g, or t
  misc_feature (3586)..(3588): n is a, c, g, or t
  misc_feature (3590)..(3592): n is a, c, g, or t
  misc_feature (3594)..(3596): n is a, c, g, or t
  misc_feature (3598)..(3598): n is a, c, g, or t
  misc_feature (3601)..(3601): n is a, c, g, or t
  misc_feature (3603)..(3605): n is a, c, g, or t
  misc_feature (3607)..(3607): n is a, c, g, or t
  misc_feature (3609)..(3609): n is a, c, g, or t
  misc_feature (3611)..(3611): n is a, c, g, or t
  misc_feature (3613)..(3613): n is a, c, g, or t
  misc_feature (3615)..(3615): n is a, c, g, or t
  misc_feature (3617)..(3619): n is a, c, g, or t
  misc_feature (3621)..(3621): n is a, c, g, or t
  misc_feature (3624)..(3627): n is a, c, g, or t
  misc_feature (3629)..(3629): n is a, c, g, or t
  misc_feature (3631)..(3633): n is a, c, g, or t
  misc_feature (3635)..(3637): n is a, c, g, or t
  misc_feature (3639)..(3646): n is a, c, g, or t
  misc_feature (3651)..(3651): n is a, c, g, or t
  misc_feature (3654)..(3655): n is a, c, g, or t
  misc_feature (3661)..(3662): n is a, c, g, or t
  misc_feature (3664)..(3669): n is a, c, g, or t
  misc_feature (3671)..(3672): n is a, c, g, or t
  misc_feature (3674)..(3677): n is a, c, g, or t
  misc_feature (3679)..(3679): n is a, c, g, or t
  misc_feature (3681)..(3686): n is a, c, g, or t
  misc_feature (3688)..(3689): n is a, c, g, or t
  misc_feature (3693)..(3694): n is a, c, g, or t
  misc_feature (3696)..(3700): n is a, c, g, or t
  misc_feature (3703)..(3706): n is a, c, g, or t
  misc_feature (3708)..(3708): n is a, c, g, or t
  misc_feature (3710)..(3715): n is a, c, g, or t
  misc_feature (3717)..(3717): n is a, c, g, or t
  misc_feature (3719)..(3727): n is a, c, g, or t
  misc_feature (3729)..(3729): n is a, c, g, or t
  misc_feature (3731)..(3731): n is a, c, g, or t
  misc_feature (3734)..(3736): n is a, c, g, or t
  misc_feature (3738)..(3742): n is a, c, g, or t
  misc_feature (3747)..(3747): n is a, c, g, or t
  misc_feature (3749)..(3750): n is a, c, g, or t
  misc_feature (3754)..(3755): n is a, c, g, or t
  misc_feature (3757)..(3760): n is a, c, g, or t
  misc_feature (3763)..(3764): n is a, c, g, or t
  misc_feature (3767)..(3771): n is a, c, g, or t
  misc_feature (3773)..(3779): n is a, c, g, or t
  misc_feature (3782)..(3783): n is a, c, g, or t
  misc_feature (3790)..(3791): n is a, c, g, or t
  misc_feature (3794)..(3795): n is a, c, g, or t
  misc_feature (3799)..(3799): n is a, c, g, or t
  misc_feature (3803)..(3803): n is a, c, g, or t
  misc_feature (3805)..(3805): n is a, c, g, or t
  misc_feature (3807)..(3809): n is a, c, g, or t
  misc_feature (3813)..(3813): n is a, c, g, or t
  misc_feature (3816)..(3816): n is a, c, g, or t
  misc_feature (3818)..(3821): n is a, c, g, or t
  misc_feature (3826)..(3826): n is a, c, g, or t
  misc_feature (3828)..(3829): n is a, c, g, or t
  misc_feature (3832)..(3833): n is a, c, g, or t
  misc_feature (3835)..(3839): n is a, c, g, or t
  misc_feature (3841)..(3845): n is a, c, g, or t
  misc_feature (3847)..(3847): n is a, c, g, or t
  misc_feature (3849)..(3849): n is a, c, g, or t
  misc_feature (3852)..(3852): n is a, c, g, or t
  misc_feature (3857)..(3859): n is a, c, g, or t
  misc_feature (3861)..(3863): n is a, c, g, or t
  misc_feature (3868)..(3868): n is a, c, g, or t
  misc_feature (3871)..(3872): n is a, c, g, or t
  misc_feature (3877)..(3881): n is a, c, g, or t
  misc_feature (3884)..(3885): n is a, c, g, or t
  misc_feature (3887)..(3888): n is a, c, g, or t
  misc_feature (3890)..(3892): n is a, c, g, or t
  misc_feature (3896)..(3897): n is a, c, g, or t
  misc_feature (3900)..(3901): n is a, c, g, or t
  misc_feature (3905)..(3905): n is a, c, g, or t
  misc_feature (3907)..(3907): n is a, c, g, or t
  misc_feature (3909)..(3909): n is a, c, g, or t
  misc_feature (3911)..(3914): n is a, c, g, or t
  misc_feature (3916)..(3918): n is a, c, g, or t
  misc_feature (3920)..(3920): n is a, c, g, or t
  misc_feature (3922)..(3926): n is a, c, g, or t
  misc_feature (3928)..(3928): n is a, c, g, or t
  misc_feature (3930)..(3930): n is a, c, g, or t
  misc_feature (3932)..(3932): n is a, c, g, or t
  misc_feature (3934)..(3940): n is a, c, g, or t
  misc_feature (3942)..(3944): n is a, c, g, or t
  misc_feature (3946)..(3947): n is a, c, g, or t
  misc_feature (3951)..(3952): n is a, c, g, or t
  misc_feature (3955)..(3956): n is a, c, g, or t
  misc_feature (3958)..(3959): n is a, c, g, or t
  misc_feature (3961)..(3965): n is a, c, g, or t
  misc_feature (3967)..(3968): n is a, c, g, or t
  misc_feature (3970)..(3970): n is a, c, g, or t
  misc_feature (3973)..(3976): n is a, c, g, or t
  misc_feature (3978)..(3979): n is a, c, g, or t
  misc_feature (3983)..(3983): n is a, c, g, or t
  misc_feature (3985)..(3987): n is a, c, g, or t
  misc_feature (3989)..(3990): n is a, c, g, or t
  misc_feature (3992)..(3992): n is a, c, g, or t
  misc_feature (3994)..(3998): n is a, c, g, or t
  misc_feature (4000)..(4000): n is a, c, g, or t
atgatgcaatataaggtggaagcgcaagatgaaacaatccagtggtgctgaccatccgtggcccgcgctgacgaagaacggaagacgggcgtccatgagccaccgaatgcgtcggtgcgcatacgaacgacacctgcactatcgcgagtaaccaacatgccttcctcagaaaagcccaagtacgttaaagtcgattgggtagataaagcaacgcgaccacgcgcgagttccgaggagtatcgcacgttgtacacggcgtacgcgagaacttgactacctggggctggtccgatcggcgccgcttcgtgccagacgacagccaacgcatcgtcgctaccggaaattgacaccgcgtcaccttcgagggagattatttgtcgctgcgcaccacctaaagagtaaatgcgaaggtaacgcttggacgtcacagcggcgacccaagtcgagccggtggcgattgaaagtatatcctctcccgctggcatcgtcacttgccactcaccatcgttcgcccagttgtcatactgttgaaagtaaagcacgctttcgttttcggaatccttcatcggactcgcgagcgcgcatcccttctcccccgcgacgcccatcgtgtacccgttgtagtcggtgatggtagggatgcgtcccatgcgcgacgtgtcgtggaactggaattcaacagagttgaatcctccttcgacagtgcttgtaatagatccaaccatggtgtaggataaaaaccgacggttgcttcccggaaccgcggcaacggatccactttggaacgccggttgcggcttgggaccggcttcgacgtgcaccaccgactgcttcacgtgactctgacggcgtcctttgacgtcatcgtcgtcgtcgtattcgacgaagtcatcttcttcatccaaatcttcatccataccgtctgcttcatcgtcgacgaaatcgctcgcattcgtctcatcgatagcgctcacaaagtctatctcggaaggcgaaaccttcgccgagggcgacgagtacttggatggaacgacgtcgttccacatcgcccactcgccgttaacgttgatgagcgccaaagagttaccagtagggtcgaacgaggcgccgcagacgagctcggtgtccgtcatcttcgcaatcgccaactttttcttgacgtcccacacgatgacactcttgtccgcgctcgccgtgaccaagtatttcccgttcggggaccaacggatgagggaaatcgcgtcggtgtgccctttcagctcccattcaatctgtttaaacgtaccacgctcgaagaacgtcacgtcgttctcccgccccggcacggctaggatttgtccatccggtcgccacgccacggcgttcaaaagcggcgactcgcccgtggccaacggcgcctcggtggcgtgtagttttacatccccagcctcctcgtcctcgctcgtgggcttcaacagccacacgacaaccatgccgttctcatccgtcgccgccaagtaatctcctcgcggatcgaacgccacgctcttgatgcacttgcttcgctgacacggaaacacgtgcaagacggttttgtcctccatcttgatgactttcacctcggcgtcctccccccccgcggcgacgtacttcccgtccgcgctccacgccacgcagtgcactggcaatgaaaatctcgtcacgttcgcctcgaacgccttcttttccagcgaaaacagcttcaccgagtaatccgagctcgccgtcgccgcgagcgtcccgcacggcgacgccgcgcacgcgttgacgcagtccgcgtgcgcgtcgtcgaagttctgttccacctctcccgtctccgcgtctcgcacgatcacgaacgaatccgcgccgcacgtcacgatcttcttcctcccatccaccgcgccgcgcgcgacgtcgcacgcccccgcgatgtgggcgtattcgaacgcgccctcgcgcgtctcgagcgccgngacgacggcgttcgaangtctatccatcgccccgcgttcgagcatcgctcgcgcggtcgctcgatcgctcgatcgatcgctcgcgatccgtcgcgcgcgcgtcncngcggcgtcggacgcgcgtcccgatcgacgcccgtcgtcgtcgcggattcaaatcaatcgnnncgcncnngnnnnnnnngnnccnnnnnnncnnnnnnncnnncngnnnnngggaaaantttnnnnnnnnccnntnnnnnggnnncnnnncnnnnnnnnngnnnnnnnnnnngnnnanannnnnnttttnnaccgnnnannnnnannnnnnnnnnnnnncncnnnncnnnnnnnnnnnnnnnnncgnncnncnnggcnnnngnnncgnnnnnngggnncgngngncngnnnngnngnnnnngcnnnnnnnnnnnnncgacgcnnnnncgcganncngaggngcgnganngangnncgnganngnngncngngnnnnnnnnncgngcgnnnnnntcgngcggnnnnnnnnnnnngnnnnnnnnncgnnncgnnnnnnnngnncgcggncgnngnnnncggnggnnnnnnnnngngnggcggngncgnnnngngngnnnnnngnggnngnnnnnnnngnnnnnnnngnnnnngcnnnngnnnacggggaannnggnnngngaagngnggnngnanngcgggnnnnnancgnnngcgcnnnggnngnacgngcgnggngannggnnncggngncnnnnnncgnnnnnntngnggnnnnggnnggcgnngcnngggngntangngncgnngtnnnnngnntnnangnnnngaatnnagnngnnnnnnnnnnnnnnnnnnnngnagcngcngnnntngnngnannaanngnnnggacngaagnagngganggnnnannngnngnggnnnnncgaannnacgcgnnnnnngnnngcgcggcnnangagcncgnngannnngnngncgnnggnnnnnnngnngnncncgangncgnnnnnnnngnnnaanntnnngnnnntnnngncnnaaangnnngnntnnnngnnnntnannnnnaannnnnngnnnnnnnnnncntnttggnnnnnnttnnngggntngaaannnnantngncnanngnnnnnnnnannncnnnntnnnngnacntgncgnnggnaannncnacnngcccgntttnntcnncnncctngangncnnaaannaagnaannnnnnnangnanngccnnnnnncnnnnnnncngnngnnnnnntccggnggnnncnnannannnngangnngnngnncnngnagncgncncccnnaannnncncnntcnnctnnnnnangntcnnnnngnngnnnnngnngnnnnanaagnnntnnnnnnaantntngagcnanaannnagnnaannnncggaacnnnnannagnnactnnnnnaaaananngnttantnaannnnnttnnngaantggangnggnnatnnncgnnnnngangnngncnangnnnnncncnangnnnannangaagnngannnngncaanntnnncnacnnngnnntgnnnnnnnnnntngnatnnnnnnncnncaannnnnnngnncaagnngnngnnncnnnaaaannnaannnannnannnangangnnntngncnangntnnngnccnnnnangnnncnnngnnnnnnnngattncgnncccggnntnnnnnncnngnnnnangnnnnnnannaaanngnnnnngcnnnngnannnnnngncnnnnnnnnngntnggnnncnnnnnttggnanntggnntnnnnaannagnnnnncnnnnnnnagnngccgttnnaanncggnggtnanannntttnccntnnnnaaaangnnttnnannnnngnnnnnancnagngcccnnngnnngcggnttnnaacgnnnnnctnnannannnttcnnccnncgcnancncnnnntnnncnannnnnangncnannnnnnngnnnannaaannccnntnnannnnncnncngannnntnnttcnannngnncnannnnncn

SEQ ID NO: 1173 - DNA, 4000 bp, Escherichia coli
  misc_feature (18)..(18): n is a, c, g, or t
  misc_feature (27)..(28): n is a, c, g, or t
  misc_feature (36)..(36): n is a, c, g, or t
  misc_feature (231)..(231): n is a, c, g, or t
  misc_feature (251)..(251): n is a, c, g, or t
  misc_feature (410)..(410): n is a, c, g, or t
  misc_feature (530)..(530): n is a, c, g, or t
  misc_feature (566)..(566): n is a, c, g, or t
  misc_feature (648)..(648): n is a, c, g, or t
  misc_feature (656)..(656): n is a, c, g, or t
  misc_feature (665)..(665): n is a, c, g, or t
  misc_feature (775)..(775): n is a, c, g, or t
  misc_feature (904)..(904): n is a, c, g, or t
  misc_feature (1083)..(1083): n is a, c, g, or t
  misc_feature (1550)..(1550): n is a, c, g, or t
  misc_feature (1786)..(1786): n is a, c, g, or t
  misc_feature (1959)..(1959): n is a, c, g, or t
  misc_feature (1992)..(1992): n is a, c, g, or t
  misc_feature (2253)..(2253): n is a, c, g, or t
  misc_feature (2899)..(2899): n is a, c, g, or t
  misc_feature (2950)..(2950): n is a, c, g, or t
  misc_feature (3657)..(3657): n is a, c, g, or t
cgcgaaggacgagttccncttcatacnntaagagcngatattgattatggctttgcagaagctcacaccacatttggtcgcttaggtgtaaaggtctggatctataagggcgaagttatcgcttcaagaactgagcgcgaagcagcagctcttgcccaagttcaagcagctaaggctgagcgcgcaccaaagcgtgcacctcgcgcgccaaagggcgaagtgacaaagacntccgttgcagagcgagcaantgaagctgcagcagttaccgagagccaagcagctccccaggttgatagcgaagtaagccctgaaattaagagcgaaggaagtgatgcgtaatgttaattcctcgtcgcgttaagcatcgcaagcaacatcgtccaaagcgttctggtaatgctaagggnggaactgcggttgcattcggcgattttggtctgcaagcaactgagggtggttatgtaaccaaccgtcagattgaagcagctcgtatcgcaatgactcgtcatattaaacgtggtggaaangtttggatcaatatctatccagatcgcccactaacnaagaagcctgctgaaacccgtatgggttctggtaagggatctccagaattctggatcgcaaatgtgaaaccaggaagagttntatttganatatctggngtaacgctagatgttgcaaagcaagcgctctctcgcgcagctcacaaactcccagtcaaatctcgcgtagtaattcgcgaggaggtatagcgatggcaaagatgatcacnactgaagaacttagagctctaagcactgaagatcttgcagcaaagttaaaggatgcaaaggaagagttatttaaccttcgtttccaagctgcaacaggtcaacttgagagccatggacgcctaacagcngtccgtaaagagattgccaagatctataccgttattcgtgaacgcgaactaggaattggaggagcggcatgagtgaggatagaaagtttcgcaaaactcgcgaaggcgtagttgttagcgacaagatggataagacagtggtagtaaaggtcgaagaccgcgctgctcatggtctctantccaaagttattaccaagaataagaagtttaaggctcacgatgaagagaacaccgccggtgttggagatcgcgtgcgcataatggaaacccgtccactttcggcaactaagcgttggcgtgtagtggagattatcgagaaggctaagtaaccatgatccaagcagagtcacgactacgagtcgccgataacacaggagctagagagcttctctgtattcgcgtgctaggtggaacccaacgtcgctatgcctcaatcggtgatgtcattgtctgttccgttaaggatgcaattcctggcggacaggttaagaaaggtgaagtcgttaaggctgtcatcgttcgaactgttaaagagaaccgtagagctgatggttcctatattaaatttgatgagaacgctgcggtaattatcaaggaagataacgaaccaagaggaacccgtattttcggacctgttgctagagancttcgcgataagcgctttatgaagatcatctcacttgccccggaggtgctgtaatgagaataaagaaaggtgacacagttctagtcatcgcaggaaaagataaaggtgtaactggcaaagtattagccgttaataccgttactgcccgcgtaactgttgaaggtgttaaccgcgtgaagaagcatacaaaggaagatacttcacagcgcggagccaaagttggcggaattctcacnattgaagccccaattgcttactccaatgtgatgttgctagatgatgataataaggcaactcgtatcgcagttcgcaaagatgaagagggcaagaacattcgcatctcaagaagaaccggaggagatctctaatgaccactgttttcgcacctcgtctaaaagaggtatataantctgaaattgctcctgccctgcagagcgaattnaacttctcaaatagaatgcagattccaaccctttccaagattgtggtcaatatgggagttggcgaagcagctaaggattcaaagttaattgaaggcgcaattagagatcttgcagcaattactggacagcgtccattagttactaaggcgagaaaatcaattgctaacttcaaactccgtgaaggccagccaattggcgcccatgtcaccctacgtggcgaccggatgtgggagtttatggaccggctattaacagtttcnctgccaagaatccgcgattttcgtggactctctccaaagcaatttgatggcaaaggaaattacaccttcggtctaactgagcaagtggtctttcttgaaattgagcaagacaagctagatcgagtccgtggaatggatatcaccatcgtaacttcagctaagaacgataatgaaggtcgtgcgctacttaaggcgcttggttttcccttcaaagatcaaggggagaaataaataatggcaaagacatcactgaaggttaaggcagcccgcaaacctaaatttaaggttcgtggatacacacgttgccaacgttgtggccgaccacattcggtctatcagaaattcggcatctgccgagtctgcttccgcgagatggcacaccgcggtgaacttcctggtattacgaaagcttcctggtaacaactattggagaggtcccttacatgagggaaaccagccaaagaaaggcgatgagccaactatgacaatgaccgacccgatcgcagacatgctctctcgtttgcgtaacgccaatatggcctaccatgaagtggtttctatgccatcttcatcggtgaaggttcgtattgccgaaattttgcagagagagggatatatcggtggctataaagtcaacgataatccngaaggttttggaaagaccttaactcttgaccttaaatatggttcaaatcgngagcgatcaattgctggtctgcgccgcgtttcaaagccaggtctacgcgtttatgccaaatcaaccggacttcctaaagtattaggcggacttggtgtggcaattatttcaacttcacaaggattactcactgatcgacaagctaacaagaatggcgtaggcggagaagttctcgcttacgtatggtgattgctatgtcacgtatcggaaaaatgccagttgccattccatcaggggttgaggtaaatatctctggtcaatcagtctctgttaaagggcctaagggaactctaagccatgtgcttcctgagttaattactcctaagaaagaggagagctcagtagtgctaacgcgcgctaatgatgagcgcgcagcaaagagcctccatggtctttctcgcacgctaatttcaaatatggttactggtgttacaactggttactcaaagaaaattatgattgttggagttggatataaagtagcggcaaagggcaaagatctagagtttgcactgggctactcacacccaattaatttcacagctcctgctggaatcaccttcaccgttgaaacacctactgatctagtggtttcaggtgttgataagcagctagttggagaagttgttgccaagattcaaaaacttcgcaaagccgatccatataaaggcaagggtctgcatctacaaggtgcacgcattcgccgnaaagctggaaagacaggtaagaaggcatgaatatctctaagaagattgttaagggctctactcaagttgcccgcgcccgtcgccactttagagtgcgaaagagagttaccggaacatctgagcgtccacgtttagttgttactcgctctgctcgccacttagttgcgcaaattgttgatgattcacgtggccatactctggcctctgcctcaactatggagaaagagctaagagcaacatctgcagataagactaagaaggcaagaagtgtgggccaattagttgcagatcgcgcaaaagcagctggagttaccacagtggtctttgaccgtggtggaaatcg

SEQ ID NO: 1174 - DNA, 4000 bp, Escherichia coli
  misc_feature (2)..(3): n is a, c, g, or t
  misc_feature (7)..(14): n is a, c, g, or t
  misc_feature (16)..(20): n is a, c, g, or t
  misc_feature (22)..(23): n is a, c, g, or t
  misc_feature (25)..(27): n is a, c, g, or t
  misc_feature (30)..(30): n is a, c, g, or t
  misc_feature (32)..(34): n is a, c, g, or t
  misc_feature (36)..(36): n is a, c, g, or t
  misc_feature (38)..(38): n is a, c, g, or t
  misc_feature (43)..(48): n is a, c, g, or t
  misc_feature (51)..(51): n is a, c, g, or t
  misc_feature (56)..(56): n is a, c, g, or t
  misc_feature (58)..(61): n is a, c, g, or t
  misc_feature (63)..(66): n is a, c, g, or t
  misc_feature (69)..(70): n is a, c, g, or t
  misc_feature (78)..(78): n is a, c, g, or t
  misc_feature (82)..(82): n is a, c, g, or t
  misc_feature (85)..(85): n is a, c, g, or t
  misc_feature (87)..(91): n is a, c, g, or t
  misc_feature (94)..(95): n is a, c, g, or t
  misc_feature (98)..(98): n is a, c, g, or t
  misc_feature (100)..(107): n is a, c, g, or t
  misc_feature (109)..(111): n is a, c, g, or t
  misc_feature (113)..(114): n is a, c, g, or t
  misc_feature (117)..(133): n is a, c, g, or t
  misc_feature (137)..(146): n is a, c, g, or t
  misc_feature (148)..(156): n is a, c, g, or t
  misc_feature (158)..(168): n is a, c, g, or t
  misc_feature (170)..(186): n is a, c, g, or t
  misc_feature (188)..(192): n is a, c, g, or t
  misc_feature (194)..(207): n is a, c, g, or t
  misc_feature (209)..(238): n is a, c, g, or t
  misc_feature (240)..(243): n is a, c, g, or t
  misc_feature (245)..(250): n is a, c, g, or t
  misc_feature (252)..(305): n is a, c, g, or t
  misc_feature (307)..(307): n is a, c, g, or t
  misc_feature (309)..(314): n is a, c, g, or t
  misc_feature (317)..(325): n is a, c, g, or t
  misc_feature (327)..(370): n is a, c, g, or t
  misc_feature (372)..(407): n is a, c, g, or t
  misc_feature (409)..(427): n is a, c, g, or t
  misc_feature (429)..(429): n is a, c, g, or t
  misc_feature (431)..(433): n is a, c, g, or t
  misc_feature (435)..(439): n is a, c, g, or t
  misc_feature (441)..(444): n is a, c, g, or t
  misc_feature (446)..(460): n is a, c, g, or t
  misc_feature (462)..(479): n is a, c, g, or t
  misc_feature (481)..(531): n is a, c, g, or t
  misc_feature (533)..(565): n is a, c, g, or t
  misc_feature (567)..(623): n is a, c, g, or t
  misc_feature (625)..(628): n is a, c, g, or t
  misc_feature (630)..(637): n is a, c, g, or t
  misc_feature (639)..(645): n is a, c, g, or t
  misc_feature (648)..(649): n is a, c, g, or t
  misc_feature (651)..(662): n is a, c, g, or t
  misc_feature (664)..(664): n is a, c, g, or t
  misc_feature (666)..(670): n is a, c, g, or t
  misc_feature (672)..(674): n is a, c, g, or t
  misc_feature (676)..(677): n is a, c, g, or t
  misc_feature (679)..(679): n is a, c, g, or t
  misc_feature (681)..(683): n is a, c, g, or t
  misc_feature (685)..(685): n is a, c, g, or t
  misc_feature (690)..(690): n is a, c, g, or t
  misc_feature (692)..(694): n is a, c, g, or t
cnnaacnnnnnnnnannnnngnncnnnttntnnnangnttttnnnnnnttnggttnannnnannnngtnnggtttttntaanctntnnnnnttnnaantnnnnnnnncnnngnntcnnnnnnnnnnnnnnnnnaaannnnnnnnnngnnnnnnnnncnnnnnnnnnnngnnnnnnnnnnnnnnnnntnnnnnannnnnnnnnnnnnngnnnnnnnnnnnnnnnnnnnnnnnnnnnnnngnnnngnnnnnnannnnnnnnnnnnnnnnnnnnnnnnnnnnnnnnnnnnnnnnnnnnnnnnnnnnnngncnnnnnnctnnnnnnnnncnnnnnnnnnnnnnnnnnnnnnnnnnnnnnnnnnnnnnnnnnnnngnnnnnnnnnnnnnnnnnnnnnnnnnnnnnnnnnnnngnnnnnnnnnnnnnnnnnnncncnnncnnnnncnnnncnnnnnnnnnnnnnnngnnnnnnnnnnnnnnnnnngnnnnnnnnnnnnnnnnnnnnnnnnnnnnnnnnnnnnnnnnnnnnnnnnnnncnnnnnnnnnnnnnnnnnnnnnnnnnnnnnnnnnannnnnnnnnnnnnnnnnnnnnnnnnnnnnnnnnnnnnnnnnnnnnnnnnnnnnnnnngnnnncnnnnnnnngnnnnnnntgnncnnnnnnnnnnnncnannnnngnnncnncncnnntncacgnannntgtgcaagcgttctggaggcctaggtcgaattctgtccaaacaggtattttcgcacgcggaagtctaggttcccaaaacgcttggcatgcttcccctgtcgtgggccgaaaggaaaccgtttcgatacggcataaactgagccgcgactcacgggagtgtcgcgaaaatccggtaagtctccccagatcagaactgcagcctcagtgaaaacataatttgccgttgcaatgccctaccgcggaaggctgtgtttataatcgtcccgccgccctggcaatccacgcacgtttggggattttcgggattgtccaaattgactttattgaaaaggttgaagatatctgtccggaattgaatcgagataccctctttcaatgagaagttctttgcgactgagacgtccgcttgggagaagccaggcccgcgaagtgaattccggcccgcgcttccgaacgtcccgaaagcaggccgctgccacggtccaatcgtgtctccggccgtgccatgtggttgaagtggtacgccaccggtggtcgtgaagtagccgttcctgcttcccgtgatgtgaacagctccgacaagattgggccggcagggaccggtgtcccggtctgcaaaacatgaatatgatggggaaaatggcaggccgctttcccaggtcatggttccgctgagcgaccaaccaccgacgatgcggtctgcgatcccgcggacgcccccgagaaaagtcttgcccctaccgaagggcagctcaacgagacctgttagaaggaacacatgttttcgatcggtgtcggcgacaccgtaatttagcctgggattgatcgcataatagtcgctgtcgtaatttagcgacttcgaccatgtgtaatgagccaggaactggaatcccttggcaaagcgcttttccactgccgcttgcagggagttgtaattgtcggaggcgtcgctgccaaaatagttgatctgctgtgtccagccgaatttcttaaagaatggttttcgctcatcagtcgacaaagtaccgaacccgacgatgctggcttgattggcatcatagttggggacattgcctgcgaacacgtgagtacccttattggctacatagctgacttgcagcgaaagcgtaggcgtgatcgcctgctgcagggtgacattccaagcgtcgagcgtgggcaaccgcattttggttggcagtacgtaggcactcacctggtcgggaaggctgaactgtcccgaagacggaaccgtagggaaagtggccgttggcggtccttgcgaaaggttgaacacgctcccggtgaatgcaggagggttgagctgctgctgcaccagaaccggcaagttttgcgtaaccgtgtgcccaaataccgagccaaataccccaatgtcaaagctccgcccatatcccagccgaaccaccgttttgggcgtagcttgataagcgacgcccaggcgcggcgccaagttagtaaagttgttcttcacatttccttgcaggttgatgttgccataaccagcgacactgaccaacccagtgttgagatctacccacccacctgctccctttcccgtgaccgattgcggagagtaaatctcccaccgcagtccgtagttgagacttagcctgcgagtgatgcggaaagtatcctggccgtagaagaaccagcgcttctgacgttctcctgcgttgtaagtcttatttacataccggctgaaaatgctcacgtcgccaagcaggaacgtagccaaacccaggccacccccactgggcccttgggttcgcgaattaaaaaaagccagactgcctgagcgcgcgccactgctggccacgcgaaggttccgagcgtaacggatgtcagtaccccacttgaagagatggttcccttccgtcttcgtccagttgtttacccattgaaactgctgttccctttccagggtcggcggggcaatagtgccgaaaacgaactggtctccttcctgtccatcgacaataaagaagggcatgcctgaagtaagggtgtcacccaggttcaacccggggatccctgcatcctttgcgggtgttgttccagccccgttgggcaggacgttcacgtgatagcggaagaagccaaatcgaaaatcagccagcaggctgggacgcagaatatagtcgaaacccgccgcaaaactctggttccgaaccagcgattgaccaacgaacccgtccagggataatccgacgcctccagccacgggcccaaatgcccccacagcgtgttgtctgaagtcagcaaagctgtagcgcccgaaaatcttcagtttctccgtggtgttgtggtcaacgcgaatattgaaaccatcgtcgttgaattgttcagcgcctgacgtaatgtagttctgcgtaatccctgcgcctgggacgttgggcccgggcaagagttccaatagattgacagcttgaggtgatatccggttccgtgcgatcaggttattcgcgaattggttgccggtagccggatcaaaaataggttgcgggtactcgctcagattgcaaaatggaactgtcgaatcaaggcaggtcgagcgcaccagtccggtcgggacgttcaaccgcactgaggtgccgttcgagcgccgtgtcccctgataatcgccgaagaagaacagacgatttttgataatcgggccgccgatcgagccaccgaattggttccacttgatagcaggcaaaggcttgtctggtggctgtgtaaacggattgcgggcctgtccccagccggtgcgacggaactcaaagacactgccatgccaatcgttcgtgccggatttggtctggaccgtgaccacccccgccaatgcctctccaaattccgcgtcataattctgtgtggtcaccttcgtctgcgtgacggattccagggtgggattgatcacgatgattcctaggatagggtcgcgattgtccgtaccgtcaagctgataggacgtgccactgaagtgttgcccgttaaccatgatctgaatcccgccttgcgggttttccgatgaagcgtgctgccatcctaactgtgaagtgcctggagtaagaagttccaggctagtgaagtttcgattgaataagggcagactttcgacctctttctcgctgaatgtagtggccacatccgcccggtcggtcttgatcaatggtatgtcttcggctgagacggttagtgtttcttgcctggccccgacgtggagctgtatatcgacacgggccgcctggtctgcatacaccgggatgcccgtggattccacagctttgaatcctagagcttcgg

SEQ ID NO: 1175 - DNA, 4000 bp, Escherichia coli
  misc_feature (1990)..(1991): n is a, c, g, or t
tatcacgctgctcccatcccagcttgatgcatgcaatcgatgtacggtttcggatccaacatctggtgctcgccgccgccgcgaatcggcctcagctgttcgctcgccgatattgcccgttgtaaggtttccatcatctcggttttctttgcctcaaagcgggtctctgcgagcttgaaaaccgcggcatctaagtcgttgcactcgtacagcttcgctttcagccctggatccatggctccttcactatgatcgccgctgtgcgggtggttggccctgagcgtcgccggcaacaaacttcctctgtcgtagttgctatcactcgtcgatagcggctgtcttcgcaaagtatacgcgagcacgcacgcgctttcgtcgaagcgatgcgtcaaaccgacccaatcaagctccatcactcgctctttcgcaagcgccatgatggcgtcgtggttgtccttcatggacgtccacttatcctcgagtaacttcttcgtttggaagttcttatccaagccggctttgcagtgatcctcgagcatgattttggcgaacttgctgtcggctccgaagtccttcagctcttcctgagtgagcgcggatccgagtggggtttgcgcgagctttccccagccaagtttggcgcgaagatcgtgatacatgaacagctcgcttcgccatgctgcttgttcatactccgcggggtcgcggaacatgcccatgagaatctttggacgtgatagtccgagttccgcttcaagttctgttgttcggcgcaagagttctcgaccggtatgactcgacaacaatcgacattgttcccaattctcccgcgtcgaatcctcgagcggacgcggatgtcccggttcccaaaccgtcccagccttccacaccgtcgtcaaaaacatagcgctccccgggcacaacgcatgtttcgcacgcagatctttgtcaagcatgacgtcttcgctgcgcacacgattgatcaaaccgagcacgtcatcgttgtccgaattcatgagctctagcgtgtgcaacacgagtgatgttccaccgctcttctccgtatggaaatacacgggcaaaatcgccgacgattcttcggcgatttcctcgttgtcgtcgtactcttcgatggcgcccagttgcgcctcgacacccctgcgcaacttccgccgagcatgtcgcttatcctctctcgcgagcacctttaccggcacttcgagcgtgtgcttcagtacggcgatagaatccgcggctccgtcgctcgactcttctgctggcgcctccctctcgccaacggcgtcagcggttttgttgcttgattccaactccacaggcgtttcactctcgacgagtgcctccactggctcactatcgctgatcaaatcgctttgtggcgtcgacagcggcgcagacgccgcatcgagctctctttcctcccgcgccttcgccaacgccgccgcctccgtcttttcccacgcccgctccatctgctgcagcctcttatactgcttcttcttctcgtacaactccttccccgcaatctgcacatcgttctcatccctcacgagcgcggcgaaatcttctaacgatatcccaaacaccgacttgagccgcgcgtcgatcgtctcgcgcttcacttggtcttcgttcgcgccgagcgcggcttcgttcgagcgcgccgcgcgcgtggccacgcccatcgcgagcaagcacgcccccgcgccgagcgcggcgaagacgcgccatcgcttcgcgatccatcgcgagttgtgtttcgtcgtctgcggggtctcggcgtccgccaacaatccggcgcgctcgccgtccgacatgatcgcgcggcgaccgccgacacccacgcgtcgccgcgtcgacgcgcgacgagcggtgcgttcgagacttggtttctttcttgtctcgtcgagactcgcgcgcgtcgatcgccgtgcgcgcgcgtgtgtgcggtttcgcggtgcgagtttgtgannagggtgttggagcccaaatcgcgcgacgggtgcttaaacaacgagcgtagaaatattacatgacgaggccgccgcgcgcgattagctgagcgcgagccgacgccatcgttcgaaggcggtgtctaattcgtagcgctcgaaagcgcgtgtcgcggcggcgccgccgtcagcgggcgggcgcacgcgaaggctgtcgagcgggagcagcggctcgttgagcgacggcacggttaaattttgacgaatctccacgagacgtctggagagcgccgcgctcgccgcacccttttcgctcaataaactctcgcgcgcgcgtttgcccttgacgttcgccgcgttggcgagcgcgctttcgatgtcgccgtactgttcgagcaacgccaacgccgtcttcgggccgacgccctcgacgcccggaatgttatcggcgctgtccccgacgagggccaaaaaatcaatgaattgctcgggttcgatgacgttgttgtgcatcgctcggaaatcatcaaccgtgaacggatcaaacggatcgcccttgctgctcttgctcggcttcaacatcttcgtcttcggcccgagcaactgataaaagtctttgtccggcgagcaaatgctcactcgaaagcccgcatcactggcgcgtctgctcaccgtaccgatgatatcgtccgcctcaaccccactcaacctcaataacggcacccccatgtcccgcacgagctgctcgaccttcggtatgagctccaataacggctccggcgtcggcggtcgattcgccttgtactcgacgaacatttcgtgtcgaaacgtctttcctttcgcatccatgcacaccgccaagtgcgtcggtttcagctccaacagcgagcatatcgtgtgcgcgtacgagtacaacaccgacgtatcctctccagccgagttcgtcagtccttcgccgcttccgcgcgcgttccaaccgtagtacgctcgaaacacaaagctcaacccgtcgacgaggatgagatgcggttcatccgcatccttcgcgatcgacgtcgccgacgtcgacgccgcgtccgcgcggccgtcgatcgaggacgccaccgccgtcatcgcgcgtcggttcgtcgtcgtcgtcgtcgctttcgcgcgtcgttgatggtgtcgctgatgattcaaactttgaacgcgcggcgccgacgttcgcgcgccgcgcgccgacgcgagcggcgcgacgcacggcgcccgtcgcgcgaacatcggcgccgcgcaccgcgcgacgcacttggcgcacgcgccgcgcatggcgacggcgtgtggcgccgcgcgtcgaccgtcgcccgtcgcggacgcgcgacagacggcgacgcgcgacagacgacgacgcgcgatggcgagcgacgcgccggtgacggtgctggacgtcgtggacggcgatctgcggggcgggtacgcgctggacggcgtcgcgcgcgcgccgagcgcgacgcgacgcggtcgagtgcgcgcgaaaagcgctggacgcgggaacggaagcgacgacggcgcgttcgacgcgatcgcgcggtcgcgcgtcgaagacgtggacgcgtacgagtgcgtcgtgcgcgcgatgacgtacggcgacctgggatgggagcgagggagcgaggggatggtggtggcgtgcgaggcgagcgggacgtcgaacaggacgcgcgagcgaacggcgaggatgttctttgaagagttcaacgtcggagggttggcgtttttagataaggcggtgtgcgcgatgtatgcgtgtggacgcgcgagcggagtggcgatcgatgtgggagagcaaggggtggagtgcgcgtgcgtggtggagggggcgacggcgcactcgacgacgaggcggaacgacgacgcgggaggacgagcgatggatcgcgcgctggtggaggcggtgaggaagaaacaagggattgcgttagatttgacgacggcgagtgatattcgtcggaagttggggaaatgtgcggcgacgcgggaggagtacgaggcgt

SEQ ID NO: 1176 - DNA, 4000 bp, Escherichia coli
  misc_feature (156)..(156): n is a, c, g, or t
  misc_feature (158)..(158): n is a, c, g, or t
  misc_feature (182)..(182): n is a, c, g, or t
  misc_feature (314)..(314): n is a, c, g, or t
  misc_feature (353)..(353): n is a, c, g, or t
  misc_feature (479)..(479): n is a, c, g, or t
  misc_feature (485)..(485): n is a, c, g, or t
  misc_feature (527)..(527): n is a, c, g, or t
  misc_feature (746)..(746): n is a, c, g, or t
  misc_feature (788)..(788): n is a, c, g, or t
  misc_feature (848)..(848): n is a, c, g, or t
  misc_feature (956)..(956): n is a, c, g, or t
  misc_feature (1193)..(1193): n is a, c, g, or t
  misc_feature (1214)..(1214): n is a, c, g, or t
  misc_feature (1331)..(1331): n is a, c, g, or t
  misc_feature (1346)..(1346): n is a, c, g, or t
  misc_feature (1373)..(1373): n is a, c, g, or t
  misc_feature (1649)..(1649): n is a, c, g, or t
  misc_feature (1655)..(1657): n is a, c, g, or t
  misc_feature (1663)..(1663): n is a, c, g, or t
  misc_feature (3270)..(3270): n is a, c, g, or t
  misc_feature (3884)..(3884): n is a, c, g, or t
  misc_feature (3989)..(3989): n is a, c, g, or t
cacaggcttggccttggcgcaaaacgcctgattgcccttgaacacataaatatagttctatctcgctttgggctgtaagcgacatgtaatcattcacagtgattcgttgcacggtaaatggagccgaatcaatttgataattcacttcgtcgccantngggcttgacggtgaaaccatcagngcggcgcgagattcaaaacttgcggttgcgaaaaattcattgaggtcaatatgtttttgcgtgaacgcggcgcgcatgacattgtcgctgcttgacatgacttcaactgcaacgccgccaagatacgaatgnacgttgcccggatcgagatagacagcatcacctggtttnagcacgacataattcatcaacaaagcaactagaagcccacccgaatttggatagagctcggcgaccttgcgcagatgttgcggcaagtttggtggtgttttatgcgctttttcttcgagcgcccancgcacngttttttcgatgccagtgagtttgagatggcgtgcaagttcnagccagccgttttgttcggcgcgagcgagagattcgtttacgggtgcgaatccacaaagcatttcgaagtcactgagtgcgcaaagcaactctggttttgaagttttatcgcgatagacgcgattgaaagcagtgcgatcgatgcccagagaattttcgcgttcgaaaccggcgagcgcctgcgccgaagttggatgcgtttgaattgaaagtggtttngcgacaccgatcaacttgacgagaaatgaaagttcgccgacnacatctttgagtgcgactttgccttgaccggtttgtaatgtcgcttgaccgtctgggtgngtgccgaaccaaagttcggcccacggttttgcatcgcgtggtgcgccgatgaaatcgggcaaggctgtgaagtcgccccagtcgtagtttttaattgctggagagagnattgctgtcattacctaatctgctggcattgcgacgatgtgtttggctgcatctttcagtgcgatttcatttgaagtgccggcgcgacgattgcgaacttcgacaacgccggttgcaacaccacgacctgcgataacgatgcgcggtatgccgatgagttcggcgtctttgaaacgcacgccaggtgaaacacctttgcgatcatccaaaataactgtcaagtgttggtcgtgaagntcggcggcgagtttttcgccngcatcggcagtttcgtcacctggtttgccggcaatcacgatgtgcacatcagcaggagcgacagcagttggccacttcaaaccgatttcgtcgtgatttgcttcggcgattgcggcnactgcgcgagaaacnccgatgccgtatgaacccatagttacnacttgcgacttgccgttttgatcgagcaccgtgagaccgagcgactgtgcatattttcggccgagttgaaacacatgaccgatttcgatgccacgacggatgtgaagtttcgaaccacacttcggacacgcatcgccatcgcgaacgtcggcggcatcgacgaccccgtcggcggtgaaatctcgaccgtgcacgagatttgcgacgtgacgacccggcgcgttggcgccggtgatccatgcactgccaatggcgatgctgcgatcaagaagatancgaatnnngctggnatttttttcgccgagagattgtggcccgatgtaacccttgatgagatttttatttttggcgaagtcttcttcggtgaagtcgacgatttcagcgggcgcgacttgtgcttcaagacgtttgaggtcgacatcgcgatcgccgggcacgccaactgcgagcggttcgatgcgaccatcggggtaactcaagttgacgatgacgttttttagtgtgtcacctgcgtgccaagcacgatcgttgcgtttgagatcttgtcgcgaattgaagagatcgacgagcgtggcgattgtcggtgttgctggtgtgtcgtgaacgaccgctgccggtgtattggcgaaatcaatttttgttggctcgccgacgcgaactgcttcggtgttggctgcgtagtcgcattttgtgcaactgacgaaagtgtcttcgcctgactcgcacggaaacaagaactcttcagatgcagagccacccattgcgccagacatcgccgagacgacggcgaacggtaaaccgagtcgctcgaacgtgcgcaagtatgccgaccgatgtgcgtcgtagctgcgttgcagaccttcgtcgtcgatgtcgaaactgtaagagtctttcatcaagaattcgcgaccgcgcaacaaacctgcacgtgggcgagcctcgtcgcgaaacttggtttgaatttgataaagccacaacggcagatctttgtaactgctgtagagatctttcactaataacgtgaacatttcttcgtgagttgggccgagcaaatagtcgacgccgcgacgatcttgaagacgaaacaaattcggaccgtagtctgtccatcgacctgtgacttcgtaaggttcgcgcggcaacattgcggggaagtgcacttcttgtgcgccgatcgcatccatttcttcgcggatgattgtttcgacgcgatttagtgtgcgcaaaccaagaggtaaccatgtgtaaccacctggtgcggcgcgtcgtatgtatcccgcacgaactaaaagccgatgacttggcacttcggcatcaactggatcgtcgcgtaatgtccgtaaaaacattgacgacatacgcaaaatcacagggtcttacctctcgtgcgcatgggatagcgcctcacgaaaactttactaaagcctctatacttgagatgacctttaaagttctaagaaccggaggcgtgggtttaggcccacgccttttgttctctatcgggtcgtgttttggttggtcaaaataggcatttggtagcgatttatagagaaaggagagacaactgatggctgagaatgtacggacaagcgccggagagagcgcggtagttacgcgtatcggcgaactagttacgccaatcgtcagcgatctcggccttgatctctacgacctcgaatttgtgagcggcgttgtgcgcgttgtggtcgattcaaaaacgggcctggtcggcgaaaacggtcagcctgctggtgttgatcttgagaaaattggtttgctgactcgacttgtctcgcgcgagtttgatcattcagagccggtgccaggtcgctacacacttgaagtgacgagcccgggtcttgagcgcaacttgcgtttgccgcgacattacatgcgngagctaaacaaagttgtgagcgtgcgattgacggcgccacatgagacgacaggtgagcgacgagtgcaaggtgtgcttgtggctgcagacgagcgcgagatcaccgtgcgcacttcagacggtgttgaagtgaaagtgaattacgtggcgattgatcgcgcacgaacagtttttgagtggaagacaacttcgaaagaagaagcacgtcactcgaagaaaaaagtcgctaatacaacggaggccaaagcatcatgagcaacatggacatgtcagaagcgctgcgcatgctcgcagcagaccgaggactaacaatcgacgcactcttgcaagtgctcgtcgaagcacttgcgacggcatacaagaagcgtccgaatgcggccgacgaggtaatcgttggcgtcaacccagacaacatggacatcacatttacggcatacgacgtagatgatgacggcaactggatcaacgagcgcgacgacacgccgaaaaaagatgagttgggtcgaattgctgcggtgactttccgtcaagtgatgggccagcgaattcgcgaagtagaacgcgagcgaaagttcgaagagtacgcaaaccgcgaaggcgacatcgtctctggngccgtgcaaaagacagatacgcgctacacattgctcgacctgggtcgtgttgaagcgttgttgccacaagccgaacaagttcttggcgaaactcgcgagccgaangctcgtttgaa

SEQ ID NO: 1177 - DNA, 4000 bp, Escherichia coli
  misc_feature (449)..(449): n is a, c, g, or t
  misc_feature (492)..(492): n is a, c, g, or t
  misc_feature (1657)..(1658): n is a, c, g, or t
  misc_feature (1741)..(1741): n is a, c, g, or t
  misc_feature (1766)..(1766): n is a, c, g, or t
  misc_feature (1770)..(1770): n is a, c, g, or t
  misc_feature (1778)..(1778): n is a, c, g, or t
  misc_feature (1785)..(1785): n is a, c, g, or t
  misc_feature (1792)..(1792): n is a, c, g, or t
  misc_feature (1795)..(1795): n is a, c, g, or t
  misc_feature (1798)..(1799): n is a, c, g, or t
  misc_feature (1801)..(1801): n is a, c, g, or t
  misc_feature (1808)..(1808): n is a, c, g, or t
  misc_feature (1827)..(1827): n is a, c, g, or t
  misc_feature (2549)..(2549): n is a, c, g, or t
  misc_feature (2584)..(2584): n is a, c, g, or t
  misc_feature (2605)..(2605): n is a, c, g, or t
  misc_feature (2623)..(2623): n is a, c, g, or t
  misc_feature (2629)..(2629): n is a, c, g, or t
  misc_feature (2638)..(2638): n is a, c, g, or t
  misc_feature (2641)..(2641): n is a, c, g, or t
  misc_feature (2649)..(2649): n is a, c, g, or t
  misc_feature (2653)..(2653): n is a, c, g, or t
  misc_feature (2656)..(2656): n is a, c, g, or t
  misc_feature (2659)..(2659): n is a, c, g, or t
  misc_feature (2663)..(2663): n is a, c, g, or t
  misc_feature (2666)..(2666): n is a, c, g, or t
  misc_feature (2684)..(2684): n is a, c, g, or t
  misc_feature (2695)..(2695): n is a, c, g, or t
  misc_feature (2701)..(2702): n is a, c, g, or t
  misc_feature (2704)..(2707): n is a, c, g, or t
  misc_feature (2709)..(2712): n is a, c, g, or t
  misc_feature (2715)..(2718): n is a, c, g, or t
  misc_feature (2720)..(2723): n is a, c, g, or t
  misc_feature (2725)..(2725): n is a, c, g, or t
  misc_feature (2727)..(2727): n is a, c, g, or t
  misc_feature (2729)..(2729): n is a, c, g, or t
  misc_feature (2733)..(2738): n is a, c, g, or t
  misc_feature (2740)..(2744): n is a, c, g, or t
  misc_feature (2747)..(2747): n is a, c, g, or t
  misc_feature (2749)..(2749): n is a, c, g, or t
  misc_feature (2751)..(2751): n is a, c, g, or t
  misc_feature (2755)..(2757): n is a, c, g, or t
  misc_feature (2759)..(2759): n is a, c, g, or t
  misc_feature (2761)..(2767): n is a, c, g, or t
  misc_feature (2772)..(2773): n is a, c, g, or t
  misc_feature (2777)..(2777): n is a, c, g, or t
  misc_feature (2779)..(2779): n is a, c, g, or t
  misc_feature (2782)..(2787): n is a, c, g, or t
  misc_feature (2790)..(2791): n is a, c, g, or t
  misc_feature (2794)..(2795): n is a, c, g, or t
  misc_feature (2798)..(2798): n is a, c, g, or t
  misc_feature (2801)..(2801): n is a, c, g, or t
  misc_feature (2804)..(2807): n is a, c, g, or t
  misc_feature (2809)..(2811): n is a, c, g, or t
  misc_feature (2813)..(2813): n is a, c, g, or t
  misc_feature (2815)..(2815): n is a, c, g, or t
  misc_feature (2817)..(2823): n is a, c, g, or t
  misc_feature (2827)..(2827): n is a, c, g, or t
  misc_feature (2829)..(2829): n is a, c, g, or t
  misc_feature (2832)..(2834): n is a, c, g, or t
  misc_feature (2837)..(2840): n is a, c, g, or t
  misc_feature (2842)..(2844): n is a, c, g, or t
  misc_feature (2847)..(2847): n is a, c, g, or t
  misc_feature (2849)..(2849): n is a, c, g, or t
  misc_feature (2851)..(2851): n is a, c, g, or t
  misc_feature (2854)..(2854): n is a, c, g, or t
  misc_feature (2857)..(2857): n is a, c, g, or t
  misc_feature (2860)..(2866): n is a, c, g, or t
  misc_feature (2869)..(2873): n is a, c, g, or t
  misc_feature (2875)..(2876): n is a, c, g, or t
  misc_feature (2878)..(2878): n is a, c, g, or t
  misc_feature (2881)..(2881): n is a, c, g, or t
  misc_feature (2884)..(2884): n is a, c, g, or t
  misc_feature (2886)..(2886): n is a, c, g, or t
  misc_feature (2888)..(2891): n is a, c, g, or t
  misc_feature (2893)..(2896): n is a, c, g, or t
  misc_feature (2899)..(2901): n is a, c, g, or t
  misc_feature (2903)..(2903): n is a, c, g, or t
  misc_feature (2905)..(2905): n is a, c, g, or t
  misc_feature (2907)..(2908): n is a, c, g, or t
  misc_feature (2910)..(2916): n is a, c, g, or t
  misc_feature (2921)..(2922): n is a, c, g, or t
  misc_feature (2924)..(2924): n is a, c, g, or t
  misc_feature (2926)..(2931): n is a, c, g, or t
  misc_feature (2934)..(2940): n is a, c, g, or t
  misc_feature (2942)..(2944): n is a, c, g, or t
  misc_feature (2946)..(2946): n is a, c, g, or t
  misc_feature (2951)..(2952): n is a, c, g, or t
  misc_feature (2955)..(2958): n is a, c, g, or t
  misc_feature (2963)..(2967): n is a, c, g, or t
  misc_feature (2970)..(2971): n is a, c, g, or t
  misc_feature (2973)..(2973): n is a, c, g, or t
  misc_feature (2975)..(2980): n is a, c, g, or t
  misc_feature (2982)..(2988): n is a, c, g, or t
  misc_feature (2994)..(2998): n is a, c, g, or t
  misc_feature (3000)..(3001): n is a, c, g, or t
  misc_feature (3003)..(3003): n is a, c, g, or t
  misc_feature (3008)..(3008): n is a, c, g, or t
  misc_feature (3010)..(3017): n is a, c, g, or t
  misc_feature (3019)..(3023): n is a, c, g, or t
  misc_feature (3025)..(3027): n is a, c, g, or t
  misc_feature (3029)..(3032): n is a, c, g, or t
  misc_feature (3034)..(3037): n is a, c, g, or t
  misc_feature (3040)..(3042): n is a, c, g, or t
  misc_feature (3044)..(3044): n is a, c, g, or t
  misc_feature (3046)..(3046): n is a, c, g, or t
  misc_feature (3048)..(3052): n is a, c, g, or t
  misc_feature (3054)..(3057): n is a, c, g, or t
  misc_feature (3059)..(3059): n is a, c, g, or t
  misc_feature (3062)..(3064): n is a, c, g, or t
  misc_feature (3068)..(3070): n is a, c, g, or t
  misc_feature (3072)..(3073): n is a, c, g, or t
  misc_feature (3075)..(3079): n is a, c, g, or t
  misc_feature (3082)..(3094): n is a, c, g, or t
  misc_feature (3096)..(3096): n is a, c, g, or t
  misc_feature (3098)..(3098): n is a, c, g, or t
  misc_feature (3100)..(3101): n is a, c, g, or t
  misc_feature (3103)..(3103): n is a, c, g, or t
  misc_feature (3105)..(3106): n is a, c, g, or t
  misc_feature (3108)..(3109): n is a, c, g, or t
  misc_feature (3111)..(3111): n is a, c, g, or t
  misc_feature (3113)..(3115): n is a, c, g, or t
  misc_feature (3117)..(3117): n is a, c, g, or t
  misc_feature (3119)..(3129): n is a, c, g, or t
  misc_feature (3131)..(3134): n is a, c, g, or t
  misc_feature (3136)..(3138): n is a, c, g, or t
  misc_feature (3140)..(3141): n is a, c, g, or t
  misc_feature (3143)..(3143): n is a, c, g, or t
  misc_feature (3146)..(3149): n is a, c, g, or t
  misc_feature (3151)..(3152): n is a, c, g, or t
  misc_feature (3156)..(3159): n is a, c, g, or t
  misc_feature (3161)..(3161): n is a, c, g, or t
  misc_feature (3163)..(3164): n is a, c, g, or t
  misc_feature (3166)..(3169): n is a, c, g, or t
  misc_feature (3172)..(3172): n is a, c, g, or t
  misc_feature (3175)..(3176): n is a, c, g, or t
  misc_feature (3178)..(3179): n is a, c, g, or t
  misc_feature (3182)..(3185): n is a, c, g, or t
  misc_feature (3187)..(3190): n is a, c, g, or t
  misc_feature (3192)..(3200): n is a, c, g, or t
  misc_feature (3205)..(3206): n is a, c, g, or t
  misc_feature (3208)..(3211): n is a, c, g, or t
  misc_feature (3213)..(3213): n is a, c, g, or t
  misc_feature (3215)..(3216): n is a, c, g, or t
  misc_feature (3218)..(3222): n is a, c, g, or t
  misc_feature (3226)..(3227): n is a, c, g, or t
  misc_feature (3229)..(3230): n is a, c, g, or t
  misc_feature (3233)..(3233): n is a, c, g, or t
  misc_feature (3235)..(3235): n is a, c, g, or t
  misc_feature (3237)..(3237): n is a, c, g, or t
  misc_feature (3239)..(3240): n is a, c, g, or t
  misc_feature (3243)..(3243): n is a, c, g, or t
  misc_feature (3246)..(3249): n is a, c, g, or t
  misc_feature (3252)..(3253): n is a, c, g, or t
  misc_feature (3257)..(3257): n is a, c, g, or t
  misc_feature (3259)..(3259): n is a, c, g, or t
  misc_feature (3261)..(3262): n is a, c, g, or t
  misc_feature (3266)..(3270): n is a, c, g, or t
  misc_feature (3272)..(3273): n is a, c, g, or t
  misc_feature (3275)..(3275): n is a, c, g, or t
  misc_feature (3277)..(3277): n is a, c, g, or t
  misc_feature (3280)..(3283): n is a, c, g, or t
  misc_feature (3285)..(3286): n is a, c, g, or t
  misc_feature (3288)..(3292): n is a, c, g, or t
  misc_feature (3294)..(3294): n is a, c, g, or t
  misc_feature (3296)..(3296): n is a, c, g, or t
  misc_feature (3299)..(3301): n is a, c, g, or t
  misc_feature (3303)..(3303): n is a, c, g, or t
  misc_feature (3305)..(3305): n is a, c, g, or t
  misc_feature (3307)..(3314): n is a, c, g, or t
  misc_feature (3316)..(3316): n is a, c, g, or t
  misc_feature (3319)..(3322): n is a, c, g, or t
  misc_feature (3327)..(3327): n is a, c, g, or t
  misc_feature (3329)..(3337): n is a, c, g, or t
  misc_feature (3339)..(3340): n is a, c, g, or t
  misc_feature (3344)..(3344): n is a, c, g, or t
  misc_feature (3346)..(3346): n is a, c, g, or t
  misc_feature (3348)..(3349): n is a, c, g, or t
  misc_feature (3351)..(3351): n is a, c, g, or t
  misc_feature (3353)..(3354): n is a, c, g, or t
  misc_feature (3357)..(3360): n is a, c, g, or t
  misc_feature (3362)..(3363): n is a, c, g, or t
  misc_feature (3366)..(3369): n is a, c, g, or t
  misc_feature (3373)..(3379): n is a, c, g, or t
  misc_feature (3381)..(3382): n is a, c, g, or t
  misc_feature (3385)..(3387): n is a, c, g, or t
  misc_feature (3391)..(3395): n is a, c, g, or t
  misc_feature (3397)..(3399): n is a, c, g, or t
  misc_feature (3401)..(3401): n is a, c, g, or t
  misc_feature (3404)..(3405): n is a, c, g, or t
  misc_feature (3407)..(3411): n is a, c, g, or t
  misc_feature (3417)..(3418): n is a, c, g, or t
  misc_feature (3420)..(3420): n is a, c, g, or t
  misc_feature (3422)..(3427): n is a, c, g, or t
  misc_feature (3432)..(3435): n is a, c, g, or t
  misc_feature (3437)..(3439): n is a, c, g, or t
  misc_feature (3442)..(3442): n is a, c, g, or t
  misc_feature (3444)..(3445): n is a, c, g, or t
  misc_feature (3447)..(3450): n is a, c, g, or t
  misc_feature (3452)..(3457): n is a, c, g, or t
  misc_feature (3461)..(3461): n is a, c, g, or t
  misc_feature (3467)..(3470): n is a, c, g, or t
  misc_feature (3472)..(3475): n is a, c, g, or t
  misc_feature (3477)..(3477): n is a, c, g, or t
  misc_feature (3479)..(3479): n is a, c, g, or t
  misc_feature (3484)..(3484): n is a, c, g, or t
  misc_feature (3486)..(3492): n is a, c, g, or t
  misc_feature (3494)..(3495): n is a, c, g, or t
  misc_feature (3497)..(3500): n is a, c, g, or t
  misc_feature (3504)..(3505): n is a, c, g, or t
  misc_feature (3508)..(3510): n is a, c, g, or t
  misc_feature (3512)..(3513): n is a, c, g, or t
  misc_feature (3515)..(3519): n is a, c, g, or t
  misc_feature (3522)..(3524): n is a, c, g, or t
  misc_feature (3528)..(3529): n is a, c, g, or t
  misc_feature (3531)..(3531): n is a, c, g, or t
  misc_feature (3534)..(3538): n is a, c, g, or t
  misc_feature (3541)..(3543): n is a, c, g, or t
  misc_feature (3545)..(3545): n is a, c, g, or t
  misc_feature (3547)..(3547): n is a, c, g, or t
  misc_feature (3549)..(3550): n is a, c, g, or t
  misc_feature (3553)..(3554): n is a, c, g, or t
  misc_feature (3556)..(3557): n is a, c, g, or t
  misc_feature (3559)..(3559): n is a, c, g, or t
  misc_feature (3563)..(3565): n is a, c, g, or t
  misc_feature (3567)..(3567): n is a, c, g, or t
  misc_feature (3569)..(3570): n is a, c, g, or t
  misc_feature (3573)..(3573): n is a, c, g, or t
  misc_feature (3575)..(3575): n is a, c, g, or t
  misc_feature (3577)..(3577): n is a, c, g, or t
  misc_feature (3579)..(3579): n is a, c, g, or t
  misc_feature (3581)..(3583): n is a, c, g, or t
  misc_feature (3585)..(3591): n is a, c, g, or t
  misc_feature (3593)..(3597): n is a, c, g, or t
  misc_feature (3599)..(3601): n is a, c, g, or t
  misc_feature (3605)..(3605): n is a, c, g, or t
  misc_feature (3607)..(3608): n is a, c, g, or t
  misc_feature (3610)..(3610): n is a, c, g, or t
  misc_feature (3613)..(3617): n is a, c, g, or t
  misc_feature (3619)..(3621): n is a, c, g, or t
  misc_feature (3623)..(3623): n is a, c, g, or t
  misc_feature (3626)..(3629): n is a, c, g, or t
  misc_feature (3633)..(3633): n is a, c, g, or t
  misc_feature (3635)..(3637): n is a, c, g, or t
  misc_feature (3639)..(3644): n is a, c, g, or t
  misc_feature (3646)..(3646): n is a, c, g, or t
  misc_feature (3648)..(3655): n is a, c, g, or t
  misc_feature (3657)..(3661): n is a, c, g, or t
  misc_feature (3663)..(3667): n is a, c, g, or t
  misc_feature (3669)..(3673): n is a, c, g, or t
  misc_feature (3675)..(3679): n is a, c, g, or t
  misc_feature (3682)..(3682): n is a, c, g, or t
  misc_feature (3685)..(3685): n is a, c, g, or t
  misc_feature (3689)..(3690): n is a, c, g, or t
  misc_feature (3693)..(3700): n is a, c, g, or t
  misc_feature (3703)..(3704): n is a, c, g, or t
  misc_feature (3709)..(3711): n is a, c, g, or t
  misc_feature (3714)..(3716): n is a, c, g, or t
  misc_feature (3718)..(3719): n is a, c, g, or t
  misc_feature (3722)..(3722): n is a, c, g, or t
  misc_feature (3725)..(3726): n is a, c, g, or t
  misc_feature (3731)..(3733): n is a, c, g, or t
  misc_feature (3736)..(3738): n is a, c, g, or t
  misc_feature (3740)..(3740): n is a, c, g, or t
  misc_feature (3742)..(3747): n is a, c, g, or t
  misc_feature (3749)..(3749): n is a, c, g, or t
  misc_feature (3751)..(3751): n is a, c, g, or t
  misc_feature (3753)..(3756): n is a, c, g, or t
  misc_feature (3759)..(3762): n is a, c, g, or t
  misc_feature (3766)..(3780): n is a, c, g, or t
  misc_feature (3782)..(3783): n is a, c, g, or t
  misc_feature (3786)..(3792): n is a, c, g, or t
  misc_feature (3794)..(3797): n is a, c, g, or t
  misc_feature (3799)..(3803): n is a, c, g, or t
  misc_feature (3805)..(3805): n is a, c, g, or t
  misc_feature (3807)..(3808): n is a, c, g, or t
  misc_feature (3810)..(3810): n is a, c, g, or t
  misc_feature (3812)..(3813): n is a, c, g, or t
  misc_feature (3815)..(3817): n is a, c, g, or t
  misc_feature (3822)..(3823): n is a, c, g, or t
  misc_feature (3825)..(3826): n is a, c, g, or t
  misc_feature (3828)..(3828): n is a, c, g, or t
  misc_feature (3830)..(3832): n is a, c, g, or t
  misc_feature (3834)..(3835): n is a, c, g, or t
  misc_feature (3837)..(3839): n is a, c, g, or t
  misc_feature (3842)..(3843): n is a, c, g, or t
  misc_feature (3847)..(3852): n is a, c, g, or t
  misc_feature (3855)..(3857): n is a, c, g, or t
  misc_feature (3859)..(3859): n is a, c, g, or t
  misc_feature (3861)..(3862): n is a, c, g, or t
  misc_feature (3865)..(3868): n is a, c, g, or t
  misc_feature (3870)..(3872): n is a, c, g, or t
  misc_feature (3875)..(3877): n is a, c, g, or t
  misc_feature (3879)..(3880): n is a, c, g, or t
  misc_feature (3882)..(3883): n is a, c, g, or t
  misc_feature (3885)..(3887): n is a, c, g, or t
  misc_feature (3889)..(3894): n is a, c, g, or t
  misc_feature (3896)..(3897): n is a, c, g, or t
  misc_feature (3900)..(3904): n is a, c, g, or t
  misc_feature (3907)..(3910): n is a, c, g, or t
  misc_feature (3912)..(3912): n is a, c, g, or t
  misc_feature (3914)..(3917): n is a, c, g, or t
  misc_feature (3921)..(3926): n is a, c, g, or t
  misc_feature (3929)..(3935): n is a, c, g, or t
  misc_feature (3937)..(3937): n is a, c, g, or t
  misc_feature (3939)..(3940): n is a, c, g, or t
  misc_feature (3942)..(3948): n is a, c, g, or t
  misc_feature (3950)..(3950): n is a, c, g, or t
  misc_feature (3953)..(3953): n is a, c, g, or t
  misc_feature (3955)..(3957): n is a, c, g, or t
  misc_feature (3959)..(3963): n is a, c, g, or t
  misc_feature (3965)..(3965): n is a, c, g, or t
  misc_feature (3967)..(3970): n is a, c, g, or t
  misc_feature (3972)..(3972): n is a, c, g, or t
  misc_feature (3975)..(3978): n is a, c, g, or t
  misc_feature (3980)..(3988): n is a, c, g, or t
  misc_feature (3990)..(3991): n is a, c, g, or t
  misc_feature (3995)..(3995): n is a, c, g, or t
  misc_feature (3997)..(3997): n is a, c, g, or t
  misc_feature (3999)..(4000): n is a, c, g, or t
tagctttgatacgacggttgatttcgtacgctttgcggccccattccatttcgatgaaaggtgccaccatgcggcctgtaccatgttcggctttcaaagaaccaccaaaaccagatacgcgttcggacatttcttttaccaaatcaccgaagttcttagtatctttagggtcactgaaatcaggagtaatgttaaagtgaacgttaccggacaacgcatgaccgaagattacaccaccatcaacgaaatcgtatttgtggaataattcagtaagcatttcgatgcccttagtgaagtcttcgatttggaagcaaacgtcttctgtgataacagtagtaccttttctacgttgaccaccaacgattggcaagatacctttacggattgcccaccaggaatcgtattctttaggatcttgagaataaagacttggaatagctgttggaatntctttcaattgttctttaatgaaagccaagttttcatcaacantttctttagaatagctttcagtttggaacaagatagcacttgtaccttctggaacttcacgaacgaaatcaggtacattatctagagtttgaactgcttttaaggattgatagtccatcatttcagcagcaacaaccttttcacggcccatattagccaaggctacaacggcaagagatgcgtcgttcaatgtgctgaagaacatgagaccgcaacctttgtgaggtacatcttcaacagtgttgtacacgatttcagatacaaagcccaatgtaccttcggaaccgatgaacaagtgattgataatatcgatgatatcttcaaaatctacaagggagttcaaaccgtaacctgtagtatttttgattttatatttgtgatgaatcaaatgagtcaactcttcatcagccaagatttctttgcgcaattgcaaaatatcttcaaccatttgtggtttttctttgaggaattgatcgatgctctttttatcggatgtatccaaaatggaaccatctaataagacaacgcgaatagagcgaattgttttataagagttttgtgcagtaccacagcacataccggaggagttattgttcaaaataccgcctaccaatgctgttgcaagcgttgcagggtctggaccgattttacgattatatggtttcaacaaatcattcgcatcggaaccgataacaccacattcacaacgcaatgctttgccatcgtcgataacttccatttttttgaagccatcattacaaacgataagcacgtcttcactggaacattgaccagacaaagaagagccagccgcacggaatgtaaatggtgtgccacattgttgacacaaacgaataagacgacgtacttcggattcgttttctgcttttaccactacttttggtaaataactgtaacaagatgcatctacaccatacgcataacggcgcagacggtctgtataaacacgatccttacaaatcgcttgcgcctctttggcaaaacgatcataatctttaactaatatactcacttgaaaagcctccaatcctatccttaggaaaatttcttttataactagtatacgccgttctcatttcggtcgctaccattatgcataaattgtatatgaaatataaattctatagatacacaatacaaaatnnatcttagttgaaagttgatttcatttaccaaaaaaacaagtgcatttcctaggaacacacatcaataaaaatatatgataacnacttatgaaagcccatataggtatncccnatcaatangcgtatncatgggnatnaanngntttatancatgaatacagatctacancaatatatgaatatttatgtgaattttcctagtatcctgtatattacacattaggaattatcaatataaattagttatgcgttttaggaatagatctactgtttgctcgatttttaatagtaatctattattatcacgcctcaatatttgtaaaacatataaatacttttgcttgattttgttttacaaattgatataatatttgtaaaaagaggtgataattatggctacaactaatatcaatatacgagttgacgaattgttaaaaaaagatgccgaagcattgtttaatgacttaggcctcagcatgtcatctgctatcactatgttcttaaaatctgcattaaatcatgatggtatcccattcgaagtaaaacgtgcaaaaccaaatacagaaacaatacaagccttagcagaatatgaaactatgaaagctcatccggaaaaatacaaacggtatagtagttttgcagaattacttaaggatgttgaaaatgaaacttaagattgttgaaaatgccatatagaaccagattggctattaatttatcgaaaagatacagatgtacttgaattatttctattccgaactggaacacatgcagatttattttaaacaacatatatggctatgaaaaacagcaaaaaggctgtaacaaaaatgtggtaaaactatttttgttacagcccttttatatatttttcttatgtttagactatanaggtactcttgtaaattagaacaggcgtgttctanttgtaaaagtatcacatttangtgctcttataaattagnacaggngtgttctanttntaaaagcntcanatntangtgntcntataaattagaacaggcntgttctaattntaaaanncnnnnannnnggnnnncnnnnanantngaannnnnntnnnnnaantntnaaannnantnnnnnnnaatanntatncnacnnnnnncannatnncanagntannnntnnntntnannnnnnntgcnantannncgnnnntnnnaantncnaanatngcnnnnnnnctnnnnngnntngcnatntnannnncnnnntgnnncncnannannnnnnnaatannancnnnnnnagnnnnnnnannnanaatannatnnnntatannnnntgnnanannnnnnannnnnnncgacannnnnannanagcangnnnnnnnncnnnnncnnnannnntnnnnaannncntnannnnnannnnancannnacannnannannnnnccnnnnnnnnnnnnnanantnnanannanncnannnanannnnnnnnnnnannnncnnntnntntannnnanntcannnnancnntnnnnaanganncnnctnnnngnnnncnnnnnnnnncaaanntnnnnanannannnnngaannanncananancnnaanacnnnnaanngcananannaatnnnnnannantnaannnncnngnnnnncnancannnanantnnnnnnnngnaannnngaaanannnnnnnnnanngcancncnnananncannnntnnctnnnntaannnnnnnanngannnagannnnncnnnanacnnannnnnaaatanngntnnnnnnacaannnnannnggngnncnnnntnnnnnncaanacatannnnannnnananatacnannnnnnnanncnnnncaannatnnntnnannnnnagnnntaannanacnnnnnacnnnananannaannannanaaannnanannatnanananannnannnnnnnannnnncnnngtanannanttnnnnntnnnanaannnnatanannnannnnnncnannnnnnnngnnnnncnnnnngnnnnnannnnnatngangcannctnnnnnnnnatnncacgnnngannnannatnctnnatctnnngtnnncncnnnnnncntntnnnnatnnnnaatnnnnnnnnnnnnnnnannttnnnnnnnannnntnnnnntntnntnanncnnnatacnngnnanannntnnannntcnnttgnnnnnnttnnntntnnttnnnngnnncannntnnanntnnncnnnnnntnnttnnnnnctnnnnanannnntgannnnnncannnnnnncntnncnnnnnnntnctncnnnannnnnancnnnnangannnnannnnnnnnntnnttanangnn

SEQ ID NO: 1178 - DNA, 4000 bp, Escherichia coli
  misc_feature (1299)..(1299): n is a, c, g, or t
  misc_feature (2000)..(2000): n is a, c, g, or t
  misc_feature (2077)..(2077): n is a, c, g, or t
tatcaagagtataagatgaggtacgttgaaaactaacaatcagcctagaatccggctgaccgctgaaagctgatcgctcataaataaggaagtaaccaccatgccccaaatgaccgggaaagatgccctggcccagatgctgatcgccgaaggcgccgaatttatcttcgggaacccggggaccagcgagacgccgttgctggatgtattgcaagactatcctcagctcagatacatccaatcgttgcaagaaggaacggcggtgggtatggccgacggttacgcccgggcgacgggacgccccgccttcgccaatatacacatagccgggggtctggccaacggcatcagcgccttgtacaacgcctaccggggcggcacgcccttggtgctaaccgccggcaactccgacactcggatgctcttaaccgacccaactttgtccggggacctggtggagatgaccagccagtacaccaagtggagcacgcaagtgctgcacgcatcggacatacccatggcggtgcggcgggcttataaagaagccaagactcctccaaccggccccgttttcatctctttcccttgggacaccatggacgaaaccggcgacctgaacatcgtgccttcgtcggccggattcttccgcacccggccggataccgatgccgtggcccgggcttcccagctactatcccaagccgacaaccccatcatcgtagtcggcgaccgcgtggcccaatccggcgcggccgcccaggtcgtccgggtggcagagcagttgggggccagggtctacgcaacctcgatgtccgaagtaaacttccccaacagccacgacttatatggaggaatactaaataccagcagcccggctacccaacggctattggccggagccgacgtggtcatggctgtaggcaccgatgtattttcttctttcctctatgtgtctgagccttttttgggctcccagaccaagctgatccacctggacagtagcgcccaagaactggagaagatctatcccacggaggtgggtatcctggccgaccctggagccggactggcggaactggccgaagccttggaccaggagatgtccgcctccaaccgtgaggccgcggcaactcgagcggcaacctggtcggaccagaagaaaaggtccggcgagcaatatcaacaacgactacagcagagatgggacaacacccccatgccggtggagcgcatgatgcacgaactagccaaggccgcgcctcccggcaccatcgttgccgacgaggccatcacctcgcngccagctttgatgcgagcatttaccttcgacgagccgggtagcctgtacggtatccgcggcggcgcgctgggttgggcgatgccaggcgcccttggggtgaagctggccaacccggaccgtccggtgctggcagtggtaggagacggcgcgtccatgtacaccgtgcaagccctttggaccgccgcccggtacaatatcccggtcgtctacgccatctgcaacaaccggtcttaccggatactcaaggtcaatatggacacctacctgcgccacatgcaggacgaccaggaacggcaaagcgactacgtgggcatggacttcgccaatcccctcgatctggccgcgatcgccagggcgatgggagttgccggtgaaacggtggaagacccggccggcctgggacccgctctggaaagagcttatgcctccggtaagccggcgttgctggacgtcagcatcgacggcgctctatagaacgtactttagacagagacggcatataggggtgtcccggctgtgcctccggagatgcggcgcctcgattcacctgggcgaactgctttactccggagacgaatcacatcgctctaaaacaccggtaggtccgtgtctaccttgaaaacctgtgccacgatgggttatttacgatattgatctattacaggcctatagtttaactattacggggatgtaaacgtcnatgtcaacggagtatgtttatagacataactaactggcgacgacaaaagttgacaataaaagcagaacgtaatatanaagtaggtctatatcattcatttgttcttgcttggactcaggaggctctatggtaagtcaatccgtacgaaatacattgctgacacggctgggaggggcccgggcgatgcagcgggtggcatctccttccatcatcatcggcttggggtccacagcctgtcagatcgtccaacacttagatgactccacggctggctggaacgcctcggaccgaaaatcgttggggttcctctatcttgatacccgagaggccaccagagacgagataaaccggggctcgagcttcatcggcctgacactccctcatttctccaacctccgggatatgcggccttggataaccgagtgcgtcccggaacttaagcacctcagcctctccagggaaggggcactggggatgctggccaacgccggtgtggccggccgttataattacgcgagtattagaggccacatagattctcttatcggggaagtctgtccctattacgaggggaagacctatctaagagtccacttggtttgtttcctcggcggcggcaccattggcgctctccccgtcctgttggccgctttggctgaggccaggggcaccgcgtataacttcagtctggttcttcacctattgatgccccaaaggggcatgtcgagggacccggacaacagctacccgcttcagctaaggaacgcgtatgccaccatccagttcctgcgcgtgataaccggggtcgaggtaggccaggggaagcacacgggcaccgatacctacaagattaccgtatacccggaaaagacggtcctggccgtaggccctcacttcgacctggcgatcgtccatcgtgcgcccaaagactctattccggcgcagaaagcccatgtgggcaggattctggagaatctggtgtccgatgccaccggtaccggttcagacctatgggcccggtatcacgaaactatgagggaagccaacaacaagacagacgcccgatttggctccatcagttccaaagaggtcagcctccttgatggatttttcaatctaaccgcccgcaagtacttgcaaactcgttggaccgcgggcaataggtcgtagacaccatgtttcgtaagatttggacacgtaagggagtttcataccgagacgcgtctcagcgcctgcggccttcgttggatcctttggcgttccttaatgcggatggcggggggttcactacgacggacgccctggaccagttgcatagtgcgatccattcatcgttggaagacgtgcagaaggcgtttcaactggtgtttgagcagttgaatccggaagccaacgtgagcgaccgaatcattctggatgccaacaaacagatcaggacccaacaaaccagggcccgcaacttggtaactctgaggcaagaagagttgaaccggcaggtcagggtcaagctggaaaacctctttattcaaggaatagtccaatcgcctcatcaagaaccgtccgtcaggagctgggagaatctgtcttcccggatcgtccaccggaatgaaccggaagtttcggaatactcgtacgaagacctgggcaccgaaaagaggggcaaacgtatcgcggtctgggaccacgaaaccgatgaatggctggaaactctctgccagaataacatccatgagatcatcactaaaatggaagagatgatcaaggactataaggacacttgggttgaggtaaccggggaactgagaaaacgcgctaacttaggtggcctgctctttcaacaggtgaacgaccccgacgtatggaatttcgaaagcgaggacccaacggtgaccaatctgttggaaggggacaaggccctggatattgcaaaccgtatcctggaccgcttccaactggtcaaccaggacatcctagaggttgcagacacggtgcggatgtct

SEQ ID NO: 1179 - DNA, 4000 bp, Escherichia coli
  misc_feature (114)..(114): n is a, c, g, or t
  misc_feature (150)..(150): n is a, c, g, or t
  misc_feature (180)..(180): n is a, c, g, or t
  misc_feature (225)..(225): n is a, c, g, or t
  misc_feature (228)..(228): n is a, c, g, or t
  misc_feature (333)..(333): n is a, c, g, or t
  misc_feature (461)..(461): n is a, c, g, or t
  misc_feature (492)..(492): n is a, c, g, or t
  misc_feature (494)..(494): n is a, c, g, or t
  misc_feature (511)..(511): n is a, c, g, or t
  misc_feature (526)..(526): n is a, c, g, or t
  misc_feature (559)..(559): n is a, c, g, or t
  misc_feature (562)..(562): n is a, c, g, or t
  misc_feature (574)..(574): n is a, c, g, or t
  misc_feature (583)..(583): n is a, c, g, or t
  misc_feature (712)..(713): n is a, c, g, or t
  misc_feature (715)..(715): n is a, c, g, or t
  misc_feature (772)..(772): n is a, c, g, or t
  misc_feature (778)..(778): n is a, c, g, or t
  misc_feature (784)..(784): n is a, c, g, or t
  misc_feature (786)..(787): n is a, c, g, or t
  misc_feature (967)..(967): n is a, c, g, or t
  misc_feature (1014)..(1014): n is a, c, g, or t
  misc_feature (1162)..(1162): n is a, c, g, or t
  misc_feature (1390)..(1390): n is a, c, g, or t
  misc_feature (1432)..(1432): n is a, c, g, or t
  misc_feature (1436)..(1436): n is a, c, g, or t
  misc_feature (1546)..(1546): n is a, c, g, or t
  misc_feature (1698)..(1698): n is a, c, g, or t
  misc_feature (1705)..(1705): n is a, c, g, or t
  misc_feature (1771)..(1771): n is a, c, g, or t
  misc_feature (1858)..(1858): n is a, c, g, or t
  misc_feature (1969)..(1969): n is a, c, g, or t
  misc_feature (1991)..(1991): n is a, c, g, or t
  misc_feature (2000)..(2000): n is a, c, g, or t
  misc_feature (2963)..(2963): n is a, c, g, or t
  misc_feature (2975)..(2975): n is a, c, g, or t
  misc_feature (2981)..(2981): n is a, c, g, or t
  misc_feature (3071)..(3071): n is a, c, g, or t
  misc_feature (3151)..(3151): n is a, c, g, or t
  misc_feature (3158)..(3158): n is a, c, g, or t
  misc_feature (3179)..(3179): n is a, c, g, or t
  misc_feature (3187)..(3187): n is a, c, g, or t
  misc_feature (3226)..(3226): n is a, c, g, or t
  misc_feature (3517)..(3517): n is a, c, g, or t
  misc_feature (3520)..(3520): n is a, c, g, or t
  misc_feature (3586)..(3586): n is a, c, g, or t
  misc_feature (3600)..(3600): n is a, c, g, or t
  misc_feature (3703)..(3703): n is a, c, g, or t
  misc_feature (3748)..(3748): n is a, c, g, or t
  misc_feature (3776)..(3776): n is a, c, g, or t
gagagtcttttgcggcctgccctatttatatcaccaacaatccggcttcttgatctgcttcatgaaatgcgtttgcgccgccgccatttggcgctggttgttgatgaatttggnggggttgatggtttgatcacgatcgaagatctggtngaagaaattgttggtgaaattgaagatgancatgacaccacagcgcaattgcggtttgagcaaaagggcgatggnacngccattgccgatgcccggcttgaagttgaggctcttgaagcgattaccggccctttgcttgatgatgatgaacgtgacgagattgatacgcttggcggattggtntgtgcgcttgctgggcgggtgcccggtcgcggcgaggttgtgcgtcatcgcggcgggttgcaatttgaaattcttgaaggtgacccgcgccgtgtcactttgttaaaacttcgtggattgccgcgtgncaaaaccagctctagcaaaccggactaaaancngcccccttatgcttttntggcatttgcttgcnggcgcatttgccagcctgtccttgccgccattnttnttattgccagcnatttttgcnttatcgattccgcttcttgcctatttaaaagctgaaagccggatgcaggcatcgttgatttttggtgcggcggggaccggatggtttctggcatcaacctattgggtgtcgcattcgctgattgttganncnccatcactttgggttttggcgccgtttatggcgctggcattggcgcttattctggcngttttntgggcnanngcggcaatggtttcatggtcatttgggcggcgaccggtggcgcgcctgttttggtttgttgcctttttcagccttggcgaatgggcgcgtggctttgtggcaaccggatttccgtggaatctgaccggcagtttgtttgctgttgatcttgccagcctgcaatcggccagcgtgattggngcctatgggctatgcgtgattgcgctattttttgcattggtaccggnattctgggttttggggcatcggcgttttgccgcgatatttttgatgttgcctcttatgcttgccgcctttggggcgatgcggcttgccaattcatctgatgcccattcggcatcatcgggatcaatgatccggcttgtgcaaccggcnataccacaagccgataaatgggatcgaagcaaacgccagcgccatctcgacaggcttgtcagcttgtcgcgtcaaggtgatgtggtgccaaaattggtgatctggccggaaaccgcctttgccggatttgctagccgcaatcaagcattgctcaacacaaccattcgcaatgccacgcaaaatgatggtttggtgattaccggtattccgcgatttggcggcggtcgnactttgctgaattcggccattatgattgaccatgatggtgcnattnaagctgtctatgacaaacgccatcttgtgccgtttggcgaatatatgccatttcggaaatggcttcccttccttgagccaattgttggcccgattgattttgtacctggngaaaataatcgcctgatgcgtcttgatggttatggcagcatacaaatgctgatttgctatgaagtgatttttgccggcgcggtcattggtcaagagatgcgcccagatatgatgatcaatatcaccaatgatgcttggtttggccaaagtgnagggccntggcagcatcttgtacaagcccagatgcgcgcggtcgaagaaggcttgccgctgatgcgggttgcnaatacgggcatcactgccggttttgattcctatggccgtattcttggacagatggggcttggcaggcagggtgttcttgatctgccngtgccgccggccctagcgccaacgctatttgcccgtttcggtaatttgggattctttgcacttattttcttgattattggcagtgctgcatgtcttgacctctctcgttcnatcaggcaatagatacaatcancaagaattnaggatcccacccatgagctatatctttacatctgaatctgtttcagaaggccatcccgacaaattatgtgaccgtgtttcggatacggttcttgatctgtttttgaaatatgaaccagaagcgcgtgttgcctgtgaaactttggcaacgacaaaccgtgttgtgctggctggtgaagtgcgggcaagcaagtctacattgacccagatcatggccgagatcgaaccggcagtgcgggcggcggtcaaagatatcggctatgagcaagacaagtttcatcacgccaatttcgaatttcaaaactaccttcatgaacaatcgaccgatatcgcgatgggtgttgattcaggcgataataaagatgaaggcgctggcgatcaggggcttatgtttggttatgcctgtgatgaaaccgatgtcttgatgcctgcggcaattcattattcgcatcagattctaaaagatcttgcaacggttcgtaaacaggatgccgattcaatccttggccctgattcaaaaagccagatcagccttgtttatgatgatgccggccgtccaacgggtgtgcataaggtggttctatcaacgcagcattctgaaaaagcgacacaagccgatattctggcactggtgacgccggtgatcgccaatgttcttcccgatggttggatggtgtcaggtgatgatctgctggtaaacccaaccggacagtttgtgattggtgggccggatggtgatacgggtcttactggccgcaaaatcattgttgatacttatggtggggcggcgccgcatggtggcggtgccttttcgggaaaggacccaacaaaggttgaccggtcggctgcctatgctagccgctatttggcaaaaaatgttgttgcggcgggattggcatcgcgttgcacaattcagatcgcctatgcgattggcgttgccgagccggtatcgctttatgcgaanacacatggcacnggcacnattgatgatcaaaaactgcaagaagcgcttcgcgattgcatggatttgacgccgcgcggtattcgccagcatcttggcatgaatgcgccnatctatgcgccaactgccgcctatgggcattttggccgaattgctggtgaagcaggggcgggcacatttagctgggaagnaaccgancttgttgacgcgcttcgcgcngcggcacnataggatatcacttgccgaaatagctggtcaaatattcnatcaaacatccgatcaaatacgcgttcacatatgggacagattttgcaatggccgatcacgatgctgttaccaagaacggggttttaattgacgggatgccgctggggccgcgtttttatggtcggcgcaaaggccgcccgcttcgtgcctcgatgaagcggcttcttgatgaagctttgccgcaatttgcctttgatccggcgcggccgattgatgatcaatttggccacaaggccgatcgctatcttgaaatcggttttggcggtggtgagcatctggctggccttgcngcngcgatgcctgattgcgatttcatcggcgccgaacctttcatcaatggtgttgccagtctgcttcgncatattgatgaacnacagcttggcaatatccgcatctggccagatgatgttcggctgatcatgcctagtcttggggcggcaagccttgctggtgcctttatcatgtttcccgatccntggccgaaaaaacgccatgcggcgcggcgcattctgcaaaccgcncttcttgaccagcttgcggtgatgatcnggccgggtggacggctggttctggcaagtgatgatcctacggcaaaaagctggcttttgcaggctgccaccgcacatgctgattttatgtggacagcgcgcagcccccaagattggcgtcaacgacctgccgaattgcccgaaacgcgctacatgaaaaaggccgatcgcgccgaacgccaatcatcatggtttctgtttcagcgttgcggcgttgccgactga

SEQ ID NO: 1180 - DNA, 4000 bp, Escherichia coli
  misc_feature (1163)..(1163): n is a, c, g, or t
  misc_feature (1927)..(1927): n is a, c, g, or t
  misc_feature (1977)..(1977): n is a, c, g, or t
  misc_feature (1986)..(1987): n is a, c, g, or t
  misc_feature (2007)..(2007): n is a, c, g, or t
  misc_feature (2688)..(2688): n is a, c, g, or t
ccttgaacccccctgccgagccgccctcgcgggagagtttaatttgttcggctgacggaggagccgaaatttaggcgggattggaattaacagtatctataatatcgcaacaaaagtacatttattcaatatcagttgttccgacaacttcaattaaccggctttttaagctgtgcgacctgcaatgtttaagaacaccgctatacgaagaaaaattctttttattaacccttctgaatatccttcgctttgtcttggttcttataactctgtgatgcggaaaggagacataaccgagataatcgattccgctggcgtatgttttgagaattaatttctttgggtggactttaagattcagtcgttcttgaagaaaatgttcgattttctgacggcaatcaataagcaactctttgttctcatgcataagaacaaaatcatcggcataacgaacataccccttgattcgcagttcgttcttaacgaattgatccagttcgttcaagtatacattcgcgaacagttgcgatgtcaaattaccgagcggcaatccagggttaaaactattgattatttctcgaaaaagattcatgagccgctcgtcactagttctttttgaaagaatatcgagaaggattttatgatcaatggaatcaaaaaacttagtcacatccagttttaaaatccataaagttcttgtgtagttatgggacaacctaagggccaaattctgcaatcgtctcactgccgcatgcacacccttcgtttttctggacggccaagaatcaaaaataaatactttattccacatcggctcaatgatcctgtggacggcatggtggaggaggcggtccattaccgaagctttatggatatgacggcgtttcggatcgtggatgaaaaaagagaagtagccgccatgtttgtaggtctcatgtttaagattttcatgcagcgcaaaaatatggtcttcaagattgacctcgaattcagctacatcgcctttgttgcttttctccttcttgaactccgtccaagcgtcgaacaggttctctaaagaaattatttgatcgaacataaaaatgaatagaaataataatcaaacaacgccatttgcacataatacgcccttatttcaggcagtatataaattgtatcttgcntggtatcgccgttgccagacaattcccaaaaaggatagatttacaattggtcaaaaagcagaaaatactctgttggaaataatgactcttgttgtgtctgcatatcacactaaagacagcgtgcgtaagagagaaatcttatcgcagattaacatcaaagtggaaggaatcaagattctttttcggttggctaagaatgtgaaagcaattgagcaacggccatatattgattatgagagtcgtttgcaagagatagggaagatgcttggcggttggatgagacaaacacaaagcccgtccattagatagacgggctttgtaacacttcgggaaagagaagcgccgagatcgccaccgcggttgtcaggcctccacttgttgccgttcacgcccttcgggtcaaagttgccgagattgacgaggttgccgtcagggttcagagacgcttctcttacgcttttccatccaagtcaacggcacttcatgctaatgggacatgttgcacctgtataagtacgcgcgcactctataaaagtcaatttacctgcgccagaaaagcgtaagcagtgtattttgttggcgagcatgatccgtaaaccatgcttcattagccatatagaaattatactatattccgtggaaaagcccaaaataaaaattttttcgaaaaaatcgactcccgttagggagtcgattatcaaagaaacaaataacaaaaaacaaagttacaatctgcgggaaagagaagcgccgagaccgccacngcggccgacaggcctccactcgccgccgtccacgccccccgggccaaagnggccgaganngacgaggtggccgccagggnccagagacgccgaccaagtatatttacccgaaagtaatcgcttattatgcttgtcataatacattgcaacatcgtaaattgtttcgggaatggtttgtcttgtaagcttggtaatttttaattccgaaagttgcttcgcagcttcttgccaatttttgctcatgagccgtgtgagtcgatctttatttgactcaaattcccgcattgcttcttcatattcttccgggatttcaatatctttgaacgctttttcccgaagagcttttataataacctcagtttgttctacatagttcttactcgtgctatcaggcagtaagtctttagaaactaatgcccaaccagaatggggaacttcttttttaaagtaatcttccccaatccagcttttccaactatctgctgttcgtaatatttcccccttatcatcttttttccatttcttaaccaaaatatcattcattgcttccatagacatcggcttgccagcatcggttttgtctactctcaaaacaagcatttgtcctaatttctcagcgcgttccagctcttcgacagaaaaaggaatctccggtacctcccttaagcgtacgccaaaagttttttctacctcatcagggccgaatacattttctctgccaagtttttcaacggcagtttcgatttgctcggcaaccgtgncttcaagccttgtttcgggtatcgcctctgccttttctttcggtttctctttctctttctctttttcttctctttccggccccttgcgttttgattcggctacttgtggcttccaagacgcttggtcaagcatcagacggactttttgtttatcagcatcagagctatacattccgataacgcaggtctcaaaagcatttttgatagtttcatttatatcgccgtggtaaaaacgagcaatatattgcggaatggtgctcattacgagacggggattaaagcaaagattctgccgctggcttttagccatctcccgctttgcgcccgatgattttgcttccagtaccctcataatggttacgatttctttgcgccagtgcggcattccgggtatttcggcgagttctctgacgggtaggccttcacccgtgtggcgaaattcttgttccggcaaattaatgtccaccttttccccaataacgccggcgagcaatttgttttgctcttcctccgaatactcaattggcaatttacggaaaacccaacgaccaaatgtttccgccgacaattgacttcgatcggtatattcgtgtccttcttcaaaaccaggtggattttgagcggcaaccaaacgaaagtcaggatgcacttttacccgttcgttttcgttatacggattggtaatttctttacggccgtttaagatggcatcaataatcggattgatgatgccggcgagcttactttggcggttatattcatctaagaaagcaacgcctccgtttcggatagcgtacatcaagtcgccgtcataccactccagtttttctttgccattctcatctactttcaaagtatgtccaccgatcacatcttctcgagcagtctcgcggtcaaaattgaccttacagtaattcatgttgaggtcgcggcacatgcgggcaatagtcgtggtcttgttgtagacgccggtgcctccctccaaaagaacaggtttgtttaaaagcaaagcggttgccacttcacgcatggtcgcatagtggccttccaagtagaaatattcttccttaaattcttctgctttggggacgaggcgcccgccttctcctttgggaatctccacgccaagataagagacggatttttcgccaataacaatatagggctcttcaggagagcgcgtggtttccttttctgcttccgatttcgccgcggactgttctgatgtctctttgccgtctcccggcggtatcaccgcctcaaatttttgttcagggcctctcataatgacttggtgaaatttatatattca

SEQ ID NO: 1181 - DNA, 4000 bp, Escherichia coli
  misc_feature (1)..(2): n is a, c, g, or t
  misc_feature (4)..(6): n is a, c, g, or t
  misc_feature (9)..(9): n is a, c, g, or t
  misc_feature (11)..(21): n is a, c, g, or t
  misc_feature (24)..(26): n is a, c, g, or t
  misc_feature (28)..(28): n is a, c, g, or t
  misc_feature (30)..(33): n is a, c, g, or t
  misc_feature (44)..(44): n is a, c, g, or t
  misc_feature (50)..(50): n is a, c, g, or t
  misc_feature (53)..(53): n is a, c, g, or t
  misc_feature (58)..(58): n is a, c, g, or t
  misc_feature (60)..(60): n is a, c, g, or t
  misc_feature (63)..(64): n is a, c, g, or t
  misc_feature (66)..(66): n is a, c, g, or t
  misc_feature (69)..(70): n is a, c, g, or t
  misc_feature (74)..(75): n is a, c, g, or t
  misc_feature (85)..(85): n is a, c, g, or t
  misc_feature (89)..(90): n is a, c, g, or t
  misc_feature (98)..(99): n is a, c, g, or t
  misc_feature (104)..(105): n is a, c, g, or t
  misc_feature (107)..(107): n is a, c, g, or t
  misc_feature (109)..(109): n is a, c, g, or t
  misc_feature (112)..(112): n is a, c, g, or t
  misc_feature (129)..(130): n is a, c, g, or t
  misc_feature (134)..(134): n is a, c, g, or t
  misc_feature (138)..(138): n is a, c, g, or t
  misc_feature (142)..(143): n is a, c, g, or t
  misc_feature (145)..(145): n is a, c, g, or t
  misc_feature (149)..(149): n is a, c, g, or t
  misc_feature (153)..(155): n is a, c, g, or t
  misc_feature (157)..(157): n is a, c, g, or t
  misc_feature (162)..(162): n is a, c, g, or t
  misc_feature (167)..(167): n is a, c, g, or t
  misc_feature (170)..(170): n is a, c, g, or t
  misc_feature (176)..(178): n is a, c, g, or t
  misc_feature (182)..(182): n is a, c, g, or t
  misc_feature (184)..(184): n is a, c, g, or t
  misc_feature (188)..(188): n is a, c, g, or t
  misc_feature (190)..(190): n is a, c, g, or t
  misc_feature (194)..(195): n is a, c, g, or t
  misc_feature (200)..(200): n is a, c, g, or t
  misc_feature (203)..(203): n is a, c, g, or t
  misc_feature (207)..(209): n is a, c, g, or t
  misc_feature (218)..(219): n is a, c, g, or t
  misc_feature (223)..(225): n is a, c, g, or t
  misc_feature (228)..(229): n is a, c, g, or t
  misc_feature (238)..(238): n is a, c, g, or t
  misc_feature (241)..(241): n is a, c, g, or t
  misc_feature (243)..(243): n is a, c, g, or t
  misc_feature (250)..(251): n is a, c, g, or t
  misc_feature (254)..(258): n is a, c, g, or t
  misc_feature (262)..(262): n is a, c, g, or t
  misc_feature (269)..(269): n is a, c, g, or t
  misc_feature (271)..(271): n is a, c, g, or t
  misc_feature (273)..(273): n is a, c, g, or t
  misc_feature (276)..(276): n is a, c, g, or t
  misc_feature (280)..(280): n is a, c, g, or t
  misc_feature (283)..(284): n is a, c, g, or t
  misc_feature (287)..(287): n is a, c, g, or t
  misc_feature (294)..(295): n is a, c, g, or t
  misc_feature (301)..(301): n is a, c, g, or t
  misc_feature (303)..(304): n is a, c, g, or t
  misc_feature (310)..(310): n is a, c, g, or t
  misc_feature (321)..(321): n is a, c, g, or t
  misc_feature (324)..(324): n is a, c, g, or t
  misc_feature (327)..(327): n is a, c, g, or t
  misc_feature (329)..(331): n is a, c, g, or t
  misc_feature (340)..(340): n is a, c, g, or t
  misc_feature (342)..(343): n is a, c, g, or t
  misc_feature (350)..(352): n is a, c, g, or t
  misc_feature (354)..(354): n is a, c, g, or t
  misc_feature (359)..(359): n is a, c, g, or t
  misc_feature (369)..(370): n is a, c, g, or t
  misc_feature (378)..(378): n is a, c, g, or t
  misc_feature (381)..(381): n is a, c, g, or t
  misc_feature (384)..(384): n is a, c, g, or t
  misc_feature (386)..(386): n is a, c, g, or t
  misc_feature (392)..(392): n is a, c, g, or t
  misc_feature (397)..(397): n is a, c, g, or t
  misc_feature (399)..(401): n is a, c, g, or t
  misc_feature (403)..(403): n is a, c, g, or t
  misc_feature (406)..(406): n is a, c, g, or t
  misc_feature (414)..(414): n is a, c, g, or t
  misc_feature (416)..(416): n is a, c, g, or t
  misc_feature (418)..(418): n is a, c, g, or t
  misc_feature (420)..(420): n is a, c, g, or t
  misc_feature (422)..(423): n is a, c, g, or t
  misc_feature (432)..(433): n is a, c, g, or t
  misc_feature (439)..(440): n is a, c, g, or t
  misc_feature (442)..(442): n is a, c, g, or t
  misc_feature (444)..(445): n is a, c, g, or t
  misc_feature (448)..(448): n is a, c, g, or t
  misc_feature (451)..(451): n is a, c, g, or t
  misc_feature (457)..(457): n is a, c, g, or t
  misc_feature (459)..(459): n is a, c, g, or t
  misc_feature (462)..(466): n is a, c, g, or t
  misc_feature (469)..(469): n is a, c, g, or t
  misc_feature (472)..(473): n is a, c, g, or t
  misc_feature (477)..(477): n is a, c, g, or t
  misc_feature (481)..(482): n is a, c, g, or t
  misc_feature (484)..(484): n is a, c, g, or t
  misc_feature (488)..(488): n is a, c, g, or t
  misc_feature (491)..(491): n is a, c, g, or t
  misc_feature (495)..(495): n is a, c, g, or t
  misc_feature (497)..(497): n is a, c, g, or t
  misc_feature (501)..(501): n is a, c, g, or t
  misc_feature (504)..(504): n is a, c, g, or t
  misc_feature (506)..(506): n is a, c, g, or t
  misc_feature (513)..(513): n is a, c, g, or t
  misc_feature (515)..(515): n is a, c, g, or t
  misc_feature (517)..(517): n is a, c, g, or t
  misc_feature (520)..(520): n is a, c, g, or t
  misc_feature (523)..(523): n is a, c, g, or t
  misc_feature (529)..(529): n is a, c, g, or t
  misc_feature (531)..(532): n is a, c, g, or t
  misc_feature (535)..(535): n is a, c, g, or t
  misc_feature (542)..(542): n is a, c, g, or t
  misc_feature (545)..(546): n is a, c, g, or t
  misc_feature (549)..(549): n is a, c, g, or t
  misc_feature (551)..(551): n is a, c, g, or t
  misc_feature (556)..(556): n is a, c, g, or t
  misc_feature (558)..(558): n is a, c, g, or t
  misc_feature (561)..(563): n is a, c, g, or t
  misc_feature (565)..(565): n is a, c, g, or t
  misc_feature (570)..(570): n is a, c, g, or t
  misc_feature (578)..(579): n is a, c, g, or t
  misc_feature (582)..(585): n is a, c, g, or t
  misc_feature (587)..(587): n is a, c, g, or t
  misc_feature (594)..(596): n is a, c, g, or t
  misc_feature (598)..(599): n is a, c, g, or t
  misc_feature (604)..(604): n is a, c, g, or t
  misc_feature (607)..(607): n is a, c, g, or t
  misc_feature (609)..(610): n is a, c, g, or t
  misc_feature (613)..(613): n is a, c, g, or t
  misc_feature (617)..(617): n is a, c, g, or t
  misc_feature (619)..(619): n is a, c, g, or t
  misc_feature (622)..(623): n is a, c, g, or t
  misc_feature (626)..(626): n is a, c, g, or t
  misc_feature (628)..(628): n is a, c, g, or t
  misc_feature (630)..(630): n is a, c, g, or t
  misc_feature (634)..(635): n is a, c, g, or t
  misc_feature (639)..(640): n is a, c, g, or t
  misc_feature (643)..(643): n is a, c, g, or t
  misc_feature (649)..(649): n is a, c, g, or t
  misc_feature (655)..(657): n is a, c, g, or t
  misc_feature (665)..(665): n is a, c, g, or t
  misc_feature (672)..(672): n is a, c, g, or t
  misc_feature (676)..(676): n is a, c, g, or t
  misc_feature (680)..(680): n is a, c, g, or t
  misc_feature (685)..(686): n is a, c, g, or t
  misc_feature (692)..(693): n is a, c, g, or t
  misc_feature (698)..(698): n is a, c, g, or t
  misc_feature (700)..(701): n is a, c, g, or t
  misc_feature (703)..(703): n is a, c, g, or t
  misc_feature (705)..(705): n is a, c, g, or t
  misc_feature (707)..(708): n is a, c, g, or t
  misc_feature (715)..(716): n is a, c, g, or t
  misc_feature (721)..(721): n is a, c, g, or t
  misc_feature (726)..(727): n is a, c, g, or t
  misc_feature (729)..(729): n is a, c, g, or t
  misc_feature (737)..(737): n is a, c, g, or t
  misc_feature (740)..(741): n is a, c, g, or t
  misc_feature (743)..(743): n is a, c, g, or t
  misc_feature (749)..(749): n is a, c, g, or t
  misc_feature (756)..(758): n is a, c, g, or t
  misc_feature (761)..(761): n is a, c, g, or t
  misc_feature (764)..(766): n is a, c, g, or t
  misc_feature (769)..(769): n is a, c, g, or t
  misc_feature (773)..(774): n is a, c, g, or t
  misc_feature (779)..(779): n is a, c, g, or t
  misc_feature (781)..(781): n is a, c, g, or t
  misc_feature (784)..(784): n is a, c, g, or t
  misc_feature (787)..(787): n is a, c, g, or t
  misc_feature (790)..(791): n is a, c, g, or t
  misc_feature (800)..(800): n is a, c, g, or t
  misc_feature (802)..(802): n is a, c, g, or t
  misc_feature (806)..(806): n is a, c, g, or t
  misc_feature (809)..(810): n is a, c, g, or t
  misc_feature (813)..(814): n is a, c, g, or t
  misc_feature (818)..(818): n is a, c, g, or t
  misc_feature (820)..(820): n is a, c, g, or t
  misc_feature (823)..(823): n is a, c, g, or t
  misc_feature (825)..(825): n is a, c, g, or t
  misc_feature (827)..(827): n is a, c, g, or t
  misc_feature (829)..(830): n is a, c, g, or t
  misc_feature (834)..(834): n is a, c, g, or t
  misc_feature (836)..(837): n is a, c, g, or t
  misc_feature (840)..(840): n is a, c, g, or t
  misc_feature (843)..(845): n is a, c, g, or t
  misc_feature (847)..(854): n is a, c, g, or t
  misc_feature (856)..(858): n is a, c, g, or t
  misc_feature (860)..(864): n is a, c, g, or t
  misc_feature (866)..(871): n is a, c, g, or t
  misc_feature (873)..(874): n is a, c, g, or t
  misc_feature (876)..(881): n is a, c, g, or t
  misc_feature (883)..(883): n is a, c, g, or t
  misc_feature (886)..(899): n is a, c, g, or t
  misc_feature (901)..(903): n is a, c, g, or t
  misc_feature (905)..(910): n is a, c, g, or t
  misc_feature (914)..(918): n is a, c, g, or t
  misc_feature (920)..(921): n is a, c, g, or t
  misc_feature (923)..(923): n is a, c, g, or t
  misc_feature (925)..(934): n is a, c, g, or t
  misc_feature (936)..(937): n is a, c, g, or t
  misc_feature (939)..(940): n is a, c, g, or t
  misc_feature (942)..(944): n is a, c, g, or t
  misc_feature (946)..(949): n is a, c, g, or t
  misc_feature (951)..(951): n is a, c, g, or t
  misc_feature (953)..(954): n is a, c, g, or t
  misc_feature (956)..(956): n is a, c, g, or t
  misc_feature (958)..(963): n is a, c, g, or t
  misc_feature (965)..(967): n is a, c, g, or t
  misc_feature (970)..(970): n is a, c, g, or t
  misc_feature (972)..(972): n is a, c, g, or t
  misc_feature (975)..(990): n is a, c, g, or t
  misc_feature (992)..(994): n is a, c, g, or t
  misc_feature (997)..(997): n is a, c, g, or t
  misc_feature (999)..(999): n is a, c, g, or t
  misc_feature (1001)..(1002): n is a, c, g, or t
  misc_feature (1788)..(1788): n is a, c, g, or t
  misc_feature (1989)..(1989): n is a, c, g, or t
  misc_feature (2503)..(2503): n is a, c, g, or t
  misc_feature (2736)..(2736): n is a, c, g, or t
  misc_feature (2803)..(2803): n is a, c, g, or t
  misc_feature (3184)..(3184): n is a, c, g, or t
nngnnngtnannnnnnnnnnnacnnngnannnnaaggctccgangcttcnttnccttntnaanntnctnnggannctgggaaacnggcnncccgggcnncacgnncncnccntccctcccctcttccanntctncctngtgnncntgangccnnngngggtnaagcncgnccaccnnnttcncnttgntncggnnccgcnganccgnnncatccaaannatcnnncgnntggccgccntgncngcccttnngannnnngggntatccgngnangcngaanccnnatntcccganncctttngnncctttngcgccaatggngcnaangnnntttaccccngnnccgaagnnncngacgnttttgcgggnnatgggggnatngcntnatatcnacctnannncntcnaaaaattntncnantnnttttcccannctcttnncntnnccntcnggcccntnggnnnnnttnagnntttnaagnntngaangancaancngccntgnancgttgtnancnaantgntccaangnnccngcggccnagnngtntngaaantnccnnngnccccnggccccgnnggnnnncnacgcctnnncnncaaanttngnnttntccncntgnnctngngncatnnccgnnttnaacggntccacnnnccccccantgttccnggtntccnaggcnnggaggnnaacangnngncntnnccccttnngcaantccgnngnctcggttntcnngncctcgntttcccnnnccnccnnnccngggnnaaaancntcnaanaanncatccaccncntccnccnngtnnccgntnggncngncnnttangnnaantannngnnnnnnnngnnncnnnnncnnnnnnanntnnnnnncnggnnnnnnnnnnnnnncnnnannnnnncccnnnnncnncncnnnnnnnnnncnncnntnnntnnnncnanntngnnnnnntnnnccnanacnnnnnnnnnnnnnnnngnnncangngnnccatcggaaagcccgcgttgctctcgatcgggcaacaccatcatcgtcctcaagcgagatcagaccagaacctcgctcggctgtgcaattcgatcccgttcacaagttgcgaggctcctaactctaatgtcaagcttcctcatgcggtttcgaagggttgatggtggcactcctaaaacctctgcggcacctcccttacctgctatcaatccgttagtcatctccacaacttcggaaatgtgctctctttcggcttgggccagtgtgcacacccttcccacatgcgactttgggagggatgaacttgcatcctcgggagaaattccactcagtggagggatccgaagggttgggtcccctgagattgggactgaggcttccgttcgcactggtaacactgaggtttgcccaaacgtgatacccagtcgtttcatcatggacatcaaggtggtccgtttcacccccagtcgggcggcagcaccatttcgaccacctactacaccctccgtttgttggagagtctgaaggatttgcgagcgctccgcgtcttccagcgtgacaggcgcgaatgacttcggcccgcggcggaattcgggtagcgggccattcaggacagcgccagtcgagagaatgaccgaacgctcgacgaagttcagcaattcccggacattgcccggccaggaatgccgtacaagaaccgacatgaattcttcggaaatgccctttatcggcttctgcatgcggtctgcgtaatccattgcaaaatggtggaccaacaaagggatntcttccggccgttcacgcaagggcggcagttcaacggggaaaacgctgagccgatagaagaggtcggcgcgaaactcacgatcgtcgaccatctcagcgagattgcgatgtgtggcgcagatcacgcgcacatcggtgtgaatcgtggcggcaccgccgagacgttcgaactgtctttcctggatgacgcgaagaattttnggttgcaactcgagcggaaggtcgccgatctcgtccaaaaacaaagtgccgtggttagcccgctcaaaccgtccaatactgcgcgcgaccgcgccggtgaaggcgccacgctcatgtccgaacagttcgctttcgagcaaaccggcaggaatagcggcgcagttcaccttcacaaaggggccattcgatctgtcgctgcacttgtgaatggcttcagcaatcagttccttgcctgttcctgtttccccgttgatcaagaccgtggcgttggtcggcgcaacgatccgcaccattccgaggacgcgtcggagagccgcgcttctaccgacaatgggaggcattccgctgacgcagagttcgttgttatcgaacgcaacgtctgccgacgtcgcatcctccattccaaagagcgcggtattgttgaccgcaggcacttcagttagccagcttgcttgtgtcgccattctctttactcctctcgttcgtccggtatattttcgatgtccgcatactncggccttgcttaagcgctaacttccacctcgagaccttgtgatccactcgcgtacgtatgctgggcaattcttcaatgtgatgctgtccgcttcgcagcgttcgagaaaggcgatcgcctctcgacctaccaacgttaggtcccttaggtccaagaccatacggcgtccagacgcttccgacttaattaacgcttccaggtcggctatgtctccctcgtccattcggccactnagcgtaaagaccacttccccgttcgccgacctttgaattctcagcattctatcctttcagaggacantcctaccgttgacaactgccaggccaatctaacgacttcctccgcccgacccttgttatgccgcgtggcctgccacttcccacactcgcgtggctgcttgttcacggccaaatatcagagccgcggcgcccgcgttgtggctcacgcagatacaatcgccgcggtgaatttgtccgctggccatcaggttcgacaacggttgtacaagtaggcgctcgatcgcgcgcttcaagtgccgcgcgccatacctggaatcggtgccctccaccagcaagaactccttggcggtatcggtgacattaaccaggaacgccgttttgtttgcggcagcggcctggatacgctgttgcaccatctccagttcaatatcaacgattctgngcaattcctctttaccgagcgatttgaagacgacgatgttgtccagacggttgatgaactccggcgtaaattttcgacgagctgccgcgatgccggcgcttgagatccgggcactaagtttacgcatacccgtttcatccactgaggtagcgtggaagcccagccggggactcaccagggaactcatttcagctgcgccgagattgctggtgaggaacaccatggccgctgagaaatcaactctgcgattgtcgcccaacgtcaatgttgctttgtccaggatgcccaggagaagattccacaaggcgtcggatgccttttcgatttcatcgaaaagtaggaaactcagcttgaccttctcggtgtgatgctgattcagcgcttcttgcgacaacagtgcatgcgtttcacggtgccccagatatccgggaggcgacccgatcaatttcgcgatttcatggctgtgttgaaattccgcgcaatcgattttgattactgcacgagagttctgcagtagggatttggcagtcgcctccacgatacgagtctttccggagccggttggccctaggaagagaaagtttccgatcggccgaccgaccggagacagtcccgccacgtgagtctggtaagccctcacgatctggtgaattgcttcgtcttgtccaacgatgaggtggccgagcctgttctccagatcgtctgcctgccttcccgttctggtagggtctagtaatgcgagcctgggcatttttccttctccttccggcagcggccatatcattgtctgcttgccgcgaacgctcggctctggaa

SEQ ID NO: 1182 - DNA, 4000 bp, Escherichia coli
  misc_feature (1)..(1): n is a, c, g, or t
  misc_feature (3)..(10): n is a, c, g, or t
  misc_feature (13)..(16): n is a, c, g, or t
  misc_feature (18)..(20): n is a, c, g, or t
  misc_feature (23)..(33): n is a, c, g, or t
  misc_feature (36)..(36): n is a, c, g, or t
  misc_feature (38)..(38): n is a, c, g, or t
  misc_feature (40)..(40): n is a, c, g, or t
  misc_feature (42)..(54): n is a, c, g, or t
  misc_feature (56)..(57): n is a, c, g, or t
  misc_feature (59)..(62): n is a, c, g, or t
  misc_feature (64)..(66): n is a, c, g, or t
  misc_feature (69)..(70): n is a, c, g, or t
  misc_feature (73)..(74): n is a, c, g, or t
  misc_feature (76)..(78): n is a, c, g, or t
  misc_feature (80)..(81): n is a, c, g, or t
  misc_feature (86)..(87): n is a, c, g, or t
  misc_feature (90)..(95): n is a, c, g, or t
  misc_feature (98)..(102): n is a, c, g, or t
  misc_feature (106)..(114): n is a, c, g, or t
  misc_feature (118)..(118): n is a, c, g, or t
  misc_feature (120)..(120): n is a, c, g, or t
  misc_feature (122)..(124): n is a, c, g, or t
  misc_feature (126)..(126): n is a, c, g, or t
  misc_feature (129)..(130): n is a, c, g, or t
  misc_feature (132)..(134): n is a, c, g, or t
  misc_feature (136)..(137): n is a, c, g, or t
  misc_feature (140)..(144): n is a, c, g, or t
  misc_feature (146)..(147): n is a, c, g, or t
  misc_feature (149)..(150): n is a, c, g, or t
  misc_feature (152)..(156): n is a, c, g, or t
  misc_feature (158)..(168): n is a, c, g, or t
  misc_feature (172)..(172): n is a, c, g, or t
  misc_feature (174)..(175): n is a, c, g, or t
  misc_feature (177)..(178): n is a, c, g, or t
  misc_feature (180)..(181): n is a, c, g, or t
  misc_feature (184)..(187): n is a, c, g, or t
  misc_feature (189)..(213): n is a, c, g, or t
  misc_feature (215)..(215): n is a, c, g, or t
  misc_feature (217)..(227): n is a, c, g, or t
  misc_feature (229)..(235): n is a, c, g, or t
  misc_feature (238)..(238): n is a, c, g, or t
  misc_feature (240)..(243): n is a, c, g, or t
  misc_feature (246)..(249): n is a, c, g, or t
  misc_feature (251)..(253): n is a, c, g, or t
  misc_feature (255)..(259): n is a, c, g, or t
  misc_feature (261)..(261): n is a, c, g, or t
  misc_feature (263)..(269): n is a, c, g, or t
  misc_feature (272)..(275): n is a, c, g, or t
  misc_feature (277)..(282): n is a, c, g, or t
  misc_feature (285)..(292): n is a, c, g, or t
  misc_feature (294)..(296): n is a, c, g, or t
  misc_feature (298)..(301): n is a, c, g, or t
  misc_feature (305)..(315): n is a, c, g, or t
  misc_feature (317)..(320): n is a, c, g, or t
  misc_feature (324)..(327): n is a, c, g, or t
  misc_feature (329)..(332): n is a, c, g, or t
  misc_feature (334)..(336): n is a, c, g, or t
  misc_feature (338)..(340): n is a, c, g, or t
  misc_feature (342)..(342): n is a, c, g, or t
  misc_feature (344)..(344): n is a, c, g, or t
  misc_feature (349)..(350): n is a, c, g, or t
  misc_feature (353)..(355): n is a, c, g, or t
  misc_feature (357)..(359): n is a, c, g, or t
  misc_feature (361)..(361): n is a, c, g, or t
  misc_feature (364)..(368): n is a, c, g, or t
  misc_feature (373)..(376): n is a, c, g, or t
  misc_feature (379)..(379): n is a, c, g, or t
  misc_feature (382)..(385): n is a, c, g, or t
  misc_feature (388)..(388): n is a, c, g, or t
  misc_feature (393)..(402): n is a, c, g, or t
  misc_feature (404)..(406): n is a, c, g, or t
  misc_feature (408)..(408): n is a, c, g, or t
  misc_feature (410)..(410): n is a, c, g, or t
  misc_feature (412)..(415): n is a, c, g, or t
  misc_feature (417)..(422): n is a, c, g, or t
  misc_feature (424)..(425): n is a, c, g, or t
  misc_feature (429)..(430): n is a, c, g, or t
  misc_feature (434)..(436): n is a, c, g, or t
  misc_feature (438)..(439): n is a, c, g, or t
  misc_feature (441)..(448): n is a, c, g, or t
  misc_feature (450)..(451): n is a, c, g, or t
  misc_feature (453)..(453): n is a, c, g, or t
  misc_feature (455)..(457): n is a, c, g, or t
  misc_feature (461)..(462): n is a, c, g, or t
  misc_feature (464)..(474): n is a, c, g, or t
  misc_feature (476)..(477): n is a, c, g, or t
  misc_feature (481)..(485): n is a, c, g, or t
  misc_feature (488)..(489): n is a, c, g, or t
  misc_feature (491)..(492): n is a, c, g, or t
  misc_feature (496)..(497): n is a, c, g, or t
  misc_feature (499)..(501): n is a, c, g, or t
  misc_feature (503)..(503): n is a, c, g, or t
  misc_feature (505)..(513): n is a, c, g, or t
  misc_feature (517)..(525): n is a, c, g, or t
  misc_feature (527)..(534): n is a, c, g, or t
  misc_feature (536)..(536): n is a, c, g, or t
  misc_feature (538)..(539): n is a, c, g, or t
  misc_feature (542)..(545): n is a, c, g, or t
  misc_feature (548)..(548): n is a, c, g, or t
  misc_feature (552)..(554): n is a, c, g, or t
  misc_feature (556)..(557): n is a, c, g, or t
  misc_feature (561)..(562): n is a, c, g, or t
  misc_feature (568)..(573): n is a, c, g, or t
  misc_feature (578)..(584): n is a, c, g, or t
  misc_feature (586)..(586): n is a, c, g, or t
  misc_feature (588)..(598): n is a, c, g, or t
  misc_feature (600)..(605): n is a, c, g, or t
  misc_feature (608)..(616): n is a, c, g, or t
  misc_feature (619)..(619): n is a, c, g, or t
  misc_feature (621)..(622): n is a, c, g, or t
  misc_feature (624)..(633): n is a, c, g, or t
  misc_feature (635)..(636): n is a, c, g, or t
  misc_feature (638)..(643): n is a, c, g, or t
  misc_feature (646)..(649): n is a, c, g, or t
  misc_feature (651)..(652): n is a, c, g, or t
  misc_feature (654)..(667): n is a, c, g, or t
  misc_feature (669)..(676): n is a, c, g, or t
  misc_feature (678)..(682): n is a, c, g, or t
  misc_feature (684)..(686): n is a, c, g, or t
  misc_feature (688)..(695): n is a, c, g, or t
  misc_feature (699)..(704): n is a, c, g, or t
  misc_feature (707)..(712): n is a, c, g, or t
  misc_feature (715)..(715): n is a, c, g, or t
  misc_feature (717)..(719): n is a, c, g, or t
  misc_feature (722)..(722): n is a, c, g, or t
  misc_feature (724)..(724): n is a, c, g, or t
  misc_feature (727)..(729): n is a, c, g, or t
  misc_feature (731)..(736): n is a, c, g, or t
  misc_feature (738)..(739): n is a, c, g, or t
  misc_feature (741)..(743): n is a, c, g, or t
  misc_feature (749)..(751): n is a, c, g, or t
  misc_feature (754)..(761): n is a, c, g, or t
  misc_feature (764)..(765): n is a, c, g, or t
  misc_feature (767)..(767): n is a, c, g, or t
  misc_feature (769)..(770): n is a, c, g, or t
  misc_feature (772)..(775): n is a, c, g, or t
  misc_feature (1389)..(1389): n is a, c, g, or t
  misc_feature (1392)..(1392): n is a, c, g, or t
  misc_feature (1977)..(1977): n is a, c, g, or t
  misc_feature (2010)..(2010): n is a, c, g, or t
  misc_feature (2127)..(2127): n is a, c, g, or t
  misc_feature (2394)..(2394): n is a, c, g, or t
  misc_feature (2550)..(2550): n is a, c, g, or t
  misc_feature (2898)..(2898): n is a, c, g, or t
  misc_feature (2907)..(2907): n is a, c, g, or t
  misc_feature (2910)..(2910): n is a, c, g, or t
  misc_feature (2913)..(2913): n is a, c, g, or t
  misc_feature (3024)..(3024): n is a, c, g, or t
ntnnnnnnnnttnnnnannnaannnnnnnnnnnccntngntnnnnnnnnnnnnnannannnncnnnccnnggnntnnngnnggggnnttnnnnnnaannnnntttnnnnnnnnnaaangnannnanttnngnnntnnaannnnngnntnntnnnnnannnnnnnnnnnaaancnngnngnnttnnnnannnnnnnnnnnnnnnnnnnnnnnnngnannnnnnnnnnntnnnnnnnttncnnnnccnnnntnnncnnnnnangnnnnnnnttnnnnannnnnnaannnnnnnnannntnnnnaaannnnnnnnnnnannnngggnnnngnnnntnnntnnngnanaaaannttnnngnnnanggnnnnnttttnnnnttnaannnnttnaaaannnnnnnnnnannntncntnnnngnnnnnntnntttnnaaannnanntnnnnnnnnanncnannnaaanngnnnnnnnnnnnanngggnnnnnggnngnntttnncnnncnannnnnnnnntttnnnnnnnnncnnnnnnnngnannaannnnccntttnnnanntttnnaaaaannnnnnaaaannnnnnnangnnnnnnnnnnngnnnnnnaannnnnnnnnggngnngnnnnnnnnnnannannnnnnggnnnngnngnnnnnnnnnnnnnnannnnnnnnannnnntnnnannnnnnnntttnnnnnnaannnnnnaancnnnttnanaannntnnnnnncnnannnaaaaannnttnnnnnnnnaanngntnnannnntttttttcataaattttgaataactttttgtcagttttagaaaaagttgtaattttgcaaatcaaataatttaatataaagcaataaaatgcctactattcaacaattagtaagaaaaggaagagccacaattgccaagaagagcaaatcggttgctttggattcttgtccacagaagagaggtgtatgtacgagagtatatacaactacacctaagaaacctaactctgcacttagaaaagttgccagagtaagactttctaatggtaaagaagttaacgcttatatcccgggcgaaggacataatctccaagagcactcgatagtattggtaagaggcggaagggtgaaagacctaccgggagttcgttatcacattgtaagaggtgctttggacactgcaggtgtaaatggaagaacacaaagaagatctaagtatggagctaagagacctaaaccaggtgcagcaccagcagggaaaaagtaatcattaaattttaaggaaagaaacaatgagaaagacaaaagcaaaaaaaagaccgttgttaccagatcctaaatttaatgatcaattggtaacaagatttgtgaataacttgatgatagatggtaanaantctatcgcatttagaattttctatgatgcactagatatcgtagaaactaaaaaagaagatcaggaaaaaacttctcttgaagtatggaaagatgcgcttactaatgtaatgccgcatgtagaagtaagatcaagaagagtaggaggtgctaacttccaaattcctatgccgatcagagctgatagaaaaatttctatggctatgaaatggttgatcaaatatgcttctttgagaaacgataaatctatggcacaaaaattagctgctgagattatcgctgcttctaaagaagaaggagctgctgttaagaaaaagacagatactcacaaaatggcagaagcaaacaaagcattctcacactttaaattctaatctgaaatgggaagagatcttagatatacaagaaatattggtattgctgcacacatcgatgcagggaaaactaccactacagagagaattttattttacactggtaaaactcacaagttgggtgaaactcaccaaggtacatctcagatggactggatggagcaagaggctgaaagagggattacaattacctctgcggctactacttgtaantggaatttcccaactgatcaaggaaaagttttnccagaaactaaaggataccactttaacatcatcgataccccaggacacgttgactttactgtagaggtaaaccgttctttgagagtattggatggtctagtgttcttgttctcagcngttgacggagtagagccacaatcagaaactaactggagattggctgacaactacaaagttgcgagaatgggattcgtaaacaaaatggacagacaaggagctgatttcttggcggtttgccgtcaggtaaaagaaatgctaggttctaacgctgttcctatcgtattaccaatcggagctgaagaagacttcaaaggagtggtagaccttatcaagaacagagctattgtttggcacgaagatactcaaggtatgacatttgatgtngttccaattccagaagatatgaaagctgatgtattggaatacagacaaaaccttgtggaaaatgtggcagaatatgatgagtctttattagagaaattctttgaagatccagattctatcacagaagaagaaatcaatgaagctttaagaaaagcnactattgatttgtctattatcccaatgacttgtggttcttcatttaagaacaaaggagttcagtttatgttggatgctgtatgtaaataccttccatctccactagataaagatgatatcaaaggaactgaccctaaaactgatgctgaaatcacaagaaaaccagatgtaaatgagccatttgctgcattagcatttaagattgctactgacccttatgtaggtagattggcattctttagagcttattctggtaaattggatgcaggttcttatgtattgaacacaagatctgattctaaagaaagaatctcaagaatctatcagatgcacgcgaataagcaaaancctgtagantanatngaagcaggagatatcggtgcagctgtaggatttaaagatatcaaaactggggatacactttgtgatgaaaagaaccctatcgttcttgaatctatgattttcccagatccngtaatcggtatcgctgttgaacctaaaactaaagctgaccaagataaaatgggtaacgctttagcgaagttagcagaagaggatcctactttccaagtgaaaacagatgaagcatctggacaaactatcatctcaggaatgggagagcttcacttggatatcatcgtagaccgtctaagaagagagttcaaggtagaagtaaaccaaggacagccgcaagtagagtacaaagaatctcttacagctacagctaaccacagagaagtttacaaaaaacaaactgggggtagaggtaaattcgcggatatcatcttcgaaattggtcctgctgatgaaggaaaaacaggtcttgaattcatcaacgaaattaaaggtggtaacattccaaaagaatttatcccttctgttgaaaaaggattcaaagaagctatgaaaaatggtcctttggctggattcgagattgaaggaattaaagttacactaaaagatggttctttccacccagtggactctgaccaactttcattcgaattggctgctaaacttggatttagagaagctggtaaagctgctaaaccagtaatcatggagcctatcatgaaattggaagttgttactccagaagaatacatgggggatatcgtaggtgaccttaacagaagaagaggtactgtaaacggtatggatgatagaaataatgctaaagttatcaaagcatttgttccattagcagaaatgtttggatatgtaacagctcttagaacattatcttctggtagagcaacatcttctatggagtttgaaaaatatgaaccagctccacagaatgtggctgaagaagtaatagctaaagcaagaggttaattaaaatttagattaaaatgtcacaaagaatcagaataaaattaaaatcttacgattacaatttagtagataaatctgctgagaaaatcgtaaaaacagtaaaatctacagg

SEQ ID NO: 1183 - DNA, 4000 bp, Escherichia coli
  misc_feature (1)..(1): n is a, c, g, or t
  misc_feature (3)..(11): n is a, c, g, or t
  misc_feature (13)..(14): n is a, c, g, or t
  misc_feature (16)..(22): n is a, c, g, or t
  misc_feature (25)..(33): n is a, c, g, or t
  misc_feature (35)..(35): n is a, c, g, or t
  misc_feature (38)..(38): n is a, c, g, or t
  misc_feature (44)..(44): n is a, c, g, or t
  misc_feature (46)..(47): n is a, c, g, or t
  misc_feature (50)..(53): n is a, c, g, or t
  misc_feature (56)..(65): n is a, c, g, or t
  misc_feature (68)..(75): n is a, c, g, or t
  misc_feature (77)..(79): n is a, c, g, or t
  misc_feature (81)..(89): n is a, c, g, or t
  misc_feature (91)..(91): n is a, c, g, or t
  misc_feature (93)..(94): n is a, c, g, or t
  misc_feature (96)..(96): n is a, c, g, or t
  misc_feature (98)..(100): n is a, c, g, or t
  misc_feature (102)..(108): n is a, c, g, or t
  misc_feature (110)..(111): n is a, c, g, or t
  misc_feature (113)..(113): n is a, c, g, or t
  misc_feature (115)..(132): n is a, c, g, or t
  misc_feature (134)..(143): n is a, c, g, or t
  misc_feature (145)..(150): n is a, c, g, or t
  misc_feature (152)..(170): n is a, c, g, or t
  misc_feature (173)..(174): n is a, c, g, or t
  misc_feature (176)..(181): n is a, c, g, or t
  misc_feature (184)..(185): n is a, c, g, or t
  misc_feature (187)..(189): n is a, c, g, or t
  misc_feature (192)..(195): n is a, c, g, or t
  misc_feature (197)..(197): n is a, c, g, or t
  misc_feature (199)..(202): n is a, c, g, or t
  misc_feature (205)..(205): n is a, c, g, or t
  misc_feature (207)..(208): n is a, c, g, or t
  misc_feature (210)..(212): n is a, c, g, or t
  misc_feature (216)..(217): n is a, c, g, or t
  misc_feature (224)..(224): n is a, c, g, or t
  misc_feature (229)..(230): n is a, c, g, or t
  misc_feature (233)..(233): n is a, c, g, or t
  misc_feature (235)..(235): n is a, c, g, or t
  misc_feature (238)..(242): n is a, c, g, or t
  misc_feature (244)..(244): n is a, c, g, or t
  misc_feature (247)..(247): n is a, c, g, or t
  misc_feature (315)..(315): n is a, c, g, or t
  misc_feature (1988)..(1988): n is a, c, g, or t
  misc_feature (3036)..(3042): n is a, c, g, or t
  misc_feature (3044)..(3045): n is a, c, g, or t
  misc_feature (3048)..(3050): n is a, c, g, or t
  misc_feature (3053)..(3056): n is a, c, g, or t
  misc_feature (3058)..(3058): n is a, c, g, or t
  misc_feature (3060)..(3065): n is a, c, g, or t
  misc_feature (3067)..(3079): n is a, c, g, or t
  misc_feature (3081)..(3083): n is a, c, g, or t
  misc_feature (3090)..(3091): n is a, c, g, or t
  misc_feature (3095)..(3096): n is a, c, g, or t
  misc_feature (3098)..(3102): n is a, c, g, or t
  misc_feature (3106)..(3112): n is a, c, g, or t
  misc_feature (3114)..(3116): n is a, c, g, or t
  misc_feature (3119)..(3120): n is a, c, g, or t
  misc_feature (3123)..(3124): n is a, c, g, or t
  misc_feature (3126)..(3128): n is a, c, g, or t
  misc_feature (3130)..(3132): n is a, c, g, or t
  misc_feature (3136)..(3136): n is a, c, g, or t
  misc_feature (3138)..(3139): n is a, c, g, or t
  misc_feature (3142)..(3142): n is a, c, g, or t
  misc_feature (3144)..(3144): n is a, c, g, or t
  misc_feature (3146)..(3151): n is a, c, g, or t
  misc_feature (3153)..(3156): n is a, c, g, or t
  misc_feature (3158)..(3166): n is a, c, g, or t
  misc_feature (3169)..(3171): n is a, c, g, or t
  misc_feature (3173)..(3174): n is a, c, g, or t
  misc_feature (3176)..(3183): n is a, c, g, or t
  misc_feature (3185)..(3186): n is a, c, g, or t
  misc_feature (3188)..(3191): n is a, c, g, or t
  misc_feature (3194)..(3204): n is a, c, g, or t
  misc_feature (3206)..(3208): n is a, c, g, or t
  misc_feature (3210)..(3219): n is a, c, g, or t
  misc_feature (3221)..(3223): n is a, c, g, or t
  misc_feature (3225)..(3227): n is a, c, g, or t
  misc_feature (3229)..(3234): n is a, c, g, or t
  misc_feature (3236)..(3238): n is a, c, g, or t
  misc_feature (3241)..(3242): n is a, c, g, or t
  misc_feature (3246)..(3247): n is a, c, g, or t
  misc_feature (3249)..(3251): n is a, c, g, or t
  misc_feature (3254)..(3257): n is a, c, g, or t
  misc_feature (3259)..(3260): n is a, c, g, or t
  misc_feature (3263)..(3263): n is a, c, g, or t
  misc_feature (3267)..(3267): n is a, c, g, or t
  misc_feature (3270)..(3275): n is a, c, g, or t
  misc_feature (3277)..(3283): n is a, c, g, or t
  misc_feature (3286)..(3294): n is a, c, g, or t
  misc_feature (3296)..(3300): n is a, c, g, or t
  misc_feature (3302)..(3312): n is a, c, g, or t
  misc_feature (3314)..(3326): n is a, c, g, or t
  misc_feature (3328)..(3328): n is a, c, g, or t
  misc_feature (3330)..(3330): n is a, c, g, or t
  misc_feature (3332)..(3348): n is a, c, g, or t
  misc_feature (3350)..(3361): n is a, c, g, or t
  misc_feature (3364)..(3367): n is a, c, g, or t
  misc_feature (3369)..(3377): n is a, c, g, or t
  misc_feature (3379)..(3382): n is a, c, g, or t
  misc_feature (3385)..(3397): n is a, c, g, or t
  misc_feature (3399)..(3407): n is a, c, g, or t
  misc_feature (3409)..(3410): n is a, c, g, or t
  misc_feature (3413)..(3415): n is a, c, g, or t
  misc_feature (3418)..(3418): n is a, c, g, or t
  misc_feature (3420)..(3420): n is a, c, g, or t
  misc_feature (3422)..(3423): n is a, c, g, or t
  misc_feature (3427)..(3430): n is a, c, g, or t
  misc_feature (3433)..(3433): n is a, c, g, or t
  misc_feature (3437)..(3439): n is a, c, g, or t
  misc_feature (3441)..(3442): n is a, c, g, or t
  misc_feature (3445)..(3446): n is a, c, g, or t
  misc_feature (3448)..(3455): n is a, c, g, or t
  misc_feature (3458)..(3458): n is a, c, g, or t
  misc_feature (3461)..(3468): n is a, c, g, or t
  misc_feature (3470)..(3472): n is a, c, g, or t
  misc_feature (3474)..(3479): n is a, c, g, or t
  misc_feature (3481)..(3483): n is a, c, g, or t
  misc_feature (3485)..(3487): n is a, c, g, or t
  misc_feature (3490)..(3490): n is a, c, g, or t
  misc_feature (3493)..(3496): n is a, c, g, or t
  misc_feature (3499)..(3499): n is a, c, g, or t
  misc_feature (3501)..(3503): n is a, c, g, or t
  misc_feature (3505)..(3512): n is a, c, g, or t
  misc_feature (3514)..(3514): n is a, c, g, or t
  misc_feature (3516)..(3521): n is a, c, g, or t
  misc_feature (3523)..(3531): n is a, c, g, or t
  misc_feature (3533)..(3539): n is a, c, g, or t
  misc_feature (3541)..(3543): n is a, c, g, or t
  misc_feature (3545)..(3546): n is a, c, g, or t
  misc_feature (3548)..(3548): n is a, c, g, or t
  misc_feature (3550)..(3554): n is a, c, g, or t
  misc_feature (3556)..(3556): n is a, c, g, or t
  misc_feature (3559)..(3562): n is a, c, g, or t
  misc_feature (3564)..(3565): n is a, c, g, or t
  misc_feature (3567)..(3568): n is a, c, g, or t
  misc_feature (3571)..(3581): n is a, c, g, or t
  misc_feature (3583)..(3584): n is a, c, g, or t
  misc_feature (3586)..(3587): n is a, c, g, or t
  misc_feature (3589)..(3589): n is a, c, g, or t
  misc_feature (3591)..(3592): n is a, c, g, or t
  misc_feature (3594)..(3596): n is a, c, g, or t
  misc_feature (3598)..(3598): n is a, c, g, or t
  misc_feature (3600)..(3601): n is a, c, g, or t
  misc_feature (3604)..(3605): n is a, c, g, or t
  misc_feature (3608)..(3608): n is a, c, g, or t
  misc_feature (3611)..(3611): n is a, c, g, or t
  misc_feature (3613)..(3613): n is a, c, g, or t
  misc_feature (3615)..(3615): n is a, c, g, or t
  misc_feature (3618)..(3618): n is a, c, g, or t
  misc_feature (3620)..(3626): n is a, c, g, or t
  misc_feature (3628)..(3629): n is a, c, g, or t
  misc_feature (3633)..(3633): n is a, c, g, or t
  misc_feature (3635)..(3637): n is a, c, g, or t
  misc_feature (3639)..(3639): n is a, c, g, or t
  misc_feature (3641)..(3641): n is a, c, g, or t
  misc_feature (3643)..(3643): n is a, c, g, or t
  misc_feature (3645)..(3648): n is a, c, g, or t
  misc_feature (3651)..(3654): n is a, c, g, or t
  misc_feature (3657)..(3657): n is a, c, g, or t
  misc_feature (3659)..(3661): n is a, c, g, or t
  misc_feature (3663)..(3665): n is a, c, g, or t
  misc_feature (3668)..(3674): n is a, c, g, or t
  misc_feature (3676)..(3687): n is a, c, g, or t
  misc_feature (3689)..(3690): n is a, c, g, or t
  misc_feature (3693)..(3695): n is a, c, g, or t
  misc_feature (3698)..(3700): n is a, c, g, or t
  misc_feature (3703)..(3705): n is a, c, g, or t
  misc_feature (3707)..(3708): n is a, c, g, or t
  misc_feature (3712)..(3712): n is a, c, g, or t
  misc_feature (3714)..(3718): n is a, c, g, or t
  misc_feature (3720)..(3722): n is a, c, g, or t
  misc_feature (3725)..(3729): n is a, c, g, or t
  misc_feature (3732)..(3732): n is a, c, g, or t
  misc_feature (3734)..(3734): n is a, c, g, or t
  misc_feature (3736)..(3738): n is a, c, g, or t
  misc_feature (3740)..(3745): n is a, c, g, or t
  misc_feature (3747)..(3749): n is a, c, g, or t
  misc_feature (3751)..(3752): n is a, c, g, or t
  misc_feature (3755)..(3755): n is a, c, g, or t
  misc_feature (3758)..(3758): n is a, c, g, or t
  misc_feature (3761)..(3761): n is a, c, g, or t
  misc_feature (3763)..(3763): n is a, c, g, or t
  misc_feature (3767)..(3769): n is a, c, g, or t
  misc_feature (3772)..(3772): n is a, c, g, or t
  misc_feature (3776)..(3778): n is a, c, g, or t
  misc_feature (3780)..(3781): n is a, c, g, or t
  misc_feature (3784)..(3784): n is a, c, g, or t
  misc_feature (3786)..(3786): n is a, c, g, or t
  misc_feature (3790)..(3791): n is a, c, g, or t
  misc_feature (3794)..(3795): n is a, c, g, or t
  misc_feature (3797)..(3797): n is a, c, g, or t
  misc_feature (3802)..(3802): n is a, c, g, or t
  misc_feature (3806)..(3806): n is a, c, g, or t
  misc_feature (3808)..(3810): n is a, c, g, or t
  misc_feature (3812)..(3812): n is a, c, g, or t
  misc_feature (3814)..(3817): n is a, c, g, or t
  misc_feature (3819)..(3819): n is a, c, g, or t
  misc_feature (3821)..(3821): n is a, c, g, or t
  misc_feature (3829)..(3830): n is a, c, g, or t
  misc_feature (3833)..(3834): n is a, c, g, or t
  misc_feature (3836)..(3836): n is a, c, g, or t
  misc_feature (3840)..(3840): n is a, c, g, or t
  misc_feature (3842)..(3842): n is a, c, g, or t
  misc_feature (3845)..(3845): n is a, c, g, or t
  misc_feature (3848)..(3848): n is a, c, g, or t
  misc_feature (3854)..(3855): n is a, c, g, or t
  misc_feature (3858)..(3859): n is a, c, g, or t
  misc_feature (3861)..(3862): n is a, c, g, or t
  misc_feature (3864)..(3864): n is a, c, g, or t
  misc_feature (3868)..(3868): n is a, c, g, or t
  misc_feature (3870)..(3871): n is a, c, g, or t
  misc_feature (3874)..(3874): n is a, c, g, or t
  misc_feature (3877)..(3877): n is a, c, g, or t
  misc_feature (3880)..(3881): n is a, c, g, or t
  misc_feature (3884)..(3885): n is a, c, g, or t
  misc_feature (3887)..(3887): n is a, c, g, or t
  misc_feature (3889)..(3889): n is a, c, g, or t
  misc_feature (3892)..(3892): n is a, c, g, or t
  misc_feature (3895)..(3898): n is a, c, g, or t
  misc_feature (3900)..(3901): n is a, c, g, or t
  misc_feature (3904)..(3906): n is a, c, g, or t
  misc_feature (3909)..(3909): n is a, c, g, or t
  misc_feature (3911)..(3911): n is a, c, g, or t
  misc_feature (3913)..(3913): n is a, c, g, or t
  misc_feature (3916)..(3917): n is a, c, g, or t
  misc_feature (3919)..(3921): n is a, c, g, or t
  misc_feature (3924)..(3925): n is a, c, g, or t
  misc_feature (3928)..(3928): n is a, c, g, or t
  misc_feature (3933)..(3933): n is a, c, g, or t
  misc_feature (3936)..(3937): n is a, c, g, or t
  misc_feature (3943)..(3946): n is a, c, g, or t
  misc_feature (3949)..(3949): n is a, c, g, or t
  misc_feature (3952)..(3953): n is a, c, g, or t
  misc_feature (3957)..(3957): n is a, c, g, or t
  misc_feature (3962)..(3962): n is a, c, g, or t
  misc_feature (3965)..(3965): n is a, c, g, or t
  misc_feature (3967)..(3967): n is a, c, g, or t
  misc_feature (3969)..(3969): n is a, c, g, or t
  misc_feature (3972)..(3973): n is a, c, g, or t
  misc_feature (3978)..(3978): n is a, c, g, or t
  misc_feature (3983)..(3985): n is a, c, g, or t
  misc_feature (3991)..(3991): n is a, c, g, or t
  misc_feature (3993)..(3994): n is a, c, g, or t
  misc_feature (3997)..(3997): n is a, c, g, or t
  misc_feature (3999)..(4000): n is a, c, g, or t
ntnnnnnnnnntnncnnnnnnnctnnnnnnnnngngcncccgcncnnttnnnnctnnnnnnnnnnccnnnnnnnncnnntnnnnnnnnncncnntncnnncnnnnnnntnncncnnnnnnnnnnnnnnnnnncnnnnnnnnnncnnnnnncnnnnnnnnnnnnnnnnnnntgnntnnnnnnctnncnnngcnnnncncnnnngcnanntnnnctanntcgcttnccccnnacncnccnnnnncncantcgcgacgtgttctatgtcgcttttcccaaaagctccattcgacctgtcggtttgcccgtctatgtcnctcaactcccgtcggctccattcgcggaaattgcgaatgatctgaagcggtcacaagtctaaagcgactgcattccgtttcggtagagtattcggtaacatccgggtcgcatacgagtctagccgcggcagaggctaatgactttgaatcacacgcttgagttcgagtcagatgcctaatgagctgcctgatccggagattctactttgttgctcgcacctgtgcggcgtgaaacgcctgccaggcattccaagcgcgttcccaattttgtttcttggcccaacattgtgcttctaagaaataaaaataggccggggagttcggccgttcgctaaaatgacgtgcggtgagaagggcatcatcgacccgaccactctgcatctgtgcgcgataaagttcgtaaccgatgccgtagttattaggcgcggcggcgaagcggttttccagatcttgaagagaaaaattagcggcgactcgcggaagcgccaccggttcgccgtattgctgggtgagctcgtaggcggcgcgaaaatcattcctgctggcattgtgtttcgccatgccaagccaggcataacgaagccagtcgggatgctgttcaacggccagggaaagctccccggggttgccgcgttcggaccaaaccgcgaagagcgcaagtttttctgtttcgctgaacgattgcaagttaggatcatttttcagcagttgcgcgagagcgcgattgaaagaagcgtccgacagccggtcgagatagggcagcgccaaatcgtgttcgctaagtccaatcgcctccagaaatgggcttacttctggactgctgagcgaagcgtcgctcagcatgcttgcgtagacttccggtcgcagaggtccggctctgcgtagagcctcacgccacgctgtcacggctaaaatcggacggtacggcaaccaggcgtttccttcggtcagcggaacttcatacgcgatcggctgcagaaagcgcgccctgcggaaatcatcgactgcgtttgtcgtctgtttgagttcggcctccgcgatagcacgcgtaaggtaaagttcccaatcgagcggcgcccatcgaagcgtgcgagtcgtcagtacagttgtttcactaaaattgagttcggtgttagctaccgctgatagttgcttcgcgatggagaccccaactgagccgggaaggagtttctcactgggtacagcgacaaccaatgtcagtcccgccgcaagtaacacccccccaacaaagcgaaatagaatcggcatccactcacttgttttcaaagggagcggccgatgcagtgagagcccaagcaaaagtattgcggcaaacgccgtacccacctggtgccctgaaatatcgacaatcccatggattgcgaacaggagcgccgcgatgagcgtggcgagacgatacccttggttggttcccactcgcagtgggaaaactcgactaacaaacatcgcgataccaacgatcgtgagcaccagcgctggccacccgagttcagcccaaagccaaagccagtcgctttccggatgcaaggctcgcgggccgccgagtgaatcgtcgcaaaaaattgcaaagatcgattccaaatttccaaaaccgatgccgcaccagggcgaattacgaatgagtcgaaacgcgtcatgaaaaattcgccacnaaaaatccgttgagatgccggtactgccgaaatcgccaagatgaaatccctcgactgttcgccaaccgaaaagcaacagggccgtgagcagcagaaggagaaaagagattccaagcgctagtcgccagggagagcgttgtcggaacaccaacgcgccaagccaaaatgcgctgcctaccacgagaatcgcgattccagagggcgaagaattcaaaatgatcgctgccccgatcaggagcagcgcgaggatccagacgatccaccgttttcttcgcttgcggagatcgtcctgagcgcaggcaagaatcacgatcgcggtaaccccgaaaagatctccggtttgattccgatttggaaatggaccgaaattttgctcgttgtgccagaccgggagcgtggtgcgtgccaagtaaagcgcgatgcagattgcggctaagagcgcaattccactggtaaacaagcgcagttgaaagcgcacctcgtgaagctcaaggtcttgcgtggagacgatatagagccaactcagtccagcaacgaagctaacgagatagctcagcgtgatccatggctgcggagtgagcgtcgatggaagctgaattccgaagtcatttacaagtgccgcacgccactctggttggaaaaaccagcgggctgggagaaacgcgactgccgccgagataaagagagtgagaagaacgaggttcgtgagcgcgccgagcgaaaaccgtggcggttgaatcagcaggtacgtcccgagaactgtgatgacaagtccctcttcccatttttgattggcgccgcccaggaaacaggcgagcacgggcagcaacgcgacggtcccgttggctatccaacgagtggtagccgactgttggttttcacgcgattgaaattgctgcacggaatttcgcatcagctaaagtcaactgtgatggtatgcgaatcgcttttcgattcgataaccacgctgcccaactaacgtatcatctttatcactgctcgcagagaatctgactttgaatcaaatagggggaatagggaatagggnnnnnnnannaannnttnnnngntnnnnnncnnnnnnnnnnnnngnnnggggaanngggnngnnnnngaannnnnnnannnttnncgnncnnngnnnttancnnttnancnnnnnngnnnngnnnnnnnnnaannntnnannnnnnnngnnannnnaannnnnnnnnnnannntnnnnnnnnnntnnncnnnannnnnngnnnaannaaanngnnnaannnntnngantaanaannnnnnannnnnnntcnnnnnnnnngnnnnngnnnnnnnnnnncnnnnnnnnnnnnntntnannnnnnnnnnnnnnnnncnnnnnnnnnnnnccnnnncnnnnnnnnngnnnnttnnnnnnnnnnnnngnnnnnnnnntnnaannnttncnannaagnnnnggntttnnngnnggnngnnnnnnnnggnccnnnnnnnngnnngnnnnnncnnncnnnccnaannnnccngnnntnnnnnnnngngnnnnnngnnnnnnnnngnnnnnnntnnnannangnnnnnanaannnntnnannccnnnnnnnnnnncnngnncngnngnnngngnnttnnggnccnanancgnannnnnnntnnaagncnnncnanangnnnnggnnnntcncnnngnnnggnnnnnnngnnnnnnnnnnnngnnggnnnccnnnggnnncnngggngnnnnncnnnccnnnnnttncngnnntnnnnnngnnngnnttnggnggncncgcnnnggncgcnnncnnccncnttgnntcnnancagcncccncnnngntnnnncncncaccctcnnggnntnaccngncangtngctcannccnntnncnccantnnccnaangcnncanngngncangannnnannggnnncangntntgnngnnntgnngtnatccnaannttcttnnnnctncgnncggngccanttngnanaanntccangaaannncccacncnnttncnn

SEQ ID NO: 1184 - DNA, 4000 bp, Escherichia coli
  misc_feature (1)..(8): n is a, c, g, or t
  misc_feature (10)..(11): n is a, c, g, or t
  misc_feature (14)..(14): n is a, c, g, or t
  misc_feature (18)..(22): n is a, c, g, or t
  misc_feature (24)..(36): n is a, c, g, or t
  misc_feature (38)..(43): n is a, c, g, or t
  misc_feature (45)..(48): n is a, c, g, or t
  misc_feature (50)..(54): n is a, c, g, or t
  misc_feature (56)..(56): n is a, c, g, or t
  misc_feature (58)..(59): n is a, c, g, or t
  misc_feature (61)..(76): n is a, c, g, or t
  misc_feature (78)..(88): n is a, c, g, or t
  misc_feature (92)..(106): n is a, c, g, or t
  misc_feature (108)..(108): n is a, c, g, or t
  misc_feature (111)..(123): n is a, c, g, or t
  misc_feature (125)..(128): n is a, c, g, or t
  misc_feature (130)..(134): n is a, c, g, or t
  misc_feature (136)..(138): n is a, c, g, or t
  misc_feature (140)..(144): n is a, c, g, or t
  misc_feature (147)..(149): n is a, c, g, or t
  misc_feature (152)..(152): n is a, c, g, or t
  misc_feature (154)..(164): n is a, c, g, or t
  misc_feature (166)..(170): n is a, c, g, or t
  misc_feature (172)..(183): n is a, c, g, or t
  misc_feature (187)..(191): n is a, c, g, or t
  misc_feature (193)..(197): n is a, c, g, or t
  misc_feature (199)..(201): n is a, c, g, or t
  misc_feature (203)..(208): n is a, c, g, or t
  misc_feature (212)..(220): n is a, c, g, or t
  misc_feature (222)..(222): n is a, c, g, or t
  misc_feature (226)..(226): n is a, c, g, or t
  misc_feature (228)..(230): n is a, c, g, or t
  misc_feature (232)..(234): n is a, c, g, or t
  misc_feature (236)..(238): n is a, c, g, or t
  misc_feature (240)..(240): n is a, c, g, or t
  misc_feature (242)..(247): n is a, c, g, or t
  misc_feature (249)..(255): n is a, c, g, or t
  misc_feature (257)..(261): n is a, c, g, or t
  misc_feature (263)..(279): n is a, c, g, or t
  misc_feature (281)..(288): n is a, c, g, or t
  misc_feature (290)..(298): n is a, c, g, or t
  misc_feature (300)..(305): n is a, c, g, or t
  misc_feature (307)..(311): n is a, c, g, or t
  misc_feature (313)..(324): n is a, c, g, or t
  misc_feature (326)..(331): n is a, c, g, or t
  misc_feature (333)..(334): n is a, c, g, or t
  misc_feature (336)..(339): n is a, c, g, or t
  misc_feature (342)..(346): n is a, c, g, or t
  misc_feature (348)..(363): n is a, c, g, or t
  misc_feature (365)..(384): n is a, c, g, or t
  misc_feature (386)..(394): n is a, c, g, or t
  misc_feature (397)..(406): n is a, c, g, or t
  misc_feature (408)..(426): n is a, c, g, or t
  misc_feature (428)..(431): n is a, c, g, or t
  misc_feature (433)..(440): n is a, c, g, or t
  misc_feature (443)..(447): n is a, c, g, or t
  misc_feature (449)..(450): n is a, c, g, or t
  misc_feature (452)..(458): n is a, c, g, or t
  misc_feature (460)..(460): n is a, c, g, or t
  misc_feature (462)..(473): n is a, c, g, or t
  misc_feature (477)..(489): n is a, c, g, or t
  misc_feature (491)..(494): n is a, c, g, or t
  misc_feature (497)..(497): n is a, c, g, or t
  misc_feature (499)..(503): n is a, c, g, or t
  misc_feature (505)..(510): n is a, c, g, or t
  misc_feature (513)..(528): n is a, c, g, or t
  misc_feature (530)..(534): n is a, c, g, or t
  misc_feature (536)..(541): n is a, c, g, or t
  misc_feature (544)..(546): n is a, c, g, or t
  misc_feature (548)..(554): n is a, c, g, or t
  misc_feature (557)..(563): n is a, c, g, or t
  misc_feature (565)..(577): n is a, c, g, or t
  misc_feature (579)..(581): n is a, c, g, or t
  misc_feature (583)..(584): n is a, c, g, or t
  misc_feature (586)..(588): n is a, c, g, or t
  misc_feature (590)..(590): n is a, c, g, or t
  misc_feature (592)..(602): n is a, c, g, or t
  misc_feature (604)..(606): n is a, c, g, or t
  misc_feature (608)..(611): n is a, c, g, or t
  misc_feature (613)..(618): n is a, c, g, or t
  misc_feature (620)..(620): n is a, c, g, or t
  misc_feature (622)..(623): n is a, c, g, or t
  misc_feature (625)..(627): n is a, c, g, or t
  misc_feature (630)..(630): n is a, c, g, or t
  misc_feature (632)..(634): n is a, c, g, or t
  misc_feature (636)..(643): n is a, c, g, or t
  misc_feature (645)..(645): n is a, c, g, or t
  misc_feature (647)..(652): n is a, c, g, or t
  misc_feature (654)..(656): n is a, c, g, or t
  misc_feature (658)..(666): n is a, c, g, or t
  misc_feature (668)..(677): n is a, c, g, or t
  misc_feature (679)..(686): n is a, c, g, or t
  misc_feature (688)..(688): n is a, c, g, or t
  misc_feature (690)..(699): n is a, c, g, or t
  misc_feature (701)..(703): n is a, c, g, or t
  misc_feature (705)..(706): n is a, c, g, or t
  misc_feature (708)..(718): n is a, c, g, or t
  misc_feature (720)..(725): n is a, c, g, or t
  misc_feature (727)..(736): n is a, c, g, or t
  misc_feature (738)..(744): n is a, c, g, or t
  misc_feature (747)..(747): n is a, c, g, or t
  misc_feature (749)..(750): n is a, c, g, or t
  misc_feature (752)..(760): n is a, c, g, or t
  misc_feature (762)..(764): n is a, c, g, or t
  misc_feature (766)..(774): n is a, c, g, or t
  misc_feature (776)..(780): n is a, c, g, or t
  misc_feature (782)..(784): n is a, c, g, or t
  misc_feature (787)..(799): n is a, c, g, or t
  misc_feature (802)..(810): n is a, c, g, or t
  misc_feature (812)..(816): n is a, c, g, or t
  misc_feature (818)..(818): n is a, c, g, or t
  misc_feature (821)..(827): n is a, c, g, or t
  misc_feature (831)..(834): n is a, c, g, or t
  misc_feature (836)..(839): n is a, c, g, or t
  misc_feature (841)..(851): n is a, c, g, or t
  misc_feature (853)..(854): n is a, c, g, or t
  misc_feature (856)..(864): n is a, c, g, or t
  misc_feature (866)..(875): n is a, c, g, or t
  misc_feature (877)..(880): n is a, c, g, or t
  misc_feature (882)..(884): n is a, c, g, or t
  misc_feature (887)..(908): n is a, c, g, or t
  misc_feature (910)..(916): n is a, c, g, or t
  misc_feature (918)..(919): n is a, c, g, or t
  misc_feature (921)..(925): n is a, c, g, or t
  misc_feature (927)..(928): n is a, c, g, or t
  misc_feature (930)..(934): n is a, c, g, or t
  misc_feature (937)..(949): n is a, c, g, or t
  misc_feature (951)..(953): n is a, c, g, or t
  misc_feature (955)..(958): n is a, c, g, or t
  misc_feature (960)..(962): n is a, c, g, or t
  misc_feature (965)..(969): n is a, c, g, or t
  misc_feature (971)..(972): n is a, c, g, or t
  misc_feature (974)..(976): n is a, c, g, or t
  misc_feature (978)..(983): n is a, c, g, or t
  misc_feature (985)..(993): n is a, c, g, or t
  misc_feature (995)..(999): n is a, c, g, or t
  misc_feature (1001)..(1014): n is a, c, g, or t
  misc_feature (1016)..(1032): n is a, c, g, or t
  misc_feature (1034)..(1045): n is a, c, g, or t
  misc_feature (1047)..(1055): n is a, c, g, or t
  misc_feature (1057)..(1066): n is a, c, g, or t
  misc_feature (1068)..(1072): n is a, c, g, or t
  misc_feature (1074)..(1075): n is a, c, g, or t
  misc_feature (1077)..(1088): n is a, c, g, or t
  misc_feature (1090)..(1107): n is a, c, g, or t
  misc_feature (1109)..(1110): n is a, c, g, or t
  misc_feature (1112)..(1128): n is a, c, g, or t
  misc_feature (1130)..(1135): n is a, c, g, or t
  misc_feature (1137)..(1138): n is a, c, g, or t
  misc_feature (1140)..(1144): n is a, c, g, or t
  misc_feature (1146)..(1148): n is a, c, g, or t
  misc_feature (1150)..(1153): n is a, c, g, or t
  misc_feature (1155)..(1156): n is a, c, g, or t
  misc_feature (1159)..(1166): n is a, c, g, or t
  misc_feature (1168)..(1174): n is a, c, g, or t
  misc_feature (1176)..(1177): n is a, c, g, or t
  misc_feature (1179)..(1184): n is a, c, g, or t
  misc_feature (1187)..(1191): n is a, c, g, or t
  misc_feature (1193)..(1197): n is a, c, g, or t
  misc_feature (1199)..(1200): n is a, c, g, or t
  misc_feature (1202)..(1203): n is a, c, g, or t
  misc_feature (1205)..(1205): n is a, c, g, or t
  misc_feature (1207)..(1234): n is a, c, g, or t
  misc_feature (1236)..(1238): n is a, c, g, or t
  misc_feature (1240)..(1242): n is a, c, g, or t
  misc_feature (1244)..(1248): n is a, c, g, or t
  misc_feature (1250)..(1251): n is a, c, g, or t
  misc_feature (1253)..(1256): n is a, c, g, or t
  misc_feature (1258)..(1265): n is a, c, g, or t
  misc_feature (1268)..(1272): n is a, c, g, or t
  misc_feature (1274)..(1279): n is a, c, g, or t
  misc_feature (1281)..(1283): n is a, c, g, or t
  misc_feature (1285)..(1292): n is a, c, g, or t
  misc_feature (1294)..(1333): n is a, c, g, or t
  misc_feature (1335)..(1344): n is a, c, g, or t
  misc_feature (1346)..(1365): n is a, c, g, or t
  misc_feature (1367)..(1367): n is a, c, g, or t
  misc_feature (1369)..(1375): n is a, c, g, or t
  misc_feature (1378)..(1382): n is a, c, g, or t
  misc_feature (1384)..(1393): n is a, c, g, or t
  misc_feature (1395)..(1421): n is a, c, g, or t
  misc_feature (1423)..(1425): n is a, c, g, or t
  misc_feature (1427)..(1451): n is a, c, g, or t
  misc_feature (1453)..(1456): n is a, c, g, or t
  misc_feature (1458)..(1464): n is a, c, g, or t
  misc_feature (1466)..(1472): n is a, c, g, or t
  misc_feature (1474)..(1476): n is a, c, g, or t
  misc_feature (1478)..(1479): n is a, c, g, or t
  misc_feature (1481)..(1489): n is a, c, g, or t
  misc_feature (1491)..(1491): n is a, c, g, or t
  misc_feature (1493)..(1496): n is a, c, g, or t
  misc_feature (1499)..(1499): n is a, c, g, or t
  misc_feature (1501)..(1505): n is a, c, g, or t
  misc_feature (1508)..(1522): n is a, c, g, or t
  misc_feature (1525)..(1530): n is a, c, g, or t
  misc_feature (1532)..(1534): n is a, c, g, or t
  misc_feature (1536)..(1538): n is a, c, g, or t
  misc_feature (1540)..(1541): n is a, c, g, or t
  misc_feature (1543)..(1545): n is a, c, g, or t
  misc_feature (1547)..(1548): n is a, c, g, or t
  misc_feature (1550)..(1552): n is a, c, g, or t
  misc_feature (1554)..(1554): n is a, c, g, or t
  misc_feature (1556)..(1561): n is a, c, g, or t
  misc_feature (1563)..(1575): n is a, c, g, or t
  misc_feature (1577)..(1577): n is a, c, g, or t
  misc_feature (1579)..(1579): n is a, c, g, or t
  misc_feature (1581)..(1581): n is a, c, g, or t
  misc_feature (1583)..(1585): n is a, c, g, or t
  misc_feature (1587)..(1587): n is a, c, g, or t
  misc_feature (1589)..(1591): n is a, c, g, or t
  misc_feature (1593)..(1594): n is a, c, g, or t
  misc_feature (1596)..(1598): n is a, c, g, or t
  misc_feature (1600)..(1606): n is a, c, g, or t
  misc_feature (1610)..(1618): n is a, c, g, or t
  misc_feature (1620)..(1624): n is a, c, g, or t
  misc_feature (1626)..(1627): n is a, c, g, or t
  misc_feature (1631)..(1631): n is a, c, g, or t
  misc_feature (1633)..(1641): n is a, c, g, or t
  misc_feature (1643)..(1645): n is a, c, g, or t
  misc_feature (1647)..(1647): n is a, c, g, or t
  misc_feature (1649)..(1655): n is a, c, g, or t
  misc_feature (1657)..(1657): n is a, c, g, or t
  misc_feature (1659)..(1662): n is a, c, g, or t
  misc_feature (1665)..(1667): n is a, c, g, or t
  misc_feature (1669)..(1671): n is a, c, g, or t
  misc_feature (1673)..(1673): n is a, c, g, or t
  misc_feature (1676)..(1679): n is a, c, g, or t
  misc_feature (1681)..(1685): n is a, c, g, or t
  misc_feature (1689)..(1689): n is a, c, g, or t
  misc_feature (1691)..(1693): n is a, c, g, or t
  misc_feature (1695)..(1696): n is a, c, g, or t
  misc_feature (1699)..(1705): n is a, c, g, or t
  misc_feature (1707)..(1709): n is a, c, g, or t
  misc_feature (1712)..(1712): n is a, c, g, or t
  misc_feature (1715)..(1716): n is a, c, g, or t
  misc_feature (1718)..(1722): n is a, c, g, or t
  misc_feature (1724)..(1730): n is a, c, g, or t
  misc_feature (1732)..(1734): n is a, c, g, or t
  misc_feature (1736)..(1745): n is a, c, g, or t
  misc_feature (1747)..(1750): n is a, c, g, or t
  misc_feature (1752)..(1760): n is a, c, g, or t
  misc_feature (1762)..(1769): n is a, c, g, or t
  misc_feature (1773)..(1783): n is a, c, g, or t
  misc_feature (1785)..(1792): n is a, c, g, or t
  misc_feature (1794)..(1795): n is a, c, g, or t
  misc_feature (1798)..(1798): n is a, c, g, or t
  misc_feature (1801)..(1801): n is a, c, g, or t
  misc_feature (1803)..(1803): n is a, c, g, or t
  misc_feature (1805)..(1805): n is a, c, g, or t
  misc_feature (1807)..(1810): n is a, c, g, or t
  misc_feature (1988)..(1988): n is a, c, g, or t
  misc_feature (3622)..(3622): n is a, c, g, or t
nnnnnnnnannganggannnnngnnnnnnnnnnnnngnnnnnncnnnnannnnngnanntnnnnnnnnnnnnnnnntnnnnnnnnnnngatnnnnnnnnnnnnnnngncannnnnnnnnnnnnannnncnnnnncnnncnnnnnccnnngcncnnnnnnnnnnncnnnnnannnnnnnnnnnncgtnnnnncnnnnnannnannnnnngagnnnnnnnnnangaancnnncnnncnnncncnnnnnngnnnnnnntnnnnngnnnnnnnnnnnnnnnnncnnnnnnnncnnnnnnnnncnnnnnntnnnnngnnnnnnnnnnnnannnnnngnnannnncgnnnnncnnnnnnnnnnnnnnnncnnnnnnnnnnnnnnnnnnnncnnnnnnnnncannnnnnnnnngnnnnnnnnnnnnnnnnnnntnnnntnnnnnnnnctnnnnnanntnnnnnnnantnnnnnnnnnnnncgcnnnnnnnnnnnnngnnnngangnnnnngnnnnnntcnnnnnnnnnnnnnnnntnnnnntnnnnnnccnnncnnnnnnngcnnnnnnngnnnnnnnnnnnnncnnncnnannnancnnnnnnnnnnnannngnnnngnnnnnncngnncnnnccncnnnannnnnnnnanannnnnncnnncnnnnnnnnncnnnnnnnnnnannnnnnnncnannnnnnnnnncnnntnncnnnnnnnnnnncnnnnnngnnnnnnnnnncnnnnnnnggntnngnnnnnnnnncnnngnnnnnnnnncnnnnncnnnacnnnnnnnnnnnnncannnnnnnnntnnnnntngcnnnnnnntgcnnnnannnncnnnnnnnnnnncnncnnnnnnnnncnnnnnnnnnnannnnannnaannnnnnnnnnnnnnnnnnnnnntnnnnnnncnncnnnnngnncnnnnngcnnnnnnnnnnnnncnnncnnnncnnngcnnnnncnncnnncnnnnnncnnnnnnnnncnnnnncnnnnnnnnnnnnnngnnnnnnnnnnnnnnnnncnnnnnnnnnnnntnnnnnnnnngnnnnnnnnnncnnnnngnntnnnnnnnnnnnncnnnnnnnnnnnnnnnnnncnntnnnnnnnnnnnnnnnnncnnnnnngnncnnnnngnnngnnnngnncgnnnnnnnnannnnnnncnncnnnnnnctnnnnncnnnnncnncnntncnnnnnnnnnnnnnnnnnnnnnnnnnnnngnnngnnngnnnnntnngnnnngnnnnnnnngannnnngnnnnnntnnntnnnnnnnntnnnnnnnnnnnnnnnnnnnnnnnnnnnnnnnnnnnnnnnntnnnnnnnnnntnnnnnnnnnnnnnnnnnnnngntnnnnnnngannnnncnnnnnnnnnngnnnnnnnnnnnnnnnnnnnnnnnnnnncnnncnnnnnnnnnnnnnnnnnnnnnnnnnannnnannnnnnntnnnnnnngnnncnngnnnnnnnnngngnnnngcncnnnnntgnnnnnnnnnnnnnnncgnnnnnnannnannnanncnnncnncnnnancnnnnnngnnnnnnnnnnnnncngncncnnnancnnncnncnnncnnnnnnncttnnnnnnnnnannnnntnnctcnannnnnnnnncnnncncnnnnnnncncnnnntgnnngnnngnacnnnncnnnnngcangnnncnngcnnnnnnngnnnggncgnncnnnnncnnnnnnngnnngnnnnnnnnnnannnncnnnnnnnnntnnnnnnnngacnnnnnnnnnnntnnnnnnnntnnttnttntntntnnnnacaacgtcacgtcgcagaatggtttcggctaggtctccagagcaaagaaaacgcaacccccatcaccttctccttcggtgacagcacaagctctccggtatccgcttcatacttcacgcctcggacgagagtcttgccaacgtagtcgtcgcggttcgccgcttttacaaagtgcganacagttcgtggaacgtcggtgaagttgaaaacggcaacagcttcgtattccaaagtcgaagaaacgttctgtgcggtgatgttctgcccatacgtttcaaactccaggaacgcctgcacggtggcgtttaatagctctccttgggtttcggccgacgcggacacgtcacaggtatactggaggaaataggtacggcgcgtttagcgtggagacggaaaagagacgagacaggagcactttggaagtcggggacgtaccgagagattgccctgcgagggggagaaacgtcgtaaacctgggaaccgtgatgatgccttcagagcgtcatcgccgaacatgggaagactcacgagggtgtccaccagctcccatgacggagtgtcacacagcgcttcaacaagttcaagtgtttttgtgtcaagagacactacaagtagtggcgcgaacaacaacgtgaaggtgagagtagccttcacacacagtacctttcgtccgagtcttcttgatagcagcagcatctgtcgcttatcggctcgacgagccgccatcgtgtgctgcgagctaagggagtgagtcccctccagctcgtttttcataggacttcttcggtctccccgagactgcgagacctcgacgagacaaaactttaaccttcctttcccctgcaacgagccccgagggtttcacaactccctgcgctcccgaccagaagcgaactccaggtcggttggagctatgccgcatgagcttccagcattcctgaaggcccggctgaaggcccggggcatcaaagtcgacgatgaggcgaacaacaggggtggttcggcggagaatccgaatgaagactcttctcttcctgccgggtggaccgagaccgtggacgagaagtatggacacgcgtactattacaacgctagccttgggaagagttcttggactcgaccgacgaacggagacgcacacataattggggtgatggtggctaatccggcgccgaagacacttccgccggggtggaagtcggcgattgatccgaagacgaatcggacatactactgcgatgcgtccacgaaggtgacgacatgggagcccccgttgccactgcagcagaagcagcatatgaagcgcacagtcgtgatagttccagctgataacaccgtgtctgcacgagcagcaccagtagcgccagtagcgactaacagaaaaagacagcgtgcggcaccaccaggtattgatcccatggacccagcgagttacagcgacgcaccggtggggggctggggcgctggcctcgcttcgcaaaaagagtcagaggggggatcgagcgggcgcccgctcccgagcccgggcgacgtgttgcgccagaacgcgcaatctcagcagccaaccgaaccttacgacttacaaaagagtggtctgggtgaagcagattgagtgcgatggatagccatttgctcacaacgagtgttagctagtcaccgtctagaaataggaaaccactcgagaaaaggtcgtgtacgagcgccacaccgtcgtcgtctatttcgtggcgattcccgacagaaaggccttgccaattctcagccataatctcatcgttgttcgcgatgtgtcgagcaagctgaatactgctngctgacttcagctgccacacctcgccgcccgcgaaaaacaagcatccttcaagactaccgtcagcgacctcgtgtatgaaagcaaacttgacgtgtgcgcgacgaatcaacgcaccctcttccgcccaaacatcttgcaactcgtcgggagagagtttttcctcgggtacagcctgctctccgtcgaatcccaagttaccagtcacgtggcaaccgaaccatctcgcaatatcagcctccgtttttggcatcgagtcacggatgatgtctcccgctcgcttcacggcagcttgcgatatttgtccaacttctgcttggggctctaaccacggatcactccagcgctccgtcactgcgttccgtgtatccactgccgac

SEQ ID NO: 1185 - DNA, 4000 bp, Escherichia coli
  misc_feature (796)..(796): n is a, c, g, or t
  misc_feature (802)..(802): n is a, c, g, or t
  misc_feature (838)..(838): n is a, c, g, or t
  misc_feature (919)..(919): n is a, c, g, or t
  misc_feature (943)..(943): n is a, c, g, or t
  misc_feature (1195)..(1195): n is a, c, g, or t
  misc_feature (1214)..(1214): n is a, c, g, or t
  misc_feature (1221)..(1221): n is a, c, g, or t
  misc_feature (1837)..(1837): n is a, c, g, or t
  misc_feature (1852)..(1852): n is a, c, g, or t
  misc_feature (1990)..(1990): n is a, c, g, or t
  misc_feature (1993)..(1993): n is a, c, g, or t
  misc_feature (2029)..(2029): n is a, c, g, or t
  misc_feature (2648)..(2648): n is a, c, g, or t
  misc_feature (3082)..(3082): n is a, c, g, or t
  misc_feature (3115)..(3115): n is a, c, g, or t
  misc_feature (3239)..(3239): n is a, c, g, or t
  misc_feature (3560)..(3560): n is a, c, g, or t
  misc_feature (3586)..(3586): n is a, c, g, or t
  misc_feature (3625)..(3625): n is a, c, g, or t
  misc_feature (3748)..(3748): n is a, c, g, or t
aaacacagaaaaaggagaacagaaatatgttggagaaaatcaaggaaatcgtagcagatcagttaggaatcgacgaggatgatatcaaattagagtcaaacttcaaggaggatcttgaggcagattcattagatcttttcgagcttgtaatggcactcgaggaggagtacggagtagaaatcccttcagaggatttagagaaaatcgcaacagtaaacgacatcattgagtatcttaagaacaaaggtgtagaggcttaaaagacatggagacaagaataacaaagcttcttggaatcaaatatccggtcattcagggtggcatggcatgggtagcaacccatgagcttgccagcgctgtgtccaatgcaggcggacttggcatcatcggagcaggcggagccccggcttcatgggtaaaggagcagatagtcgctgcaaagaaggagacagataagccgttcggagtcaacctcatgcttatgaatccggaggccgatgagatagcaaaaatcatcgccgaggaaaaggtaaaggtagtcaccaccggcgcaggaaatcctgcaaagtacatggatatgtggaaagaagcaggcgtcatcgtaatccctgtagttgcaagcgtagcactcgcaaagctcatggagagaggcggggcaagtgcagtaatcgccgagggaatggagtcaggcggacatatcggagcacagactaccatgacacttgtgccacaggttgttgatgcagtgagcatccctgttatcgcagcaggcggaattgcagacaacagaggcttnaatgcngcatttgcactcggtgcggaggcagtccagatgggnacacgctttgtcaccgcaaaagaatcgatagtacatgaaaactataagcagaaggtcattaaggccaaggatatagattcngaggttacaggaatgagcacaggncatccgatcagagtactcagaaacaagatgaccagacaatatctcaagctggaaaaggaaggagctccatttgaagagctcgaaaaaatgacacttggcgcactcagaaaagccgttgtagacggagataccgtatatggcagcgtcatggcaggtcagagcgcaggcctcgtaaagaaagaggaaacctgcaaagaaatcattgaggatgtagtgggactgaacaaatagacagtattcacttttacatgnaaatttaaggataccgggncgcctgnaaagagtggcttacggtatcctgtcagaaataaggagaaaccgaaaatgggtaagagagtatttatgtttcccggacagggctcacagtatataggaatgggtaaggagttttacgatacaatgccaaatgcaaaggcagtaatcgaccttgccagtgaacagacaggcttggatattccggcattatgctttgaggaaaatgacaagctgaatattacagagtacacacagatatgtatgcttgcagttgaggcagctatatatcaggcaatcattgacaaaggtatcacacctgatgtcacagcaggcttaagccttggggaatatggtgctctcatcgcatcaggagccatgactatggcagatgcattcgcagttgtcagaaaaagaggaatctacatgcaggaggcagttcctacaggtggagccatgacagcggttttaggacttgatccgcaggtcattgaggatatctgcaaaaagacagcagatgagacaaattcagtggtatcggtagccaactataactgcccgggacagattgttatcacaggagaaaaggcagcagtagatgccgccgcagcagcatgcagcgaggcaggcgccaagagatgngtaccgctcaaggtnagcggacctttccactcagcaatgcttaagggcgcaggcgaaaagctcgcagatgcacttgagagtgtagaaatccacgatatcaaggtgccatatatcacaaacgtcacagcagactatgtgaagtcaccggcagangtnaaggattatctgacaaagcaggtttcatcgtcagtncgctggcagcagaccatcgagcgccttatcgcagacggtgcagatgagtttgtggaaatcggaccgggacgctcactcagcggatttatgagaaagataaatagagacgtaaaagtcgtaaacatagacaaactggaggattttgaaaagtatgttaacaggtaaaaatgccctggttacaggcgcaagccgcggaattggaagacagatagctcttacacttgccgcagcacacgcctttgtaatagtaaattataatggttcaaaggaaaaggcagatgccgttgttgcagagataaaggcagcaggcggtgatgcagtttcttatcagtgcaatgtatctgattttgacgagtgccagaatatgataacagcgctcatcaaggagtacaagcacatagatatcctcgtaaacaacgcaggaatcacaagagacggtctcatcatgaagatgagcgaggcagactatgacgcagtgctcgacacaaaccttaagggtgcgttcaacacaatccgtcacatgtcacgctatttcttgaagcagaaatcaggaagaattatcaatatttcatcagtttccggaatactcggaaatgcaggacaggccaactacagcgcnagcaaggcaggagttataggactcacaaaggctgtagccagagagcttgccagccggggaatcacagcaaacgcagtggcaccgggctttgtagagacagagatgacagatgtgcttgccgatgcggcaaaggagaatcttttatcacagattccgcttggcagaccgggaaacacaaaggatatcgcaaacgcagtattatttttagcatcagatgcagcaggctacatcacaggccaggtgctgtctgttgacggaggaatggcaatatgagtagaagagtagttgtaacaggacttggagcagtaacaccaatcggaaataatgtggacgatttctgggcatcggtaaaggccggaaaaatcggatttgaccacatcacaaaatttgacacaacagattataaatgtcacattgcagcagagcttaaggantttaacccacaggattttatggacagaaaggcngcaaagagaatggagccattctcacagtacgctgtagctgcagcaaagcaggcaattgatgacagcggacttgatatcgaaaaggaagatccatacatggttggatgtgccatcggttcaggtntcggaagtcttcaggctatggagcgcgagacacaaaagctttatgaaaagggaccaaacagagtcaatcctctgcttgttccgcttatgatctgtaacatggcagcaggaaatgtttctatccagttcggtctcaagggaaagagtatcaatgatgtaacagcctgcgctacaggaacaaacacaatcggtgaggcatacagaagcatccagtacggtgaggctgacgtgatggtagccggtggtacagagggcagtgtatgtcctatcggaatcgcaggatttacagcacttacagcgctttctacagtagatgatccgncaaagtgttcacttccgtttgacaanaacagaagcggctttgtaatgggtgagggcgcaggagtngttatccttgaagagcttgagcatgcaaaggcaagaggtgcaaagatttatgcagaggtagtcggatacggctgctcatcggatgcataccatatcacatctccgcaggaggatggcgcaggngcagcaagagccatgaccaatgccatgagcgatgcaggtgtcacaccggcagatgtaaaatacatcaatgctcacggaacaggcacacatcacaatgatctctttgagacaagagcaatcaagcttgcgttcggtgatgaggctgcaaatcttaaaatcaattcaacaaagtctatgataggacatctgctcggagcagcgggagctgttgagtttataacatgtgtgaaggaaatccaggatggatttata

SEQ ID NO: 1186 - DNA, 4000 bp, Escherichia coli
  misc_feature (158)..(158): n is a, c, g, or t
  misc_feature (335)..(335): n is a, c, g, or t
  misc_feature (338)..(338): n is a, c, g, or t
  misc_feature (473)..(473): n is a, c, g, or t
  misc_feature (500)..(500): n is a, c, g, or t
  misc_feature (578)..(578): n is a, c, g, or t
  misc_feature (584)..(584): n is a, c, g, or t
  misc_feature (587)..(587): n is a, c, g, or t
  misc_feature (1672)..(1672): n is a, c, g, or t
  misc_feature (2248)..(2248): n is a, c, g, or t
  misc_feature (3586)..(3586): n is a, c, g, or t
  misc_feature (3733)..(3733): n is a, c, g, or t
  misc_feature (3739)..(3739): n is a, c, g, or t
  misc_feature (3792)..(3792): n is a, c, g, or t
cgggtttctgcatgagccaggccaggcagcgtctggcgtcgatcaccccgggcgcgacgatggccccagtaggacatgcgggttcgcaccgtgagcaggttccacacccgtcagcgactggctcggagcgggggtagtcggcggtcgtgatgatcganccgaggatgaagaagcttcccgctccggagatgagcaggttcgcgttgcggccgaaccagccgagacctccgagatatgcggcttcccggtcgacgagcgagttgtcgtcagcgaaggcgaccgcccggtgcccagcggctcggatcagtcgcgcctcggcgcggagcgctcggcgnagntcctcgtagtggtcggctcgcgcgtagcgggccacccgtgcccaacccggtcggaccggttcgggctcgacgccggccgcgtagggcatcgctgcgacgatgatcgagcaggccccatccaccgcgcgctgaggntcggtggagcgctccggatcgcggtangtgaactccatcgagtcggccaacccatcggcgcggcgttcgttgagggccgatcgagcgcgatcgagcacctcggcnggggcnacnccgagtgcggtgatgccctgttctcggaggcgatctcggatctcatcgagggttggaagtggagcgttgcgtctcatgtcgacttcagccggtcgtgtgaccgctcacctgccccacaacaggtcggcgaagaccgggctgttgatcaagttggcgccaagagcgcgggcatccgatctcaccgcttgatcgtccgtgaccacgacgacggggcgggtgaccggcacgcgactgagttcctcgcggatcgtgtcgtcggcgtcgacaccctctggcgagtagaggactcgaacgtgtcgacggccacgagcgtgggcaccgacgatcgacgccccgtcgatcgccaccacgatgtccgcgccggtacgggcggcgagctgctcacaggcgctcaggaggcgctcgcgctgctcggcgatctccaggtgtccaagccgaccgagggtgacgttgtaggcatcgacgatcacggtcgctccacatcgcattagatggtcagccgcgcggtcgggcaaaccggtgtaggcgccggggatctggacgggctcgcgacggtcgccttctcgtggcgctgggagcatggcgcgaagcccggccagcagggtctcagcgcttttcaccatgccgctcagatgctcgatgtcgctgagaagttcccgccgctcgtcgagcacgcggtcgcgcacctcctcagcctcctgagtggccgcatcggcgatgccggcctgatcgatggcccgctcgagtcgacccttggtggcggcgtgtcggtcgcgttcgtgccggaggtccatccgcgcggcttggagcgactcgtcgagggcggcgctctcggcgctggacttctcgagagctgcctcgagctcggagactctcgctcggaggtcgctcacctcggtccgctcacgggcgagtgcctcctcagcccgagccgacttctgctcggcggcgaggcgcttgcgaacctcgcgacgtaccgccgatggatcgtcaccgaggccggcgtccgacgtgccggccattccccaccaatcgggtgctcccgccagccacgcacgacagcgctcgtcgagctgaccggcatntacgatctcagcgcagcgcttccgcatgtcctcagcggagagcgcctccacgattcgcgtgatatggccgagcccgaggcggtcgcgacgaggggcattcgtcaccgtgtcgaccaccgcgtcaggacaccagtcgagcggaggcccatcacgaggcacgagcagtgggacgagcgcctcgaccaggggacggaggtgccggggatcattggggggaacctcgcgtctcgcccccgatcgagccatgtgacgatcgtaccggcgcgcccacgcacgggatggcttgacacgaacagatgttcgtgttcgactaggtgtgtgtatcgccagcgcagcctcgacgacttagggctggcgctctcggaggtgaccttctgcgtcgtcgacctcgagaccacgggcacccgagccgactcggacgcgatcaccgagatcggagcggtcaaggtgcgcggaggtgaggtgctcggcacctatcagaccctcgtcaacccgggtcgtcccatccctccgcagatcacactgatcaccggactgaccgacgccgtggtcgccaccgcccctcgtatcgaatcngtgcttccgagcctggagtcgttctgcgagggctgcgtcgtcgtcgcgcacaacgcgcggttcgacgtcggtttccttcgggccgccttcgagcgggcagggcgcgaggagttccgcccgccagtgctcgacacgctcgccatcgcccgacgactactgcgcgacgaggtgccgaacttccgtctcggaaccttggctgagcggttcggcttcgcgaactcaccgagccatcgggcccttgatgacgctcgagccacaacggatctccttcacctgctcatcgaacgagcctccgcgtggggggtcaccggaatcgacgacctcatgcaacttggaacgatcggcggccacccccaggcagcaaagttgcgtctgaccaccgacctcccacgctcccccggcgtctacctgttccgcgacgcgatgggagacatcatctatgtgggaaaggcgaccaacctgcgtcagcgggtgaggagctacttcggtggcgacgaccgtcgaaccgtcggcccgatgctgaggcaactctccaccatcgagcatcttccgaccccggatcccctcaccgccgagatcctcgagcgtcgcctcatcatcagctcgagcccgcggttcaaccgggtcggacgtcatccacggcgaccaacgtggattcgtctcgacaccagtcaggagtggccgcggctctcggtggttcgcgctgacgatgggcgatcaccgcatctcggcccggtcggttcgcaccgtcgcgccgccgcggtgatcgaggccatcgagtcggtcgtgccgatccgccgctgctcggtgcgactgccgagaggccacaccccacgtccagaggccacgccctgcacagcgcaccagctcggggtcgccccatgtccgtgcgccggtttcgccgaccgcgccgagtatgaccttgcggtcgcgaccatcgtcggcctcttccaaggtgagacgaccgctgtcgtggaggcggcgacgacgcgcatgcgcgatctcgcgctcggacagcggttcgaggaggccgcagcctgccgcgatcggctggctgagctgctcggagccctcgaacgcaccgccctcgtgcgcgcggtgctcgacgctggtgctctcaccgtgcgcgacggtgatctcgagttccgcatggagcacggggtgctccatcacccggcgctcgagggacacgatccggtcgacccgatcggtgaggccctcatgctcggtcgacacctcgagcgaatcgcaggccgcgtggatgtcgtctcgtgcagcggcgaatggcgctttcctctgctcttcgatactgaagtgcctcgactcgccctcgctgtntagagcgcgtaaccgttgagcgggtctccgctctaggggtcgacgcgcacaccctcgcggtcgaccgcgaggccaaggacctgatcagcggacgctccggtcgcgtcccgcacaccagcgacgacctggtcgagctcgtccgccttnacccanccagcaaccgtcggacccgagccggacagccacacaccatgcacaccgggaancgactccatcgcggtcgccgcttgcgccgatgctggcgccgccgcgaagcggatgtcttggtggagtcgatcggcgactgagcgacgcagtagtccaaggtctcctgctgccaccgcggtgatcagcgtggcgacccgcgccatgttgaacaccgcgtcgggtcggtcgacgacggtgggaagagtggctcgggagcgatcggtggag

SEQ ID NO: 1187 - DNA, 4000 bp, Escherichia coli
  misc_feature (1989)..(1989): n is a, c, g, or t
aagtcaaattttgcaaatcgctgatccggctgagttaacgcggcgcccaaaaagggctgcatgcccatgctcgagtcattgttcgccggtgcgggcgaggtgtcccgtttgatttgcgcaaaaggagtgatttgaacggtattagacgtgttattggttgcttcgtgcagcacggtgatggtgtggctgccggcctcaaaaacaaacacttttctaacggtgaccgcgctcgttttgtcgttgaaggtgagcacaacctctaagggcgacaggcctgtttgctgataatcggtgcgctcagcgcggtaaagcgcgcggttaggcctatcaataccatcaggaccgactaagcctgattgagcaacataggttcgctgtgaattacgttctagcaatacaaagggatccgatgtgtcttcgagagtcttaggaaaatccttaaacccagcgccaacaacatccccgccttgcagatcaatcatgacctcaagtacgtcggtgtgtacggtaacgaaccgctgctgcacgccggcatctgtcgtgctcagcggctcaggagccgataagctagcgtccggtgacgccggtaaatcaggatctaagatatcagcagatggcgcgacatcttgaggtgctgcttgagaaattgtcgcgcttggcgcaaaagcgtcgaccatggggacttgaggtctctgcgcagagtcctgctcggcgctgtagcgagtccattctcccagcagcataaaacccagtagggcgctggcagctaaaagggcatatcgctggatatccatggtgacggtctcagttgtgttcgtggggctgcggtgtgcttgggacgggatcatacccaccctcgcagccgggttggcaacgcagcaaacggtgtactgtaagccagcaccccgtcactgcaccatgagttcttagcgcatcgatgccgtattgtgagcaagtcggaagaaagcggcaacgcctaccgagccaggggctgagggttagttggtatccgcgaatcaccatggcgaaggcgttggcaacgtgttgatcgattgtttttagccagcccattgacggtccgccgttgcgttaatttgatgccacaactttgcaatgtccagccatacagcggggttgtcgagctcgtcagcaggtgatcgagccaacacgaccaagtccattgagcgtcccagcggtgtcagcctaaactgttctctaacgattcgtttaatacgatttctccgcgaggcgagacggatatgcttttttgccacaatgatgccgatacgagacggtccgtcgttattttctacggctaataaaagaaacgctttactgctggccttgacgttaggaccatcaaagacgcggcgatagtggcagggttgcgagagtcgtgctttaagcggaaaggacggcatgcgctgatactgcgccttgtccgttggggtcaagcagacaggctgtgtcgacctcgagcgcggcgacgtgccaacactttccggccagctttggttgccattctggcgcggaagccgtgactgcgcttgcgcttgagtacgctgggttgaaatgtacgcttcatgacacaaaccttcctaaatggattctggctcgcgcgttacggtagtaggcgctttggcagaatcgagccaattcgttttcgggcgcggagtataggagtagctgaggggcttggcaagacccaaacagaagcccgcagatatgttaaagccgctcgagaaaaataaatgctccaccggcaaccgacccagtttatcacccgccgcgacctcgatgaggcacacgtaacctaatgatatcgctgccctattgataatttggtggccagtgtatgtactggtatcggagcgtgattgggtcgctgtgacaatcactaaacacaggtttacaaaatgatactaacagcttacccacaggcgaattaaaataagcttgcaaacttgtttttgatcctctaggaggctntttttgttttaagcatctgattttaataggtaaaaaaggtgttgataaagacggttccgtgtggataactacccctcttaacgtgcgtaggccgacaacgagattaagacttcgtttgggtcaaacgtcctcgttatgacgatatggacctgcttaggagacagcaaattggccgcgcttcagcctctcaccgacccctgggaacactgtttgaatcgtatcggcagcgatattcctcaacagcaatttaatacctggattcgaccgctgcaggcgcaatggcaggggtctggattgatgttggccgcgcccaatcggtttatcagggattttgtcactgaaaaatatgtgccgatgatcgccacctacctgcttgatatcgttgcgccggcctctgcgcaggtttccgtgaccgtggttggcggtgcggcaccgacgccccctcaacctgtcaggccagtgcaagatgcgccggccgtggcgctaactggggcgttgacaggggcaccaacgcccccagtggttaacaagccgagcccggcggcctccctatcgccctctaatttagtcgcgggttatacctttgagcgttttgtagagggaaaaagcaatcagctagcactggcagcggcacagcaggtttctgaacacccaggtgactcttataacccgttgtttttgtatggcggcgtcgggctcggaaagacccacttaatgcacgcggttggcaacgcgatgcggcgtcggaatccggacgcgaaaattgtgtatttgcattctgagcggtttgttgcggacatggttaaagcactgcagttaaatgcgatcaacgacttcaagcggttttatcgttcggttgatgcgctgctaattgacgatatccagtttttcgcaaacaaagaccgttctcaggaggagttttttcatacctttaacgccttgctcgagggcgggcagcaaatgattctgacctgcgataggtatccgagagaaattgacggtgttgaagagcgtttgaagtcgcgctttgggtgggggctgacggtggcggtagagccgcctgatttagagacgcgggtagcgattttaatgaagaaggcagagcaaagccatatcacgctttcgcccgatgcagcttttttcattgcccagcgaatacgctcgaatgttcgtgagttggagggcgccttaaaacgcgttatcgccagtgcaaacttcacaggtaggccgtttgacattgacctgataaaggaaagtttaaaggacctgctggcgttgcaggacaagcagatttcgttggataacattaagaaaaaggtggctgaatactacaaaatcaaggtcgcggatctgttgtcgaagcgtcgtaataggtccgttgccaggccgcggcaagttgcgatggcattgtcaaaagaactgacgcgtcacagcttgccggagattggggatgccttcggtggacgtgaccacacaacggttttacatgcatgtcgtaaaatcaaagagctacgagatgacagccccgacatcagtgaagactatcaaaatttgttgcggtctttaacaacctgacgtgagtcgggcgtctgatctgttattgtgttcaacagtgcccattacaccttatgagttcaatgccatgaaattttcaatcgcccgcgacgccttgattaaaccattgaatttggttgcaggggtggtcgagagacgacagaccttacccatcctttcgaatgtcttgttggtgctagacggcacaacgttatctttgacaggcactgatctggaggttgagttggtggggcgggtagagcttgatgcgcccggtgttgatggtgaagtcacggtgcccgctagaaagttcgtcgatatttgcaaatcattgccagagggttctaatatagaactatcggtagaggcgggtaaggccaccgtgaaagcgggccggagtcgtttcacattgtctacattgccggcagccgactttcctgctgtagagggcggagct

SEQ ID NO: 1188 - DNA, 4000 bp, Escherichia coli
  misc_feature (1992)..(1992): n is a, c, g, or t
aaggtgcgacatcttcaggccagcaggtctgaatcggtagtttattgagatctatttgatcttcttcaataataatttcctggcagggtggagacttaatcaccttgggtgataaatttaatgcctgcttaaatatcggggctttttcaagtagatccttccagcctttgggtggttcgggctcctttaaaaaagccagtaacctgccaacatccctgagtgattcaacatcattctggcccattgccatggcgacacgtttggttgtgccaaataaattagccaatacagggatatcagagttaacaggattttcaaacagtaatgccggaccttcgcggcgcagggtgcggtcagaaatttcggtaatttccagatagggatcaacaggcgtctggatgcgttttagttcaccttgctgctcaagtaattcaataaaatctcgaaggtccttgaacatgagtcagttacactttttggtagttatgctctggttttatttacgtttcattgcctggaagaattcatcgttggttttggtgtctttcaatttatccagaatgaattcagttgccgggacatcttccatggaagtcagcaatttgcgcaatatccacatacgttgtaattcttcttcagtggttagcagatcttcacggcgggtgcctgagcggcgcacattgatagccggataaacgcgtttctctgccattttcctgtcgagatgcagctccatgttgccggttcccttaaattcttcataaataacttcatccatttttgaaccggtttctatcagacaggttgaaataattgtcaggctaccaccttcctcaatattacgtgcagcaccaaagaaacgttttggtctttccagtgcatgggcatcgacaccacccgtcaggacttttcctgatgaagggatgattgtgttgtaggctctggcgagtcgagtcatggaatccagcagaataacgacatcttccttatgctcgaccagacgtttggctttttcgatcaccatttctgcaacctgaacatgtcgtgcaggcggttcatcaaaagtactggcaactacttcaccacgcacggaacgtttcatctcagtcacttcttcgggtctttcgtcaatcaacagaacaatcaaatgacactctggagaattacgtgtaatcgcctgagcaatattttgcagaattaaagtcttacctgccttgggcggtgacacaatcaggccgcgttgacctttaccgataggggcaaccagatcaatgactcgtgagcttaaatcttctgagctgccgttacccgcttccagtatcagtctgtcatcagggaatagtggtgtaaggttttcaaaaaggattttattgcgggagttttcaggtttgtcgaaattaatttcattgactttgagtagagcaaaatagcgttcaccgtcttttggtggccggatttttccagctatggtgtcgccggtacgaagattaaagcgacgaatctggcttggagaaacataaatatcgtcgggtccggccagataggatgcatcggctgaacgcaaaaaaccaaaaccatcctgtaaaatttcgagtacgccatcgccataaatatcttcgccattttttgcatgacgttttaacagttgaaagataacgtcttgcttgcgtgtacggctaacgttatccaggcccatatcctgggcaatctgtaataattcggaaattggtttggtttttaattcagatagattcatagcataagttcaaagtgttgtgagtcttttttgagaaaaaagaggaggtaggtttactgttaaaaaaggtctttaaaagaaagtaaataagtttgtttgggttaataaatttattgcttgcctgattccgccttttatgccttttatataaaaatatataagggctggttcagttttaaaaattattttgctgatttggcaccttggaatggcgcctgaaaagacaagctggcggntaatctatcatccgccctaacttgtgtaaagtaaatatttaaaaaatcactttttttgaactttttatctattcccggcttaacggtttttagattgtgctgtcgataaaagctgatagctgggctttagaaagagcgcccacttttttgccggctgcatcgccattattaaagatgatcaaagtgggaatgcctttcacattgtatttttcagccatggctttatgttgatcgacatctattttgcaaattttcaatttgccggcatattcatcagccaggtcttctaggacaggagcaatcatcttgcagggaccacaccactcagcccaaaagtctactagtactggtccatttgaattgattacatcatcttcaaaactgtcatctgaaatatgactgatattgtcgctcatgataggttccttacgaataaataaaatgaaatttgattaggggtcttttcttgctgctaaatatggagtcaaaagcatgcttattcaagcttttcggcgaccttttttgcaaaataggttaaaacggcatcggcgccagcacgtttaattgagagtaaagactctagcataactttgtctgcatccaaccagccgttctggaaagcggccatatgcatggcgtactcaccactgacctgatagacaaacgtaggcacgccaaactcgtcttttacccgtctgacgatgtccagataaggcagtccgggtttaatcatgaccatatcagcaccttcacttaaatccatagcaacttcatgtagcgcttcgtcactgttggcgggatccatctgataggtttctttgccacttgagcccagattggttgacgagcccactgcatctctgaatggtccgtaataggcagaagcatattttgccgagtaagccaggattttagtattgatgtgcccggcggattcaagctcatttctgatcgcaccaatccggccatccatcatatccgagggagcaacgatatctgctccggcgttggcatgggaaagcgcctgtttgaccaaggcttctactgttgcatcatttagcacatagcctttggtatcaatgatgccgtcctgtccgtgagtcgtgaaggggtcgagggcaacatcggtaataactcccatttccgggcaggcatctttaatggtttttatggcgcgttgagcaaggccatcagcattaaatgcttcacggccatcttcagtcttgctggtggggtcagttacagggaaaagcgcaatagcagggataccaagctgttttaatacaagtgtttcttttgctaattcatcaagcgttagcctttcaatatccggcatactgggaaccacttgacgttcagctttgccttcaatgacgaagatgggataaatcaggtcatcaacactcagccttgattcacgcatcaaacgacgactgaaatcatcgctgcgcatacggcgcatgcgtgttgccgggaaaaggcgctggtaactgtctttactcaatttatactccgctataaatcaacaagggatatagagggttaaggaggtattaaattaattttcctagtaacatccttaacggaaagttatctatgttcacaaagctgaactaattatggcatatcaacacataaaatgaataaaaaacaactcttcctgctttcactttttctaattgttttagcttgtttttttatttttgatttaggtgcgtatttgcaattatctttttttcaggagcaacgagagctgctgctgagttacaaagaaaacaattttgcattactttcaatcctttatttctttttatatatcctcataacagccttttctctaccggccgcagccctggtgactttggctggaggtgcaatattcggtttctggtgggccttattcctggtgtcatttgcaagctcgataggtgcatcactggcttttctcatggccagaactgtattacgggattgggtgcaatataagtttggtgacaaactgaaacct

SEQ ID NO: 1189 - DNA, 4000 bp, Escherichia coli
  misc_feature (2549)..(2551): n is a, c, g, or t
  misc_feature (2553)..(2553): n is a, c, g, or t
  misc_feature (2565)..(2565): n is a, c, g, or t
  misc_feature (2567)..(2567): n is a, c, g, or t
  misc_feature (2570)..(2573): n is a, c, g, or t
  misc_feature (2575)..(2576): n is a, c, g, or t
  misc_feature (2579)..(2581): n is a, c, g, or t
  misc_feature (2583)..(2585): n is a, c, g, or t
  misc_feature (2588)..(2591): n is a, c, g, or t
  misc_feature (2594)..(2594): n is a, c, g, or t
  misc_feature (2596)..(2596): n is a, c, g, or t
  misc_feature (2598)..(2600): n is a, c, g, or t
  misc_feature (2602)..(2603): n is a, c, g, or t
  misc_feature (2607)..(2608): n is a, c, g, or t
  misc_feature (2610)..(2610): n is a, c, g, or t
  misc_feature (2617)..(2617): n is a, c, g, or t
  misc_feature (2619)..(2619): n is a, c, g, or t
  misc_feature (2624)..(2624): n is a, c, g, or t
  misc_feature (2633)..(2633): n is a, c, g, or t
  misc_feature (2635)..(2635): n is a, c, g, or t
  misc_feature (2637)..(2639): n is a, c, g, or t
  misc_feature (2642)..(2642): n is a, c, g, or t
  misc_feature (2644)..(2644): n is a, c, g, or t
  misc_feature (2649)..(2651): n is a, c, g, or t
  misc_feature (2655)..(2656): n is a, c, g, or t
  misc_feature (2659)..(2660): n is a, c, g, or t
  misc_feature (2662)..(2664): n is a, c, g, or t
  misc_feature (2671)..(2671): n is a, c, g, or t
  misc_feature (2673)..(2673): n is a, c, g, or t
  misc_feature (2680)..(2682): n is a, c, g, or t
  misc_feature (2685)..(2685): n is a, c, g, or t
  misc_feature (2688)..(2689): n is a, c, g, or t
  misc_feature (2691)..(2693): n is a, c, g, or t
  misc_feature (2698)..(2700): n is a, c, g, or t
  misc_feature (2702)..(2702): n is a, c, g, or t
  misc_feature (2704)..(2707): n is a, c, g, or t
  misc_feature (2709)..(2709): n is a, c, g, or t
  misc_feature (2711)..(2713): n is a, c, g, or t
  misc_feature (2715)..(2716): n is a, c, g, or t
  misc_feature (2718)..(2718): n is a, c, g, or t
  misc_feature (2721)..(2721): n is a, c, g, or t
  misc_feature (2724)..(2727): n is a, c, g, or t
  misc_feature (2731)..(2731): n is a, c, g, or t
  misc_feature (2734)..(2736): n is a, c, g, or t
  misc_feature (2739)..(2739): n is a, c, g, or t
  misc_feature (2741)..(2741): n is a, c, g, or t
  misc_feature (2744)..(2745): n is a, c, g, or t
  misc_feature (2749)..(2759): n is a, c, g, or t
  misc_feature (2765)..(2765): n is a, c, g, or t
  misc_feature (2768)..(2769): n is a, c, g, or t
  misc_feature (2771)..(2772): n is a, c, g, or t
  misc_feature (2775)..(2775): n is a, c, g, or t
  misc_feature (2777)..(2777): n is a, c, g, or t
  misc_feature (2779)..(2782): n is a, c, g, or t
  misc_feature (2787)..(2788): n is a, c, g, or t
  misc_feature (2793)..(2795): n is a, c, g, or t
  misc_feature (2797)..(2797): n is a, c, g, or t
  misc_feature (2800)..(2801): n is a, c, g, or t
  misc_feature (2805)..(2806): n is a, c, g, or t
  misc_feature (2810)..(2810): n is a, c, g, or t
  misc_feature (2812)..(2812): n is a, c, g, or t
  misc_feature (2816)..(2817): n is a, c, g, or t
  misc_feature (2820)..(2822): n is a, c, g, or t
  misc_feature (2824)..(2825): n is a, c, g, or t
  misc_feature (2828)..(2828): n is a, c, g, or t
  misc_feature (2830)..(2831): n is a, c, g, or t
  misc_feature (2835)..(2838): n is a, c, g, or t
  misc_feature (2841)..(2846): n is a, c, g, or t
  misc_feature (2848)..(2849): n is a, c, g, or t
  misc_feature (2851)..(2855): n is a, c, g, or t
  misc_feature (2859)..(2859): n is a, c, g, or t
  misc_feature (2865)..(2865): n is a, c, g, or t
  misc_feature (2867)..(2868): n is a, c, g, or t
  misc_feature (2870)..(2870): n is a, c, g, or t
  misc_feature (2874)..(2874): n is a, c, g, or t
  misc_feature (2877)..(2878): n is a, c, g, or t
  misc_feature (2880)..(2881): n is a, c, g, or t
  misc_feature (2885)..(2889): n is a, c, g, or t
  misc_feature (2891)..(2891): n is a, c, g, or t
  misc_feature (2893)..(2893): n is a, c, g, or t
  misc_feature (2895)..(2896): n is a, c, g, or t
  misc_feature (2899)..(2901): n is a, c, g, or t
  misc_feature (2903)..(2903): n is a, c, g, or t
  misc_feature (2905)..(2907): n is a, c, g, or t
  misc_feature (2910)..(2910): n is a, c, g, or t
  misc_feature (2914)..(2917): n is a, c, g, or t
  misc_feature (2919)..(2919): n is a, c, g, or t
  misc_feature (2921)..(2922): n is a, c, g, or t
  misc_feature (2924)..(2928): n is a, c, g, or t
  misc_feature (2931)..(2931): n is a, c, g, or t
  misc_feature (2933)..(2933): n is a, c, g, or t
  misc_feature (2942)..(2942): n is a, c, g, or t
  misc_feature (2944)..(2950): n is a, c, g, or t
  misc_feature (2952)..(2956): n is a, c, g, or t
  misc_feature (2958)..(2958): n is a, c, g, or t
  misc_feature (2962)..(2962): n is a, c, g, or t
  misc_feature (2964)..(2965): n is a, c, g, or t
  misc_feature (2967)..(2967): n is a, c, g, or t
  misc_feature (2969)..(2969): n is a, c, g, or t
  misc_feature (2971)..(2972): n is a, c, g, or t
  misc_feature (2974)..(2974): n is a, c, g, or t
  misc_feature (2976)..(2976): n is a, c, g, or t
  misc_feature (2978)..(2978): n is a, c, g, or t
  misc_feature (2980)..(2980): n is a, c, g, or t
  misc_feature (2982)..(2986): n is a, c, g, or t
  misc_feature (2988)..(2988): n is a, c, g, or t
  misc_feature (2991)..(2993): n is a, c, g, or t
  misc_feature (2996)..(3001): n is a, c, g, or t
  misc_feature (3003)..(3009): n is a, c, g, or t
  misc_feature (3013)..(3013): n is a, c, g, or t
  misc_feature (3015)..(3017): n is a, c, g, or t
  misc_feature (3021)..(3022): n is a, c, g, or t
  misc_feature (3024)..(3025): n is a, c, g, or t
  misc_feature (3027)..(3029): n is a, c, g, or t
  misc_feature (3033)..(3036): n is a, c, g, or t
  misc_feature (3038)..(3038): n is a, c, g, or t
  misc_feature (3040)..(3042): n is a, c, g, or t
  misc_feature (3044)..(3045): n is a, c, g, or t
  misc_feature (3050)..(3050): n is a, c, g, or t
  misc_feature (3052)..(3052): n is a, c, g, or t
  misc_feature (3054)..(3054): n is a, c, g, or t
  misc_feature (3057)..(3058): n is a, c, g, or t
  misc_feature (3060)..(3061): n is a, c, g, or t
  misc_feature (3065)..(3067): n is a, c, g, or t
  misc_feature (3070)..(3070): n is a, c, g, or t
  misc_feature (3072)..(3072): n is a, c, g, or t
  misc_feature (3074)..(3075): n is a, c, g, or t
  misc_feature (3079)..(3080): n is a, c, g, or t
  misc_feature (3082)..(3082): n is a, c, g, or t
  misc_feature (3084)..(3084): n is a, c, g, or t
  misc_feature (3087)..(3087): n is a, c, g, or t
  misc_feature (3089)..(3089): n is a, c, g, or t
  misc_feature (3092)..(3094): n is a, c, g, or t
  misc_feature (3099)..(3099): n is a, c, g, or t
  misc_feature (3104)..(3104): n is a, c, g, or t
  misc_feature (3106)..(3106): n is a, c, g, or t
  misc_feature (3111)..(3111): n is a, c, g, or t
  misc_feature (3114)..(3116): n is a, c, g, or t
  misc_feature (3119)..(3120): n is a, c, g, or t
  misc_feature (3122)..(3122): n is a, c, g, or t
  misc_feature (3124)..(3124): n is a, c, g, or t
  misc_feature (3129)..(3131): n is a, c, g, or t
  misc_feature (3133)..(3133): n is a, c, g, or t
  misc_feature (3135)..(3137): n is a, c, g, or t
  misc_feature (3139)..(3139): n is a, c, g, or t
  misc_feature (3141)..(3141): n is a, c, g, or t
  misc_feature (3143)..(3144): n is a, c, g, or t
  misc_feature (3146)..(3146): n is a, c, g, or t
  misc_feature (3150)..(3154): n is a, c, g, or t
  misc_feature (3156)..(3158): n is a, c, g, or t
  misc_feature (3160)..(3163): n is a, c, g, or t
  misc_feature (3166)..(3166): n is a, c, g, or t
  misc_feature (3170)..(3172): n is a, c, g, or t
  misc_feature (3176)..(3177): n is a, c, g, or t
  misc_feature (3180)..(3181): n is a, c, g, or t
  misc_feature (3183)..(3183): n is a, c, g, or t
  misc_feature (3185)..(3187): n is a, c, g, or t
  misc_feature (3190)..(3190): n is a, c, g, or t
  misc_feature (3192)..(3192): n is a, c, g, or t
  misc_feature (3201)..(3202): n is a, c, g, or t
  misc_feature (3204)..(3204): n is a, c, g, or t
  misc_feature (3207)..(3207): n is a, c, g, or t
  misc_feature (3209)..(3210): n is a, c, g, or t
  misc_feature (3214)..(3217): n is a, c, g, or t
  misc_feature (3220)..(3220): n is a, c, g, or t
  misc_feature (3229)..(3229): n is a, c, g, or t
  misc_feature (3232)..(3233): n is a, c, g, or t
  misc_feature (3235)..(3235): n is a, c, g, or t
  misc_feature (3238)..(3238): n is a, c, g, or t
  misc_feature (3247)..(3247): n is a, c, g, or t
  misc_feature (3251)..(3252): n is a, c, g, or t
  misc_feature (3255)..(3255): n is a, c, g, or t
  misc_feature (3258)..(3258): n is a, c, g, or t
  misc_feature (3261)..(3261): n is a, c, g, or t
  misc_feature (3270)..(3270): n is a, c, g, or t
  misc_feature (3282)..(3282): n is a, c, g, or t
  misc_feature (3287)..(3287): n is a, c, g, or t
  misc_feature (3292)..(3292): n is a, c, g, or t
  misc_feature (3305)..(3305): n is a, c, g, or t
  misc_feature (3309)..(3309): n is a, c, g, or t
  misc_feature (3311)..(3311): n is a, c, g, or t
  misc_feature (3319)..(3319): n is a, c, g, or t
  misc_feature (3333)..(3333): n is a, c, g, or t
  misc_feature (3337)..(3337): n is a, c, g, or t
  misc_feature (3346)..(3347): n is a, c, g, or t
  misc_feature (3350)..(3350): n is a, c, g, or t
  misc_feature (3353)..(3354): n is a, c, g, or t
  misc_feature (3357)..(3362): n is a, c, g, or t
  misc_feature (3364)..(3364): n is a, c, g, or t
  misc_feature (3368)..(3370): n is a, c, g, or t
  misc_feature (3374)..(3375): n is a, c, g, or t
  misc_feature (3379)..(3379): n is a, c, g, or t
  misc_feature (3382)..(3382): n is a, c, g, or t
  misc_feature (3387)..(3387): n is a, c, g, or t
  misc_feature (3389)..(3389): n is a, c, g, or t
  misc_feature (3392)..(3392): n is a, c, g, or t
  misc_feature (3395)..(3395): n is a, c, g, or t
  misc_feature (3399)..(3399): n is a, c, g, or t
  misc_feature (3401)..(3401): n is a, c, g, or t
  misc_feature (3405)..(3405): n is a, c, g, or t
  misc_feature (3408)..(3408): n is a, c, g, or t
  misc_feature (3410)..(3411): n is a, c, g, or t
  misc_feature (3413)..(3414): n is a, c, g, or t
  misc_feature (3416)..(3417): n is a, c, g, or t
  misc_feature (3425)..(3425): n is a, c, g, or t
  misc_feature (3428)..(3428): n is a, c, g, or t
  misc_feature (3432)..(3435): n is a, c, g, or t
  misc_feature (3439)..(3439): n is a, c, g, or t
  misc_feature (3446)..(3448): n is a, c, g, or t
  misc_feature (3451)..(3452): n is a, c, g, or t
  misc_feature (3456)..(3457): n is a, c, g, or t
  misc_feature (3459)..(3461): n is a, c, g, or t
  misc_feature (3464)..(3465): n is a, c, g, or t
  misc_feature (3467)..(3468): n is a, c, g, or t
  misc_feature (3471)..(3472): n is a, c, g, or t
  misc_feature (3475)..(3476): n is a, c, g, or t
  misc_feature (3478)..(3478): n is a, c, g, or t
  misc_feature (3483)..(3485): n is a, c, g, or t
  misc_feature (3491)..(3492): n is a, c, g, or t
  misc_feature (3494)..(3497): n is a, c, g, or t
  misc_feature (3499)..(3500): n is a, c, g, or t
  misc_feature (3504)..(3504): n is a, c, g, or t
  misc_feature (3510)..(3510): n is a, c, g, or t
  misc_feature (3512)..(3512): n is a, c, g, or t
  misc_feature (3515)..(3515): n is a, c, g, or t
  misc_feature (3517)..(3517): n is a, c, g, or t
  misc_feature (3521)..(3521): n is a, c, g, or t
  misc_feature (3525)..(3525): n is a, c, g, or t
  misc_feature (3530)..(3530): n is a, c, g, or t
  misc_feature (3532)..(3533): n is a, c, g, or t
  misc_feature (3535)..(3539): n is a, c, g, or t
  misc_feature (3541)..(3541): n is a, c, g, or t
  misc_feature (3543)..(3545): n is a, c, g, or t
  misc_feature (3549)..(3549): n is a, c, g, or t
  misc_feature (3557)..(3557): n is a, c, g, or t
  misc_feature (3561)..(3562): n is a, c, g, or t
  misc_feature (3564)..(3565): n is a, c, g, or t
  misc_feature (3571)..(3573): n is a, c, g, or t
  misc_feature (3579)..(3581): n is a, c, g, or t
  misc_feature (3584)..(3585): n is a, c, g, or t
  misc_feature (3588)..(3589): n is a, c, g, or t
  misc_feature (3593)..(3593): n is a, c, g, or t
  misc_feature (3596)..(3596): n is a, c, g, or t
  misc_feature (3600)..(3601): n is a, c, g, or t
  misc_feature (3607)..(3607): n is a, c, g, or t
  misc_feature (3618)..(3620): n is a, c, g, or t
  misc_feature (3624)..(3625): n is a, c, g, or t
  misc_feature (3635)..(3635): n is a, c, g, or t
  misc_feature (3639)..(3639): n is a, c, g, or t
  misc_feature (3643)..(3643): n is a, c, g, or t
  misc_feature (3647)..(3648): n is a, c, g, or t
  misc_feature (3651)..(3651): n is a, c, g, or t
  misc_feature (3658)..(3658): n is a, c, g, or t
  misc_feature (3664)..(3665): n is a, c, g, or t
  misc_feature (3669)..(3669): n is a, c, g, or t
  misc_feature (3673)..(3673): n is a, c, g, or t
  misc_feature (3675)..(3675): n is a, c, g, or t
  misc_feature (3679)..(3679): n is a, c, g, or t
  misc_feature (3683)..(3684): n is a, c, g, or t
  misc_feature (3690)..(3693): n is a, c, g, or t
  misc_feature (3695)..(3697): n is a, c, g, or t
  misc_feature (3699)..(3699): n is a, c, g, or t
  misc_feature (3704)..(3704): n is a, c, g, or t
  misc_feature (3706)..(3706): n is a, c, g, or t
  misc_feature (3710)..(3710): n is a, c, g, or t
  misc_feature (3712)..(3718): n is a, c, g, or t
  misc_feature (3720)..(3722): n is a, c, g, or t
  misc_feature (3724)..(3724): n is a, c, g, or t
  misc_feature (3726)..(3728): n is a, c, g, or t
  misc_feature (3730)..(3730): n is a, c, g, or t
  misc_feature (3732)..(3732): n is a, c, g, or t
  misc_feature (3734)..(3736): n is a, c, g, or t
  misc_feature (3740)..(3740): n is a, c, g, or t
  misc_feature (3746)..(3747): n is a, c, g, or t
  misc_feature (3751)..(3751): n is a, c, g, or t
  misc_feature (3758)..(3760): n is a, c, g, or t
  misc_feature (3766)..(3766): n is a, c, g, or t
  misc_feature (3772)..(3775): n is a, c, g, or t
  misc_feature (3777)..(3778): n is a, c, g, or t
  misc_feature (3782)..(3782): n is a, c, g, or t
  misc_feature (3785)..(3785): n is a, c, g, or t
  misc_feature (3787)..(3787): n is a, c, g, or t
  misc_feature (3790)..(3790): n is a, c, g, or t
  misc_feature (3796)..(3797): n is a, c, g, or t
  misc_feature (3803)..(3803): n is a, c, g, or t
  misc_feature (3805)..(3805): n is a, c, g, or t
  misc_feature (3808)..(3808): n is a, c, g, or t
  misc_feature (3813)..(3815): n is a, c, g, or t
  misc_feature (3817)..(3822): n is a, c, g, or t
  misc_feature (3824)..(3824): n is a, c, g, or t
  misc_feature (3826)..(3827): n is a, c, g, or t
  misc_feature (3829)..(3829): n is a, c, g, or t
  misc_feature (3836)..(3836): n is a, c, g, or t
  misc_feature (3840)..(3841): n is a, c, g, or t
  misc_feature (3844)..(3845): n is a, c, g, or t
  misc_feature (3847)..(3847): n is a, c, g, or t
  misc_feature (3853)..(3854): n is a, c, g, or t
  misc_feature (3856)..(3856): n is a, c, g, or t
  misc_feature (3859)..(3859): n is a, c, g, or t
  misc_feature (3861)..(3863): n is a, c, g, or t
  misc_feature (3866)..(3866): n is a, c, g, or t
  misc_feature (3868)..(3868): n is a, c, g, or t
  misc_feature (3870)..(3871): n is a, c, g, or t
  misc_feature (3877)..(3877): n is a, c, g, or t
  misc_feature (3881)..(3881): n is a, c, g, or t
  misc_feature (3885)..(3885): n is a, c, g, or t
  misc_feature (3892)..(3892): n is a, c, g, or t
  misc_feature (3895)..(3895): n is a, c, g, or t
  misc_feature (3897)..(3898): n is a, c, g, or t
  misc_feature (3907)..(3908): n is a, c, g, or t
  misc_feature (3910)..(3910): n is a, c, g, or t
  misc_feature (3913)..(3913): n is a, c, g, or t
  misc_feature (3916)..(3916): n is a, c, g, or t
  misc_feature (3923)..(3929): n is a, c, g, or t
  misc_feature (3932)..(3935): n is a, c, g, or t
  misc_feature (3937)..(3937): n is a, c, g, or t
  misc_feature (3942)..(3943): n is a, c, g, or t
  misc_feature (3947)..(3947): n is a, c, g, or t
  misc_feature (3951)..(3952): n is a, c, g, or t
  misc_feature (3954)..(3954): n is a, c, g, or t
  misc_feature (3958)..(3959): n is a, c, g, or t
  misc_feature (3961)..(3966): n is a, c, g, or t
  misc_feature (3969)..(3970): n is a, c, g, or t
  misc_feature (3973)..(3974): n is a, c, g, or t
  misc_feature (3980)..(3980): n is a, c, g, or t
  misc_feature (3985)..(3985): n is a, c, g, or t
  misc_feature (3989)..(3990): n is a, c, g, or t
  misc_feature (3992)..(3993): n is a, c, g, or t
agaaggataagattcaaaagaagaaggcataaaatccaaaatttccttcttttttgaattaactgtaacattacttgatggtgtaatagaagaataattttgattattaattatcggtgaattattattaccagtgttattaatattattgcttttattactattaacaaaattttgaggtatagatgtcatcattttaagatcagtgggaccattaccaaatatatcaaaatcttcttcttctgtttctaaatgtgtttttgtttttgtgttaaaattataattttgattttgaattctattttgatttgtattacgatagtcattattttgatttgttgaaatgaaatttgtatttattagttcaatttgatcttgttgaaaactatttggggaattatccataggacttaaattaatagaatcataaatactataatgttcattttgggtattaggattatttctcatgtctactgtagtatttggatgaagtggctcaactggaggggaatcaaaaatttcttgggatctctgttctgaatttattttagaatctgatatttcctctaaattttcattcaataatactggctctacccaagatgcataataacgtacaacattaggatgacttctaaattttgcaaaatttttaacctcacgaataactcttaaatcatctaacgttaatgtggatttcatattttcaacgatttttttatcatctgatttataataatcattttcctttccctctgaatttaattcattacatccagaactgcaaccactatcatattcttcatttaatttatcttttgtatcaattaaattcatacattctatataatcctgaggatgacattgtaatggaatctttttaattgcatatatttgttcatctaatttattttttgctaaataaacagatccaaaaccacctttaccaatgcattttatttctattatcaaaatataaaaaaaatagatattgttaaatttatttttaatgttaaaactttttaataatacaaataatatatttttttttaaattttttttttacctttaaattcagtttgataacgagatttggaccactccatttcggttaattgtctagtaacatcacgtacactgaccaagtaaattccagtgatatttgttgaacttgtacttatcacatctttattataatagcatgataacgatacatctatctcaagatcatttttctgatcacgtaatgattttcttacacctgtagttataacagacttttcaatatactttgataacgtttcttttttatcatttttaacaattcgaatcgattatattttatttaaaatcaattattgaattattattattagaaatattattaataactattatgaatttaaaatttaaaataattatttcatttcactaaatagtataccttctttatctaaatttagaattggtattaattgtgatatgtttatatgtcctattaattcatctctcgaatattcaaaaagttcctcagcataagaatttacctcaataattactccattttcatctaaaataaataatggatcaacaagactatctaaaatagcttgtgcattagtcgatgaccaaagattttttatagatgattcagatgattcaattagtttttgtgattgaacttgcattttattattattactcttatttaatattatttttacttccaacaacaattacaaatttttattcaaaaatacaatacttttaagtattataatatgatatctattttcaaatttcaatttttaatttttctattttttttggaaatttttttatactattactttcttttcttttttaaataacaaaataaatattcactattatttgtattaatgtatttgtaaaataacattcaatttttggaaatgaaatttaattttcaatttagcattattttatctttttttttttttctgtatttatttatctatttccaaaactaaaaaaataaaataaaataaaataaaataagatatttttctctaatatactttttatgcaattatataaagatatataaaaaattcaattctcgtcttttatatattgtattggttaattataattattttcttaataaaaatatttagatgttttattgaatatgattttgaataaaatattttttttttctttggtctatttttttttaataaaaaagatttttgacggaagttaaattaactatatatgattataatataaaaaaaatatttatataaaatatataataaattaataagaaaaaggttaaaaaaaataggatattaatatacttttttgcttttatgtttattaattatatatcaaataaattattataaaacaaatttaaaaaatatattttaataaattaaattttatataaatactgtatattaaatatactttaaaaaaaataaattaattacaagttatgtgtgatttttttttctccttttatgagtttctttttgatacttttttttttttttttnnntntttaaatttttnanttnnnntnnttnnntnnnttnnnnttntntnnntnntttnntntttaaantntttantttttaaantnannnttnanaaatnnnaaannttnntnnnttttttnanaaaaaannntanttnntnnnaaatnnnanannnntnannnannanatnatnnnnaatnaannnaantnaannaaannnnnnnnnnnaaattnatnntnnttntnannnnttttnntttannnanaanntttnntttnantaannatnnntnnttnanntttnnnnttnnnnnntnnannnnntttntttaanannanttanttnntnnaaannnnntnantnnaannnantnnnaantttnnnnantnntnnnnnaanantttttttantnnnnnnntnnnnntntttntnntnantnntnantnantnnnnntnaannnaannnnnntnnnnnnnaaantnnnaaanntnntnnntttnnnntnannngnnttttntntnatnnannattnnnttnantnntttnntncnttntnatnnnaaaanttttncnttttnttnnnaannantnaaaannnantnnnantnannanaaannnnnannnannnnttnaaannnaaannatnnanannnttngnaaaaaattnntnatnannaatnnnnaanaaaaaaaanttnntnatnaaaaaaaanaaannaanaanggnaaaaaaaanaaaaaaaaaaanaaaanaaaanaaaaaaaaaaaanaaantnaaaaaaanaaaaaaaaaaaatnattnaaaaaaaannatnaannaannnnnnanaaannnaaannaaanaanataananaanatnaaantnaaanatnannanntnntaatttanatnaatnnnntttnttaaaannnttnntttnntnnnatnntnnttnnttnntnttttnnnaaattnntnnnncnntttntttttnantcnantttntttnttttnannannnnnantnnnttanttaaattntttnntnntttaannntttaannnttnnttnntttnttnattnntttttnttttttttttnnntttnnttttttttcnttantttncttnnttntaaaaantttttnnaaantatntnaaantttnntaaaannnnannntnttatntnattnannnnnnntnnnanannntnantnnnaaanaaaatnntttnaattttnnnaaatantttaannnnanntaantantnaanaaaaannaaaaanantanaatannntnnnnnnanannanattatantatnnttnnanaatatnntnaanannnaantnannaaaatnaatnaaantaaaaanttnanntaattttanntnaanttnttttaannnnnnnaannnntntaaannaaanaaannanaaannannnnnnaannaannaaaaanataanaaannannaaaaaaa

SEQ ID NO: 1190 - DNA, 4000 bp, Escherichia coli
  misc_feature (14)..(14): n is a, c, g, or t
  misc_feature (20)..(21): n is a, c, g, or t
  misc_feature (26)..(26): n is a, c, g, or t
  misc_feature (28)..(29): n is a, c, g, or t
  misc_feature (32)..(32): n is a, c, g, or t
  misc_feature (37)..(37): n is a, c, g, or t
  misc_feature (40)..(41): n is a, c, g, or t
  misc_feature (43)..(43): n is a, c, g, or t
  misc_feature (48)..(48): n is a, c, g, or t
  misc_feature (54)..(55): n is a, c, g, or t
  misc_feature (57)..(59): n is a, c, g, or t
  misc_feature (68)..(69): n is a, c, g, or t
  misc_feature (77)..(77): n is a, c, g, or t
  misc_feature (82)..(83): n is a, c, g, or t
  misc_feature (85)..(85): n is a, c, g, or t
  misc_feature (89)..(89): n is a, c, g, or t
  misc_feature (103)..(103): n is a, c, g, or t
  misc_feature (109)..(109): n is a, c, g, or t
  misc_feature (111)..(111): n is a, c, g, or t
  misc_feature (114)..(115): n is a, c, g, or t
  misc_feature (118)..(118): n is a, c, g, or t
  misc_feature (120)..(123): n is a, c, g, or t
  misc_feature (125)..(125): n is a, c, g, or t
  misc_feature (128)..(130): n is a, c, g, or t
  misc_feature (132)..(133): n is a, c, g, or t
  misc_feature (135)..(136): n is a, c, g, or t
  misc_feature (138)..(138): n is a, c, g, or t
  misc_feature (140)..(144): n is a, c, g, or t
  misc_feature (146)..(150): n is a, c, g, or t
  misc_feature (155)..(156): n is a, c, g, or t
  misc_feature (158)..(160): n is a, c, g, or t
  misc_feature (162)..(165): n is a, c, g, or t
  misc_feature (170)..(172): n is a, c, g, or t
  misc_feature (175)..(177): n is a, c, g, or t
  misc_feature (180)..(180): n is a, c, g, or t
  misc_feature (182)..(182): n is a, c, g, or t
  misc_feature (184)..(185): n is a, c, g, or t
  misc_feature (187)..(188): n is a, c, g, or t
  misc_feature (193)..(195): n is a, c, g, or t
  misc_feature (199)..(199): n is a, c, g, or t
  misc_feature (203)..(205): n is a, c, g, or t
  misc_feature (208)..(208): n is a, c, g, or t
  misc_feature (211)..(211): n is a, c, g, or t
  misc_feature (213)..(214): n is a, c, g, or t
  misc_feature (216)..(216): n is a, c, g, or t
  misc_feature (218)..(219): n is a, c, g, or t
  misc_feature (221)..(222): n is a, c, g, or t
  misc_feature (225)..(225): n is a, c, g, or t
  misc_feature (227)..(228): n is a, c, g, or t
  misc_feature (230)..(230): n is a, c, g, or t
  misc_feature (233)..(237): n is a, c, g, or t
  misc_feature (240)..(240): n is a, c, g, or t
  misc_feature (242)..(242): n is a, c, g, or t
  misc_feature (245)..(247): n is a, c, g, or t
  misc_feature (249)..(249): n is a, c, g, or t
  misc_feature (251)..(251): n is a, c, g, or t
  misc_feature (253)..(257): n is a, c, g, or t
  misc_feature (259)..(259): n is a, c, g, or t
  misc_feature (261)..(267): n is a, c, g, or t
  misc_feature (269)..(270): n is a, c, g, or t
  misc_feature (272)..(283): n is a, c, g, or t
  misc_feature (287)..(287): n is a, c, g, or t
  misc_feature (289)..(289): n is a, c, g, or t
  misc_feature (293)..(297): n is a, c, g, or t
  misc_feature (299)..(299): n is a, c, g, or t
  misc_feature (301)..(302): n is a, c, g, or t
  misc_feature (304)..(304): n is a, c, g, or t
  misc_feature (307)..(311): n is a, c, g, or t
  misc_feature (313)..(313): n is a, c, g, or t
  misc_feature (315)..(321): n is a, c, g, or t
  misc_feature (323)..(323): n is a, c, g, or t
  misc_feature (325)..(327): n is a, c, g, or t
  misc_feature (329)..(330): n is a, c, g, or t
  misc_feature (334)..(342): n is a, c, g, or t
  misc_feature (348)..(348): n is a, c, g, or t
  misc_feature (350)..(353): n is a, c, g, or t
  misc_feature (355)..(355): n is a, c, g, or t
  misc_feature (357)..(359): n is a, c, g, or t
  misc_feature (362)..(362): n is a, c, g, or t
  misc_feature (364)..(366): n is a, c, g, or t
  misc_feature (370)..(370): n is a, c, g, or t
  misc_feature (372)..(372): n is a, c, g, or t
  misc_feature (374)..(374): n is a, c, g, or t
  misc_feature (376)..(379): n is a, c, g, or t
  misc_feature (382)..(384): n is a, c, g, or t
  misc_feature (387)..(390): n is a, c, g, or t
  misc_feature (392)..(393): n is a, c, g, or t
  misc_feature (395)..(407): n is a, c, g, or t
  misc_feature (409)..(415): n is a, c, g, or t
  misc_feature (417)..(418): n is a, c, g, or t
  misc_feature (420)..(424): n is a, c, g, or t
  misc_feature (427)..(427): n is a, c, g, or t
  misc_feature (430)..(431): n is a, c, g, or t
  misc_feature (434)..(434): n is a, c, g, or t
  misc_feature (436)..(437): n is a, c, g, or t
  misc_feature (439)..(441): n is a, c, g, or t
  misc_feature (445)..(445): n is a, c, g, or t
  misc_feature (447)..(448): n is a, c, g, or t
  misc_feature (451)..(452): n is a, c, g, or t
  misc_feature (456)..(456): n is a, c, g, or t
  misc_feature (459)..(459): n is a, c, g, or t
  misc_feature (461)..(462): n is a, c, g, or t
  misc_feature (464)..(466): n is a, c, g, or t
  misc_feature (468)..(469): n is a, c, g, or t
  misc_feature (472)..(473): n is a, c, g, or t
  misc_feature (476)..(476): n is a, c, g, or t
  misc_feature (478)..(482): n is a, c, g, or t
  misc_feature (485)..(485): n is a, c, g, or t
  misc_feature (487)..(487): n is a, c, g, or t
  misc_feature (489)..(491): n is a, c, g, or t
  misc_feature (494)..(496): n is a, c, g, or t
  misc_feature (500)..(502): n is a, c, g, or t
  misc_feature (508)..(526): n is a, c, g, or t
  misc_feature (529)..(531): n is a, c, g, or t
  misc_feature (534)..(535): n is a, c, g, or t
  misc_feature (539)..(543): n is a, c, g, or t
  misc_feature (545)..(552): n is a, c, g, or t
  misc_feature (554)..(559): n is a, c, g, or t
  misc_feature (561)..(562): n is a, c, g, or t
  misc_feature (564)..(566): n is a, c, g, or t
  misc_feature (569)..(569): n is a, c, g, or t
  misc_feature (573)..(574): n is a, c, g, or t
  misc_feature (577)..(578): n is a, c, g, or t
  misc_feature (582)..(583): n is a, c, g, or t
  misc_feature (585)..(586): n is a, c, g, or t
  misc_feature (592)..(592): n is a, c, g, or t
  misc_feature (596)..(597): n is a, c, g, or t
  misc_feature (599)..(599): n is a, c, g, or t
  misc_feature (603)..(603): n is a, c, g, or t
  misc_feature (605)..(605): n is a, c, g, or t
  misc_feature (609)..(611): n is a, c, g, or t
  misc_feature (613)..(613): n is a, c, g, or t
  misc_feature (617)..(618): n is a, c, g, or t
  misc_feature (620)..(620): n is a, c, g, or t
  misc_feature (622)..(623): n is a, c, g, or t
  misc_feature (625)..(630): n is a, c, g, or t
  misc_feature (633)..(634): n is a, c, g, or t
  misc_feature (637)..(642): n is a, c, g, or t
  misc_feature (644)..(648): n is a, c, g, or t
  misc_feature (650)..(650): n is a, c, g, or t
  misc_feature (654)..(654): n is a, c, g, or t
  misc_feature (656)..(657): n is a, c, g, or t
  misc_feature (661)..(662): n is a, c, g, or t
  misc_feature (665)..(665): n is a, c, g, or t
  misc_feature (668)..(671): n is a, c, g, or t
  misc_feature (673)..(674): n is a, c, g, or t
  misc_feature (677)..(679): n is a, c, g, or t
  misc_feature (682)..(686): n is a, c, g, or t
  misc_feature (689)..(691): n is a, c, g, or t
  misc_feature (693)..(696): n is a, c, g, or t
  misc_feature (698)..(699): n is a, c, g, or t
  misc_feature (701)..(702): n is a, c, g, or t
  misc_feature (704)..(705): n is a, c, g, or t
  misc_feature (707)..(707): n is a, c, g, or t
  misc_feature (709)..(709): n is a, c, g, or t
  misc_feature (711)..(711): n is a, c, g, or t
  misc_feature (714)..(715): n is a, c, g, or t
  misc_feature (717)..(717): n is a, c, g, or t
  misc_feature (719)..(719): n is a, c, g, or t
  misc_feature (721)..(724): n is a, c, g, or t
  misc_feature (726)..(726): n is a, c, g, or t
  misc_feature (730)..(734): n is a, c, g, or t
  misc_feature (738)..(739): n is a, c, g, or t
  misc_feature (742)..(742): n is a, c, g, or t
  misc_feature (744)..(746): n is a, c, g, or t
  misc_feature (750)..(751): n is a, c, g, or t
  misc_feature (753)..(754): n is a, c, g, or t
  misc_feature (756)..(756): n is a, c, g, or t
  misc_feature (758)..(761): n is a, c, g, or t
  misc_feature (764)..(770): n is a, c, g, or t
  misc_feature (774)..(774): n is a, c, g, or t
  misc_feature (777)..(777): n is a, c, g, or t
  misc_feature (779)..(779): n is a, c, g, or t
  misc_feature (781)..(781): n is a, c, g, or t
  misc_feature (783)..(785): n is a, c, g, or t
  misc_feature (787)..(787): n is a, c, g, or t
  misc_feature (789)..(789): n is a, c, g, or t
  misc_feature (791)..(792): n is a, c, g, or t
  misc_feature (795)..(800): n is a, c, g, or t
  misc_feature (802)..(805): n is a, c, g, or t
  misc_feature (807)..(807): n is a, c, g, or t
  misc_feature (809)..(813): n is a, c, g, or t
  misc_feature (817)..(817): n is a, c, g, or t
  misc_feature (821)..(823): n is a, c, g, or t
  misc_feature (827)..(828): n is a, c, g, or t
  misc_feature (831)..(833): n is a, c, g, or t
  misc_feature (835)..(836): n is a, c, g, or t
  misc_feature (841)..(844): n is a, c, g, or t
  misc_feature (846)..(848): n is a, c, g, or t
  misc_feature (850)..(853): n is a, c, g, or t
  misc_feature (856)..(856): n is a, c, g, or t
  misc_feature (858)..(859): n is a, c, g, or t
  misc_feature (861)..(861): n is a, c, g, or t
  misc_feature (863)..(863): n is a, c, g, or t
  misc_feature (866)..(870): n is a, c, g, or t
  misc_feature (874)..(874): n is a, c, g, or t
  misc_feature (879)..(881): n is a, c, g, or t
  misc_feature (883)..(883): n is a, c, g, or t
  misc_feature (885)..(886): n is a, c, g, or t
  misc_feature (889)..(893): n is a, c, g, or t
  misc_feature (896)..(896): n is a, c, g, or t
  misc_feature (899)..(900): n is a, c, g, or t
  misc_feature (903)..(903): n is a, c, g, or t
  misc_feature (906)..(906): n is a, c, g, or t
  misc_feature (910)..(912): n is a, c, g, or t
  misc_feature (914)..(916): n is a, c, g, or t
  misc_feature (918)..(919): n is a, c, g, or t
  misc_feature (924)..(926): n is a, c, g, or t
  misc_feature (929)..(935): n is a, c, g, or t
  misc_feature (939)..(939): n is a, c, g, or t
  misc_feature (942)..(942): n is a, c, g, or t
  misc_feature (945)..(946): n is a, c, g, or t
  misc_feature (949)..(950): n is a, c, g, or t
  misc_feature (952)..(952): n is a, c, g, or t
  misc_feature (954)..(955): n is a, c, g, or t
  misc_feature (959)..(963): n is a, c, g, or t
  misc_feature (966)..(966): n is a, c, g, or t
  misc_feature (969)..(969): n is a, c, g, or t
  misc_feature (971)..(971): n is a, c, g, or t
  misc_feature (974)..(978): n is a, c, g, or t
  misc_feature (982)..(982): n is a, c, g, or t
  misc_feature (985)..(985): n is a, c, g, or t
  misc_feature (988)..(988): n is a, c, g, or t
  misc_feature (990)..(990): n is a, c, g, or t
  misc_feature (992)..(1001): n is a, c, g, or t
  misc_feature (1003)..(1008): n is a, c, g, or t
  misc_feature (1010)..(1010): n is a, c, g, or t
  misc_feature (1013)..(1018): n is a, c, g, or t
  misc_feature (1020)..(1021): n is a, c, g, or t
  misc_feature (1023)..(1025): n is a, c, g, or t
  misc_feature (1028)..(1030): n is a, c, g, or t
  misc_feature (1033)..(1035): n is a, c, g, or t
  misc_feature (1038)..(1040): n is a, c, g, or t
  misc_feature (1042)..(1044): n is a, c, g, or t
  misc_feature (1046)..(1047): n is a, c, g, or t
  misc_feature (1050)..(1050): n is a, c, g, or t
  misc_feature (1052)..(1054): n is a, c, g, or t
  misc_feature (1056)..(1058): n is a, c, g, or t
  misc_feature (1060)..(1066): n is a, c, g, or t
  misc_feature (1068)..(1068): n is a, c, g, or t
  misc_feature (1070)..(1071): n is a, c, g, or t
  misc_feature (1074)..(1076): n is a, c, g, or t
  misc_feature (1080)..(1083): n is a, c, g, or t
  misc_feature (1085)..(1086): n is a, c, g, or t
  misc_feature (1088)..(1097): n is a, c, g, or t
  misc_feature (1099)..(1102): n is a, c, g, or t
  misc_feature (1104)..(1107): n is a, c, g, or t
  misc_feature (1109)..(1109): n is a, c, g, or t
  misc_feature (1111)..(1115): n is a, c, g, or t
  misc_feature (1117)..(1123): n is a, c, g, or t
  misc_feature (1125)..(1125): n is a, c, g, or t
  misc_feature (1127)..(1127): n is a, c, g, or t
  misc_feature (1129)..(1133): n is a, c, g, or t
  misc_feature (1138)..(1143): n is a, c, g, or t
  misc_feature (1145)..(1145): n is a, c, g, or t
  misc_feature (1147)..(1147): n is a, c, g, or t
  misc_feature (1150)..(1151): n is a, c, g, or t
  misc_feature (1153)..(1156): n is a, c, g, or t
  misc_feature (1158)..(1158): n is a, c, g, or t
  misc_feature (1160)..(1161): n is a, c, g, or t
  misc_feature (1164)..(1164): n is a, c, g, or t
  misc_feature (1166)..(1166): n is a, c, g, or t
  misc_feature (1168)..(1168): n is a, c, g, or t
  misc_feature (1171)..(1172): n is a, c, g, or t
  misc_feature (1175)..(1176): n is a, c, g, or t
  misc_feature (1180)..(1181): n is a, c, g, or t
  misc_feature (1184)..(1184): n is a, c, g, or t
  misc_feature (1186)..(1186): n is a, c, g, or t
  misc_feature (1188)..(1188): n is a, c, g, or t
  misc_feature (1191)..(1192): n is a, c, g, or t
  misc_feature (1194)..(1197): n is a, c, g, or t
  misc_feature (1201)..(1202): n is a, c, g, or t
  misc_feature (1204)..(1204): n is a, c, g, or t
  misc_feature (1206)..(1206): n is a, c, g, or t
  misc_feature (1211)..(1211): n is a, c, g, or t
  misc_feature (1213)..(1214): n is a, c, g, or t
  misc_feature (1216)..(1216): n is a, c, g, or t
  misc_feature (1218)..(1219): n is a, c, g, or t
  misc_feature (1221)..(1221): n is a, c, g, or t
  misc_feature (1229)..(1230): n is a, c, g, or t
  misc_feature (1232)..(1232): n is a, c, g, or t
  misc_feature (1234)..(1234): n is a, c, g, or t
  misc_feature (1237)..(1237): n is a, c, g, or t
  misc_feature (1242)..(1244): n is a, c, g, or t
  misc_feature (1247)..(1247): n is a, c, g, or t
  misc_feature (1251)..(1252): n is a, c, g, or t
  misc_feature (1255)..(1256): n is a, c, g, or t
  misc_feature (1258)..(1258): n is a, c, g, or t
  misc_feature (1260)..(1260): n is a, c, g, or t
  misc_feature (1264)..(1265): n is a, c, g, or t
  misc_feature (1269)..(1269): n is a, c, g, or t
  misc_feature (1271)..(1271): n is a, c, g, or t
  misc_feature (1274)..(1276): n is a, c, g, or t
  misc_feature (1280)..(1280): n is a, c, g, or t
  misc_feature (1282)..(1284): n is a, c, g, or t
  misc_feature (1286)..(1286): n is a, c, g, or t
  misc_feature (1288)..(1288): n is a, c, g, or t
  misc_feature (1290)..(1290): n is a, c, g, or t
  misc_feature (1294)..(1297): n is a, c, g, or t
  misc_feature (1299)..(1306): n is a, c, g, or t
  misc_feature (1349)..(1349): n is a, c, g, or t
  misc_feature (1548)..(1548): n is a, c, g, or t
  misc_feature (1819)..(1819): n is a, c, g, or t
  misc_feature (1822)..(1823): n is a, c, g, or t
  misc_feature (1987)..(1987): n is a, c, g, or t
  misc_feature (1989)..(1989): n is a, c, g, or t
  misc_feature (2017)..(2017): n is a, c, g, or t
  misc_feature (2027)..(2027): n is a, c, g, or t
  misc_feature (2065)..(2065): n is a, c, g, or t
  misc_feature (2724)..(2724): n is a, c, g, or t
  misc_feature (2833)..(2833): n is a, c, g, or t
  misc_feature (3139)..(3145): n is a, c, g, or t
  misc_feature (3149)..(3149): n is a, c, g, or t
  misc_feature (3153)..(3158): n is a, c, g, or t
  misc_feature (3167)..(3167): n is a, c, g, or t
  misc_feature (3174)..(3174): n is a, c, g, or t
  misc_feature (3181)..(3182): n is a, c, g, or t
  misc_feature (3184)..(3187): n is a, c, g, or t
  misc_feature (3189)..(3189): n is a, c, g, or t
  misc_feature (3192)..(3193): n is a, c, g, or t
  misc_feature (3195)..(3197): n is a, c, g, or t
  misc_feature (3201)..(3202): n is a, c, g, or t
  misc_feature (3208)..(3208): n is a, c, g, or t
  misc_feature (3214)..(3214): n is a, c, g, or t
  misc_feature (3218)..(3223): n is a, c, g, or t
  misc_feature (3228)..(3229): n is a, c, g, or t
  misc_feature (3233)..(3233): n is a, c, g, or t
  misc_feature (3238)..(3238): n is a, c, g, or t
  misc_feature (3244)..(3244): n is a, c, g, or t
  misc_feature (3247)..(3247): n is a, c, g, or t
  misc_feature (3249)..(3249): n is a, c, g, or t
  misc_feature (3253)..(3255): n is a, c, g, or t
  misc_feature (3259)..(3260): n is a, c, g, or t
  misc_feature (3263)..(3270): n is a, c, g, or t
  misc_feature (3272)..(3273): n is a, c, g, or t
  misc_feature (3277)..(3277): n is a, c, g, or t
  misc_feature (3279)..(3281): n is a, c, g, or t
  misc_feature (3283)..(3283): n is a, c, g, or t
  misc_feature (3285)..(3285): n is a, c, g, or t
  misc_feature (3289)..(3289): n is a, c, g, or t
  misc_feature (3292)..(3292): n is a, c, g, or t
  misc_feature (3296)..(3296): n is a, c, g, or t
  misc_feature (3298)..(3299): n is a, c, g, or t
  misc_feature (3302)..(3303): n is a, c, g, or t
  misc_feature (3307)..(3307): n is a, c, g, or t
  misc_feature (3310)..(3310): n is a, c, g, or t
  misc_feature (3314)..(3314): n is a, c, g, or t
  misc_feature (3319)..(3319): n is a, c, g, or t
  misc_feature (3324)..(3325): n is a, c, g, or t
  misc_feature (3328)..(3328): n is a, c, g, or t
  misc_feature (3334)..(3335): n is a, c, g, or t
  misc_feature (3339)..(3339): n is a, c, g, or t
  misc_feature (3347)..(3347): n is a, c, g, or t
  misc_feature (3349)..(3350): n is a, c, g, or t
  misc_feature (3352)..(3353): n is a, c, g, or t
  misc_feature (3356)..(3357): n is a, c, g, or t
  misc_feature (3360)..(3360): n is a, c, g, or t
  misc_feature (3362)..(3372): n is a, c, g, or t
  misc_feature (3383)..(3383): n is a, c, g, or t
  misc_feature (3385)..(3387): n is a, c, g, or t
  misc_feature (3391)..(3391): n is a, c, g, or t
  misc_feature (3400)..(3401): n is a, c, g, or t
  misc_feature (3405)..(3406): n is a, c, g, or t
  misc_feature (3410)..(3413): n is a, c, g, or t
  misc_feature (3420)..(3420): n is a, c, g, or t
  misc_feature (3423)..(3424): n is a, c, g, or t
  misc_feature (3427)..(3427): n is a, c, g, or t
  misc_feature (3429)..(3429): n is a, c, g, or t
  misc_feature (3434)..(3436): n is a, c, g, or t
  misc_feature (3438)..(3439): n is a, c, g, or t
  misc_feature (3441)..(3444): n is a, c, g, or t
  misc_feature (3446)..(3446): n is a, c, g, or t
  misc_feature (3448)..(3449): n is a, c, g, or t
  misc_feature (3451)..(3451): n is a, c, g, or t
  misc_feature (3453)..(3453): n is a, c, g, or t
  misc_feature (3455)..(3456): n is a, c, g, or t
  misc_feature (3460)..(3460): n is a, c, g, or t
  misc_feature (3463)..(3463): n is a, c, g, or t
  misc_feature (3465)..(3467): n is a, c, g, or t
  misc_feature (3471)..(3473): n is a, c, g, or t
  misc_feature (3475)..(3475): n is a, c, g, or t
  misc_feature (3477)..(3479): n is a, c, g, or t
  misc_feature (3482)..(3482): n is a, c, g, or t
  misc_feature (3484)..(3484): n is a, c, g, or t
  misc_feature (3486)..(3491): n is a, c, g, or t
  misc_feature (3497)..(3500): n is a, c, g, or t
  misc_feature (3503)..(3503): n is a, c, g, or t
  misc_feature (3505)..(3505): n is a, c, g, or t
  misc_feature (3507)..(3507): n is a, c, g, or t
  misc_feature (3512)..(3515): n is a, c, g, or t
  misc_feature (3524)..(3524): n is a, c, g, or t
  misc_feature (3526)..(3526): n is a, c, g, or t
  misc_feature (3528)..(3529): n is a, c, g, or t
  misc_feature (3531)..(3531): n is a, c, g, or t
  misc_feature (3533)..(3533): n is a, c, g, or t
  misc_feature (3538)..(3538): n is a, c, g, or t
  misc_feature (3541)..(3543): n is a, c, g, or t
  misc_feature (3545)..(3546): n is a, c, g, or t
  misc_feature (3550)..(3550): n is a, c, g, or t
  misc_feature (3553)..(3553): n is a, c, g, or t
  misc_feature (3559)..(3560): n is a, c, g, or t
  misc_feature (3569)..(3570): n is a, c, g, or t
  misc_feature (3572)..(3572): n is a, c, g, or t
  misc_feature (3574)..(3575): n is a, c, g, or t
  misc_feature (3579)..(3580): n is a, c, g, or t
  misc_feature (3590)..(3590): n is a, c, g, or t
  misc_feature (3595)..(3595): n is a, c, g, or t
  misc_feature (3598)..(3599): n is a, c, g, or t
  misc_feature (3603)..(3603): n is a, c, g, or t
  misc_feature (3606)..(3607): n is a, c, g, or t
  misc_feature (3609)..(3609): n is a, c, g, or t
  misc_feature (3614)..(3614): n is a, c, g, or t
  misc_feature (3616)..(3616): n is a, c, g, or t
  misc_feature (3618)..(3619): n is a, c, g, or t
  misc_feature (3622)..(3623): n is a, c, g, or t
  misc_feature (3628)..(3630): n is a, c, g, or t
  misc_feature (3633)..(3633): n is a, c, g, or t
  misc_feature (3636)..(3637): n is a, c, g, or t
  misc_feature (3639)..(3639): n is a, c, g, or t
  misc_feature (3648)..(3648): n is a, c, g, or t
  misc_feature (3650)..(3650): n is a, c, g, or t
  misc_feature (3652)..(3652): n is a, c, g, or t
  misc_feature (3659)..(3659): n is a, c, g, or t
  misc_feature (3661)..(3663): n is a, c, g, or t
  misc_feature (3666)..(3666): n is a, c, g, or t
  misc_feature (3669)..(3669): n is a, c, g, or t
  misc_feature (3672)..(3672): n is a, c, g, or t
  misc_feature (3674)..(3674): n is a, c, g, or t
  misc_feature (3676)..(3676): n is a, c, g, or t
  misc_feature (3678)..(3678): n is a, c, g, or t
  misc_feature (3682)..(3682): n is a, c, g, or t
  misc_feature (3684)..(3684): n is a, c, g, or t
  misc_feature (3687)..(3688): n is a, c, g, or t
  misc_feature (3690)..(3693): n is a, c, g, or t
  misc_feature (3700)..(3701): n is a, c, g, or t
  misc_feature (3704)..(3705): n is a, c, g, or t
  misc_feature (3707)..(3707): n is a, c, g, or t
  misc_feature (3709)..(3709): n is a, c, g, or t
  misc_feature (3711)..(3711): n is a, c, g, or t
  misc_feature (3713)..(3713): n is a, c, g, or t
  misc_feature (3715)..(3716): n is a, c, g, or t
  misc_feature (3720)..(3720): n is a, c, g, or t
  misc_feature (3725)..(3726): n is a, c, g, or t
  misc_feature (3730)..(3732): n is a, c, g, or t
  misc_feature (3735)..(3735): n is a, c, g, or t
  misc_feature (3737)..(3739): n is a, c, g, or t
  misc_feature (3741)..(3741): n is a, c, g, or t
  misc_feature (3743)..(3743): n is a, c, g, or t
  misc_feature (3747)..(3747): n is a, c, g, or t
  misc_feature (3750)..(3750): n is a, c, g, or t
  misc_feature (3756)..(3756): n is a, c, g, or t
  misc_feature (3762)..(3762): n is a, c, g, or t
  misc_feature (3768)..(3768): n is a, c, g, or t
  misc_feature (3774)..(3775): n is a, c, g, or t
  misc_feature (3777)..(3777): n is a, c, g, or t
  misc_feature (3783)..(3783): n is a, c, g, or t
  misc_feature (3790)..(3791): n is a, c, g, or t
  misc_feature (3793)..(3794): n is a, c, g, or t
  misc_feature (3797)..(3798): n is a, c, g, or t
  misc_feature (3800)..(3801): n is a, c, g, or t
  misc_feature (3803)..(3803): n is a, c, g, or t
  misc_feature (3805)..(3805): n is a, c, g, or t
  misc_feature (3809)..(3810): n is a, c, g, or t
  misc_feature (3812)..(3812): n is a, c, g, or t
  misc_feature (3817)..(3817): n is a, c, g, or t
  misc_feature (3820)..(3821): n is a, c, g, or t
  misc_feature (3823)..(3823): n is a, c, g, or t
  misc_feature (3826)..(3826): n is a, c, g, or t
  misc_feature (3829)..(3829): n is a, c, g, or t
  misc_feature (3831)..(3832): n is a, c, g, or t
  misc_feature (3837)..(3837): n is a, c, g, or t
  misc_feature (3843)..(3844): n is a, c, g, or t
  misc_feature (3848)..(3849): n is a, c, g, or t
  misc_feature (3852)..(3852): n is a, c, g, or t
  misc_feature (3854)..(3856): n is a, c, g, or t
  misc_feature (3859)..(3859): n is a, c, g, or t
  misc_feature (3862)..(3864): n is a, c, g, or t
  misc_feature (3866)..(3867): n is a, c, g, or t
  misc_feature (3871)..(3872): n is a, c, g, or t
  misc_feature (3876)..(3876): n is a, c, g, or t
  misc_feature (3881)..(3884): n is a, c, g, or t
  misc_feature (3888)..(3888): n is a, c, g, or t
  misc_feature (3891)..(3895): n is a, c, g, or t
  misc_feature (3897)..(3900): n is a, c, g, or t
  misc_feature (3903)..(3903): n is a, c, g, or t
  misc_feature (3905)..(3908): n is a, c, g, or t
  misc_feature (3911)..(3915): n is a, c, g, or t
  misc_feature (3918)..(3923): n is a, c, g, or t
  misc_feature (3925)..(3925): n is a, c, g, or t
  misc_feature (3927)..(3927): n is a, c, g, or t
  misc_feature (3929)..(3929): n is a, c, g, or t
  misc_feature (3932)..(3932): n is a, c, g, or t
  misc_feature (3934)..(3934): n is a, c, g, or t
  misc_feature (3940)..(3940): n is a, c, g, or t
  misc_feature (3943)..(3943): n is a, c, g, or t
  misc_feature (3946)..(3946): n is a, c, g, or t
  misc_feature (3950)..(3952): n is a, c, g, or t
  misc_feature (3954)..(3956): n is a, c, g, or t
  misc_feature (3958)..(3958): n is a, c, g, or t
  misc_feature (3960)..(3961): n is a, c, g, or t
  misc_feature (3963)..(3963): n is a, c, g, or t
  misc_feature (3965)..(3968): n is a, c, g, or t
  misc_feature (3971)..(3975): n is a, c, g, or t
  misc_feature (3977)..(3977): n is a, c, g, or t
  misc_feature (3979)..(3979): n is a, c, g, or t
  misc_feature (3984)..(3988): n is a, c, g, or t
  misc_feature (3991)..(3991): n is a, c, g, or t
  misc_feature (3994)..(4000): n is a, c, g, or t
ttcattttcatatntaatannaaagntnnacnattgnaannantttgntgattnnannnaaaacgaannagcaaaangtttnntncaanttcatatataatangaaaantnaannaanannnnantgnnntnnanntnannnnnannnnnaaatnnannnannnnatctnnnttnnnatntntnntnnaattnnnaggnaaannnaanagntnnanannannaangnnanaannnnnaananaannnantnannnnntntnnnnnnnanntnnnnnnnnnnnnagananatannnnncnannanaannnnnanannnnnnnanannnannagtnnnnnnnnntctggntnnnnanannntcnannnaaanananannnnaannnaannnnannannnnnnnnnnnnntnnnnnnntnnannnnnatntanntantnnannnaatnannaannaaanganannannnannaannaanannnnnttngntnnnaannnaatnnncaaaannnnnnnnnnnnnnnnnnntannntannaaannnnntnnnnnnnnannnnnnanntnnntcnatannaanngaannannaaaatntttnntncacntncatnnntnatannananngnnnnnnttnnaannnnnnannnnntncganannaaannaancannnnanngtnnnctnnnnnttnnngnnnnanntnnannantntntanntngntnnnncngatnnnnnattnnttntnnngatnngnntngnnnntgnnnnnnnttgnttntngngnnngntntnntgnnnnnntnnnngntnnnnnagtntgannntgtnntannnanntgttnnnnannntnnnntananngnanatnnnnnaaanaaaannntnannaannnnnttngtnnacnttncaannnannntnnatatnnnatnnnnnnnaaanacnaannaannanannaaannnnnaanatnanaannnnnaaanaantgnangnnnnnnnnnntnnnnnnanttnnnnnnannannnatnnntannnatnnntnnntnnttntnnntnnntnnnnnnntntnnatnnnttgnnnntnnannnnnnnnnnannnntnnnntnannnnngnnnnnnntntntnnnnntgatnnnnnntngnttnntnnnntntnnatnananaannaanntatnnatntntntanntnnnnatanntntntaaanannantnntnataatganntnanttnatttnnnttnttgnnaannananatgnntatntntannntttntnnntntntntatnnnntnnnnnnnnataacgaagctttccgattgatcttgtcggtggctttcctttntcttgaagattaagccatgcatgtctaagtatgaactggtttaaggtgaaactgcgtacggctcattacatcagctataactttctttgatcataaattctaaatggaataaccgaggaaaagcctgggctaatacatgcgacaattccggtagcaatatcggaatgcttttattagatcaaaaccttctagttctttnaccggaactgtttgttggtgactctaaataactttgtgttgatcgtatgacctttgtgtcgacgacatatctttcaagtgtctgacttatcaactttagacggtacattatatgtctaccgtggttgtaacgagtacagagaatcagggtttggttctggagaggccgcctgagaaacggcgaccacttccaaggaaggcagcaggcgcgcaaattacccactctcaaaacgaggaggtagtgaagagaaataacgatgttagtctattanagnntgacaatcggaatgggaacactgtaaacaggttatcgattaacaattggagggcaagtctggtgccagcagccgcggtaattccagctccaataaggaaaactaaagttgctgtgtttaaaaagctcgtagttgaatttcgggtatttgttgctagctggtctnantggccatgttggttaacagatcctcatntgctggacgnctggcgatgatctttatcggttgtcgtcagttgccagnacgtttactttgagaaaattagagtgctaaaagcaggctcacgcctatatatattgcatggaataatgaaataagatctcgattttatttcgttggttttagaaattgagataatgattaataggatcagaggggggcgtacgtactgtggtgtgagaggtgaaattcttggatcgccacaggacgaacagcagcgaaggcgttcgccaagaatgttttcattaatcaagaacgaaagtttgaggttcgaagacgattagataccgtcctagttcaaaccataaacgttgccaactgtcttttagatgcggttatttatatgactcatctggcggatctcgagaaatctaagtttttaggttccgggggaagtatggttgcaaagctgaaacttaaaagaattgacggaaggacacacaagaagtggagcctgtggcctaatttgactcaacacgggaaaccttactcggccaggacacttttaggattgacagattgagagctctttcttgattaggtgggtggtggtgcatggtcgttcgtagttcgtggagcgatttgtctgattaatttcgataacgaacgagactccggcttactaaatagtctaaagttcgaagggacttttcaagacttcttagcaggataagtggcacttnttaagccacacgaaatggagcaataacaggtctgtgatgcccttagatgtccgaggctgcacgcgcgctacactggagagttcagaatgtttcttcctacttcgacagnagtgggtaaccatgaaattctcttcgtgactgggatcggagcttgcaattattctccgtcaacgaggaattcctagtaagcactatttcatcagaatgtgctgattatgtccctgtcctttgtacacaccgcccgtcgctactaccgattgaatgttttagtgagatcttcggcttggttttccgagcggctctcgggtcgttcggtttatatcgaaaagatgctcaaactggatcatttagaggaagtaaaagtcgtaacaaggtattcgtaggtgaacctgcgtatggatcattaccgtttttnnnnnnnattnatcnnnnnnaaaataaanaaaaacntttaacnncnnnnantcnnannnattnntatatntgtttntgtnnnnnnattanntatntaaanaaatcntananatannntttnnttnnnnnnnntnnattnannnantnattnttntttntnnttnnattntgnatcnaatcnataanntanaattanntaanaataattntnnanngtnnatnannnnnnnnnnnattcgatgaanannncagnaaagtgcgnnaaannaatnnnnattgcanganncantnagcannnannannnnancnnancnannagcnaanannnttgnnnangnnnaantngnnnnnntcttgnnnntanancntcaannnnatttatttntnannantnaatgnatnnntnncaanttnaataannaattatttnncntnnaatnnatatataaanaatanatnnattngtnnangtatnanannaanntatannnaanatnnanatatttatntntntaaattntnnnaanatnagnantntntatnanatnntnnnnattgatnnatnnanananantnnattnaatannttannnatntnnntntntaanatnatatanatatcnttcttnactctnntntatatntatatanntnnaanntnnantnaaannanaatanttnntnaanttnannatatnaataannaaannaanannnatnaannnannttgnnttantaatnnnnaatnaannnnnannnnctnannnntgnnnnntgnnnnnntnantnttnanatgcantgnagnattnnngnnnantnntntnnnntgnnnnntngngtgannnnnttngannnnnnn

SEQ ID NO: 1191 - DNA, 4000 bp, Escherichia coli
  misc_feature (1)..(1): n is a, c, g, or t
  misc_feature (5)..(5): n is a, c, g, or t
  misc_feature (7)..(7): n is a, c, g, or t
  misc_feature (13)..(13): n is a, c, g, or t
  misc_feature (17)..(18): n is a, c, g, or t
  misc_feature (23)..(23): n is a, c, g, or t
  misc_feature (26)..(26): n is a, c, g, or t
  misc_feature (29)..(29): n is a, c, g, or t
  misc_feature (34)..(34): n is a, c, g, or t
  misc_feature (40)..(40): n is a, c, g, or t
  misc_feature (43)..(43): n is a, c, g, or t
  misc_feature (48)..(51): n is a, c, g, or t
  misc_feature (59)..(59): n is a, c, g, or t
  misc_feature (66)..(66): n is a, c, g, or t
  misc_feature (71)..(71): n is a, c, g, or t
  misc_feature (73)..(74): n is a, c, g, or t
  misc_feature (76)..(76): n is a, c, g, or t
  misc_feature (79)..(79): n is a, c, g, or t
  misc_feature (84)..(85): n is a, c, g, or t
  misc_feature (91)..(93): n is a, c, g, or t
  misc_feature (107)..(108): n is a, c, g, or t
  misc_feature (112)..(112): n is a, c, g, or t
  misc_feature (116)..(116): n is a, c, g, or t
  misc_feature (119)..(119): n is a, c, g, or t
  misc_feature (125)..(125): n is a, c, g, or t
  misc_feature (134)..(137): n is a, c, g, or t
  misc_feature (139)..(139): n is a, c, g, or t
  misc_feature (150)..(150): n is a, c, g, or t
  misc_feature (153)..(153): n is a, c, g, or t
  misc_feature (161)..(165): n is a, c, g, or t
  misc_feature (168)..(174): n is a, c, g, or t
  misc_feature (179)..(182): n is a, c, g, or t
  misc_feature (189)..(189): n is a, c, g, or t
  misc_feature (194)..(196): n is a, c, g, or t
  misc_feature (200)..(202): n is a, c, g, or t
  misc_feature (204)..(208): n is a, c, g, or t
  misc_feature (211)..(211): n is a, c, g, or t
  misc_feature (215)..(215): n is a, c, g, or t
  misc_feature (217)..(217): n is a, c, g, or t
  misc_feature (224)..(225): n is a, c, g, or t
  misc_feature (228)..(228): n is a, c, g, or t
  misc_feature (232)..(235): n is a, c, g, or t
  misc_feature (237)..(238): n is a, c, g, or t
  misc_feature (245)..(245): n is a, c, g, or t
  misc_feature (251)..(252): n is a, c, g, or t
  misc_feature (255)..(257): n is a, c, g, or t
  misc_feature (259)..(261): n is a, c, g, or t
  misc_feature (266)..(272): n is a, c, g, or t
  misc_feature (275)..(281): n is a, c, g, or t
  misc_feature (283)..(283): n is a, c, g, or t
  misc_feature (287)..(289): n is a, c, g, or t
  misc_feature (297)..(297): n is a, c, g, or t
  misc_feature (303)..(303): n is a, c, g, or t
  misc_feature (309)..(311): n is a, c, g, or t
  misc_feature (314)..(315): n is a, c, g, or t
  misc_feature (319)..(319): n is a, c, g, or t
  misc_feature (321)..(322): n is a, c, g, or t
  misc_feature (325)..(327): n is a, c, g, or t
  misc_feature (329)..(332): n is a, c, g, or t
  misc_feature (337)..(337): n is a, c, g, or t
  misc_feature (359)..(359): n is a, c, g, or t
  misc_feature (629)..(629): n is a, c, g, or t
  misc_feature (1039)..(1039): n is a, c, g, or t
  misc_feature (1538)..(1538): n is a, c, g, or t
  misc_feature (1739)..(1739): n is a, c, g, or t
  misc_feature (1748)..(1748): n is a, c, g, or t
  misc_feature (1752)..(1752): n is a, c, g, or t
  misc_feature (1804)..(1804): n is a, c, g, or t
  misc_feature (1835)..(1835): n is a, c, g, or t
  misc_feature (1931)..(1931): n is a, c, g, or t
  misc_feature (1988)..(1988): n is a, c, g, or t
  misc_feature (2741)..(2741): n is a, c, g, or t
  misc_feature (3359)..(3359): n is a, c, g, or t
  misc_feature (3697)..(3697): n is a, c, g, or t
  misc_feature (3920)..(3920): n is a, c, g, or t
  misc_feature (3929)..(3929): n is a, c, g, or t
  misc_feature (3968)..(3968): n is a, c, g, or t
naatntntttttntttnnaaaanagnttnctctnataccnttntttcnnnntttttagncgccaanaaggngnntnttngctgnnaaaagnnnttagaaaagaaggnnaaancttntantttaangaaaaaaannnntnaggaagaaagnttnttaaaggnnnnnaannnnnnnttttnnnnggttttnggttnnnaaannnannnnnttnccancnaaaaccnnttnaatnnnntnnaaaaagnaaattnnttnnntnnnaaaannnnnnnaannnnnnnanaaannntttaattnaaaaanaaaaannnagnnaacnannccnnnannnnttaanactcgagatctcgatggcatcnaactgaagagcaattgctatcaatgttgcaaaacaaagaggcttgttcgcaggacaactcgcaagagatgaacccttaggttcggtgttcagaaggcatttaacatatcatgttaaacaccgaaagcggcattttccacctcggaacttgtcgctttcatcctttgagggtatgccaactgccttgccacctcattcttctttcgtggcaatgctttttctcttaggatgcaaaccatttgtttctttcttttgattgaagcttaacccnttttcaaccactttttaattcgcttagaaagtgcgtttttgataatcgaaaaattacctctttgcaagttcaaccacaattcttctaagctgtatttcaccttaattgcagggttgttccatgcgttcatgcgataaattcggtctttatatgcagtgtgctcaatgatgtattgggggtgattgtcgaagctcttgggctcgaatcgttgcatggtgaacatctttctaatgccctttggcaaggtgttggttgagcctgtgaagtgcgttgagtcgcttgttacaccgatgttgttcaccaaattgaaggtaggcataatggctaagccgttgttgagcaacatagatgcccagaaaatagtttcgtagtgcgccttacctgtttgcttatggcggtggcacatggcnaagaaatcgttgcgaacattgcgctctttcaccaaattggtgagcaaagtaagcgtctctttattgtctaaaaaggtgtaatgttcgtcccattggtcgataactcgacgccaagaagcccatccccagatagagaatacagacgtaaagaaatagtcttgcgatatatcttcggtcttttcttcagcattaaagcctgcaatcatccacactcgagggtcgttttcatacttatcgagcatgcttttacaaaaatgaaagaatgccaatgagggcacatcatcgtcttctatcacgatgcatttgtctacaaacgagaacgcccaacgctgtgcaatgaactcagaagggtcgcaaccatagttcttttcttgataaagttggtgcacttcgcactcccaatcaatctcactcgcaatgcttctgcatgcttcaatgccctcaatgtcgcccgaatggcgtgctccgtcttgataaaggaacagctttgagggcttgnctttctgcacttgtgcaaacacttctttaaacttttcggggcgattaaagaagatgagtaatacggctacgtcgatttgtgagctttctttcatttcactttgaatctgattgttctatgcaaagataggaatgtttgcctaattatgaaaggtttttcagtctctttttgccccatctctattgaaatgaaaccgaagtngaatgcccntgcnaatcaacaagatagaaatgtcgaaataaaatcaatgcttttagcacgcaatntcaatgctattaaggtgcaaaagcaatgctnttaccatgcaaaaacatagcttttattttgtagttttatggcactctttttgtagatagataaaagtaaaggcacaaaaaaacaaaaatagtgatnttaatagatggtggaacaaataaaaagattaactttgcatagaactatatggtgctntgaaaataatcaatgcaccgccttttgcgtgccaaagtgcacaacggatatggcaaagccattgaggttgatttgcaaagagttagtaaacgaaacaagaaaacaaataaataaaatacgatttataaacaattatggataaacttagctatgctttaggccttggaataggtcgacaattggctcaaatgggtgccgaacaacttagtattgatgattttgcacaagcaattaaagatgttgtggcaggtggacaacttaaactagacgaggctgaagcacaagttatcgttcaagaattcttccaaaaacaagaagaaaagcaacgtgctgcagctgcagaaatgggtaaaaaagctaaagaagaaggcgagaaataccttgcagaaaacgcaaagaaagaaggagttgttactcttccaagtggcttgcaatatcttgttatcaaagaaggaaacggcaaacgccctaaagctaccgacaaagtgaagtgccattacgaaggaatgcttgttgatggaacactctttgacagctcagttcaacgtggtgaaccagctactttcccactaaatcaagtgattgcaggctggactgaaggtctacaattgatgacagaaggttctaaataccgcttcttcattccttatactcttggttatggcgagagaggtgcaggcgcttctattcctcctttcgctgcattggtgttcgatgtagagcttatcgaggttcaataatcgccccactgcnataaaagagcattttacaaagaaaataaaagcaataaactataaaaaacaaatagatcaaaatgaaaaaaattacattagctgcagcagctgtatttgcagccattgcattctcagcatgtggtaattcaactcctaaagctgaccttaaaactgacgtagacacattgagttacgctatgggtgttgctcaaacaggtgactttaagaacgttctttctgaaagaatgggtgtagataccacttatatcaacgagtttattaagggtgttagcgatggtgctaactctggagacgataagaaaaaggctgcatattatgcaggtttgcaagtaggacagaaccttggtggacgctatgttaaagacattagcagccaattgttcggtggtgatagcacaaagactatctctttgaagaactttatcgcaggtttcatcaacggagcaacaggtaaaaacgaaataatggacgctcaacgtgctggcgaagtggctgaacgtttgttcaaaaagatccaaggcgaaagcaatgaaaagcaattctctgctaacaaaaaggctggtgaagctttccttgcagctaacaaaaagaaaccaggtgttgtgactcttcctancggtttgcaatataaagtgatcacagaaggtaaaggtgagcttccaactgatacatcaatggttaaggttcactatgaaggacgcactatagatggtaaggtttttgaaagcagttacgaaagaaaacaaccagcagagttccgtcttaaccaagtaattaagggttggacagaggctattaagcgtatgcctgtaggtagtgtatgggaagtttacatcccacaagacttggcttacggtggccaaaactctggtcctatccaaccattctctgctcttatcttcaaaattgaattgttaggagttaacggaaaataatcaatcattcaataaaagnaatgaaagggacggatacttttacatccgtccctcttttaaattatagaaagtcgtataaaagaggtgagcagttgctattcaagctcaattctcttttattctttatatttaatatcttcattaaaatgaaaaagacaattttagctgtttgtgtgcttcttgcaggctttgcaacaacaatgagcgcaggcaacactaacaaaacaaataaaaagaacaangctactgcnaacgtagtgaaactcacttctcgtgccgactcattgagntatgcttctggtttgttctcaactggtcgcct

SEQ ID NO: 1192 - DNA, 4000 bp, Escherichia coli
  misc_feature (11)..(11): n is a, c, g, or t
  misc_feature (37)..(37): n is a, c, g, or t
  misc_feature (58)..(58): n is a, c, g, or t
  misc_feature (100)..(100): n is a, c, g, or t
  misc_feature (1935)..(1935): n is a, c, g, or t
  misc_feature (1965)..(1965): n is a, c, g, or t
  misc_feature (1986)..(1986): n is a, c, g, or t
  misc_feature (1992)..(1992): n is a, c, g, or t
  misc_feature (2031)..(2031): n is a, c, g, or t
  misc_feature (2132)..(2132): n is a, c, g, or t
  misc_feature (3679)..(3679): n is a, c, g, or t
tgtatcaaaanaaactaataaacctttaagagatccngaggtaatagaaaacattgcnaaaatatatgaaaaagaaggagctgattgttggtttaatgangatccacaaaaatttttaggaaaaaaatataaaaaagaagactatattcaatcaaccgacatttgcgaagtttggtttgatagtggttctactcatagctttgttttagaaaaaaggaaggatttgacatggcccgcatctatgtatttggaaggttcagatcaacatcgagggtggtttcattcatccttattagagtcatgtggtactagaggcagagctcctttcaatagtattctttctcatggtttcgttgtagatggaaagggtttgaaaatgtcaaaatccacaggaaatataattgcaccagaagatatactcaaaaaatatggcgctgatatcttaagagcctgggtagctgcatcagattattctgaagatttaaggttagattattcaattttagaacaacatgctgaatcctatagaaaaattagaaatacatttagatttttgttgggtaatttgcgggatcaaaaaatcaattttgatacaaattcaaaagaaattgaaaagtggcctgaacttgaacgttttatgctacatcaaatttttattttaaatagtaactttaaaaaatactttaaagaatataattttcataaactttacagagaattattaaatttctgttcactggatttatcagcattttattttgatatcagaaaagatactctttattgcgatgaaacgaaatcaaacaaacgaatggcatgcatcagattattatacttaattttagatatattgttaaaatggtttgctccaatattatcttttacaactgaagaaatattcagaattttaaataaagacaaaaacttaagtattcatttggaaacttttccaactattccatctaaatggagagatgaaaaattatttcaaaaatgggataagcttaaaatagtgagaaatgttgctaacgcagctattgaggttaaaagagcaagcaaagaaattggttcgagcttagaagcagatattaaagtttatctaggtgaagaatatttacaacacagtaaagatgttaatttaccagaatatactattacttcaaaagctgaggcgaagccaatgatcaatgatgataagctttttaagttagatagcgtagataatgtaaaagttttagtaaaaaaagccaaaggagaaaaatgttctagatgttggaaaattctagaaagtccctgtgagcgaaaaaactgtggtttaaaaaattaattttttcatgaaaaaaattataattgttttagttgtatttttttttgatagggcaactaaaatgtatttaataaatttacaaacaaccggaacagatatcgatttttatatatttccatttttaaatttttatcttgtatggaatacaggcattggatttggtctagcgtcactagaaacaaatattttttaccacattctaactgcaataattacaatagttaatcttgctcttatttttttccttttaaaagcaaaaggtatttatacttacttgtttgctttaattattggtggttctctaggaaatttgttcgatagaatttattattatgctgtaccagattttatcgatattcatgtaggtaattttcattggtttatatttaatgttgctgatatttttatcacagtgggtataattagttttatatttacagaattattaaaaaaagaaaaaatttctacaaatgtttaaaaaaaaaacaatatttcttatgctgcttatttttttagttacatcttgtgctgattcttggagcaatgtaaaacgcggcttaacaggtgcgaagcaaaaatcaaccgatgaatttttggttcaaaaaaangatccacttattttacctccagatttcganagcttaccttcaccctccganagggangaagcgatagaagaaatgtcaagttttgaaaaaacattnaaacaagagtctgaaactgaaatcaccgcttcttcaactgaaagttctgcagaagattcaatactgaaacagatcagaaaaaaatagatgttaaataaaantattttttttaataattttttttttaagtcaaaaaagttctatcaaaacttaaagaaaactcaaaaaatttttaactcttttcaattagatttaaaaaattttgaaatacctttacttaagtgttatgagaaagattacacatttgatttttcaccaacaacagttaaaaagttttctaaatataaaaatattgtcgtaattggcatgggcggatcaattttaggtacaaaaagtatttattcctttcttaaaacaaaagttaaaaaagaagtgtttttttttgataatctagatgaaaatttacatttacagtttaataaaattaatattttaaaaaattcttgctttataattgtttcaaagtcgggaaatacactcgaaacaatagcaaaccttagtgtagttttttcaaagtttctattcaaaaataaattaatttttattacagagatgaaggataacgtcttaaataatatagccgataaatttaatgctgagattattgaacataaagattttataggtggtcgatattcagtcttgtctgaagcaggaatgtttcctgctgcattaatggggcttaatataaataaatttaaaaacttaaaaaaattaattcaagataaaaattttatttcttctctaattcaaaatgttgcaagtatttatactttaaatatacaagatataaaaaattctgtgattttaaattatgattctgacttaaatgatctaggttattggtatcaacaactagttgctgaaagtttgggtaaaaaaggaaaaggaatcactccaatcttatcggcagcaccaaaggatcatcatagtgttttgcagctttatttagatggaccaaaggataaattttttactttttttagttcatcaaacgaagggaaaaaacataaagtaactggcaaaattattccaaataatatgaaatttttaaaaaatagaaagttaggatatataattcaggcacaatgtaacgcaacaaaaaatatttttaaattaaaaaacattccatttagacactttgtttttaataaaagtaatgaagaagaactaggtatgatttttacattttttgttttggaaacaattcttttagcacgtttaatgaatataaatccctttgatcaacctgctgttgaacaagttaagattgagacaagaaaaattctttcaaggtaaaaattttccaaacgttacttttgatattccgtatattctttcatcaattattttaaaataatttggcaatttttctttagtatttttatttctgtgtaaaatcaaaatgccgtcttttcgaagtacgttattattacaaataagctggattaatttttcaatatttaaatctttaaaaggaggatcacaaaaaattagatcaaattttgatttaaaaatatttcgttttttcattaaatcaaaaacatcatcaaaaaatatatatacatttttttttacttttaatttttcaatatttttttctaatatttttcttgcgtcttttgctttttcaataaaacaaacactnctagctcgtcttgatagacattctaatccaaatgatcctgtgccggcatataaatctagaatatttgatttttcaaattgaaatgacattttatttgaatgagtcaataagttgaaaatgctttctcttgctcgatctttcaacggtcttgttattttattttgcggaagatgtaagatggatcctttaagtttgcctgctattattctcatgtaaatttatatattattgatatatcaataattatttatatatgaacggcaataaagcaaaacttaaatttaatccaaataattttgaagttattgaagagggcgacta

SEQ ID NO: 1193 - DNA, 4000 bp, Escherichia coli
  misc_feature (1987)..(1987): n is a, c, g, or t
  misc_feature (1989)..(1989): n is a, c, g, or t
  misc_feature (2816)..(2816): n is a, c, g, or t
ctttctatttctttatattctccaaacagattatgttaaagaaaataggattcatatcaggaatcattttgctgattgtcactgtttgctctaatctttttgcttcgcaacaaaaagagcatttggttaatcgaagtgaggcgatagtaatgaatccgagtgtaacagtacgaagtactccaagtgagagtgggactagcttgtttattctccatgaagggagaaaggtaagtgtcaaagacaactctatgaaagaatggaaagaaattcgactggaagatggaaaagtcgggtgggtacctgcttctgctatcgaggtgatataaaggtcattaatagattttatatattcaagaaaaaaagataagcaaataatttgttttatctttttttttgcttaagtttatagcgtgataaaaaaatcacatagtattaaccattaaatttatgagacatgagaacaataacgtttaatgaacttcgtaaaattaaagattcattgcctagcggtagcatgcatagaatagcagacgaacttggtttgcacgtagatacagtgcgaaacttcttcggaggacacaatttcaaggagggaaaaagcgtcggaatacatctcgagcccggtccagatggtgggcttgtaatgttggatgacacgaccgttcttgatcgggctttaaaaatcctagatgaattgaatatgagtatgcaaaaagaacaggctaccgaatctgtgcaagtttaaaatataacaaactgaatcccaattgaatcaaacaattgggatttcttatttgttttcaccttataaaatgtacatttatggaagacaaattagtaaccctggccattctgacatacaccaaagcgcagatcttaaagaatgtcttggaaaatgaaggtatagaaacctacattcataacgttaatcaaatacaaccggttgtttcatcgggagtgcgtttacgaattaaagaaagcgatctgccacgtgctttgaaaataacagaaagttctacatggctgtctgaaagtatagtgggagagaaggagcccaaagtaaaagataaatcaaataagattttaattcccgtcgacttctctaattattcgatgaaagcatgtgaatttgcattcaacctggcaaaaacagaaaatgcagaagtcatcctgttgcatgtctatttcacgcctatttatgcatcgtcgttgccttatggggatgttttcaattaccagattggagatgaagaatctgtaaaaacgattatccaaaaagtccattctgatctcaatgctttatcagagaagataaaagaaaaagttacatcaggcgaatttcccaacgttaaatatagctgcatcttacgtgaaggtattccagaggaggaaatcttaagatatgctaaagaacagcgtcctatggtcatcattatgggtacccgaggcaaaaatcagaaagacattgatttaattggcagtgtaaccgctgaagttattgacaggagtcgcacggctgtattggctattccggaaaatacaccatttaaacagtttagtgaagcaaaacggattgcctttattaccaattttgatcaaagagatctaattgctttcgaggcattctttaatacttggaaatcattccatttttctgtatctttgatacaccttacagattctaaagatacctggaatgaaataaaactagcaggtataaaagaatattttcacaagcaatatccggggcttgaaattcattatgacgtagtgatgaatgataatttattaaaaggacttgatcagtatatcaaagataatcatatagatataatcactttgacttcttacaaaaggaatatatttgctcgattatttaatccaagtattgccagaaaaatgattttccattcagatacaccattgcttgttattaacagctgatcaaatcaggcaaaaaatgagcatccaagattagggaataatnantattatgtttaatagaaaaaggagtaatataatgaccttactcctttttctatttttatttaaatgaagaaatttacctgttccactcaagtccatatcaaatataagatttttcaattactactttaaactattgaataaaaaaaagaagactactatttctaatagccttcttatattttttcagaaaacgatcttacttcatcatcttatcgatttcttcgaattcaggtcccatattcaagttatagtaaactctgtaaagaccttgcaaccataaatcttgttgatcgggttttaaagctctggctttttcatagaatggtttagcttcttcgtagaatttcttaaccacagcttgtgcttcagcgtacttaggatcattgatatctgttgttgctttatcagcataatcctgtgctttcatcaaatataccaaacctacattagagtatgcttctgcatattccggatcagcagcaatagcttttttgtagtattcgattgcattatcatattctttcatattatgataaagatatgcttttacatacaaatacaacttgttattcggatcattagctaacattctatcagcaaactccatagctttagaagcttgattagagctattataataatcaaccaaattagcgaagaaataatcatttccagggaacttaaggataccctcttccaaagacttaatccatgcagcagtatcacctttagctttataagcatcagccatcaattgcattgcaaatttacctccatctttatcggataaagccataggagcatatttaatgatcgcatctttatcncctactctatcagcagctaatgttgcataataagcaatttgcggaagaagagtatcgtttttagccaattctttatcagctaacatcggataagaagctgactctacataggttgcaaagaacttcaaagcctctttattcttgtccaggttgaaatactgaataccaccattaatcaaattaggacgttcagccaacatactggaagcattagccttccgatatttgtttttaacttttcccttttcattaggtatttccgctaattcatcacacttattatagtactcatacattttcagaatactattgtatactttcaatgtatcatacggtttcttcaaaaaagcatttttcatttgctcctcgttgatacgtctctgaataaatccagcaacgtcccatgtgtcagcaagatccttcgtttcaggattcttcatagcctccttaataagctgttcagcctgcttaaaattaggttttacgtcattagccatactctttgcttctttcacattcttcatctgagcgaatgagaagctaacagccatcaataaaaccatagaaaataatactcttttcatgattgttgtttgattaattattaatattatgtctattcctcaatttcgttattgctttcgttttcatttacgtccgctgcatcatcaatatcaggaacatcagcattcggatcactcacgattgtaccctctgcctcttctgccggaatttcatcttcaagactttctgtcataaccttacataccgaaccaatctggtcgttacgtttttcaagatttatcagacgaacgccttgagtagcacggcccattatacgaacatccgctaccttcaaacgaatagtgataccagacttattgataatcatcaagtcattttcatcggttaccgacttgattgttaccaacttacctgtcttttcggtaatattcatggtcttcacacccttacctccacggttcgttttacgatagtcttcaatttcagaacgtttaccatatccttgttcggaaactaccattacagattctgtctccaaatctttgatacaaatcattcctactacttcatcctgaccatcattatccaacgtaataccacgtacacctgttgctgtacgtcccattacacgaactgctgcctcatggaaacgaattgca

SEQ ID NO: 1194 - DNA, 4000 bp, Escherichia coli
  misc_feature (1997)..(1997): n is a, c, g, or t
  misc_feature (2002)..(2002): n is a, c, g, or t
catttattcatttattcatttattcatttattcatttattcatttatttacataataaacttaataaataggattcctaataattatttcagaattttaatagagcaactgaatcttagtgattatcttcattctttcctaactaataaagttaaaagtaagcaaaatgtagtaaaagatgaaattaaaccaaaagataccccaatttcatctgatactacaaccacttctttaaataatttaaaactaaatatgatcaatgaaccatataatattggtcaaaattttattaaatatgaagaagcagatgatagttacgccaaaaaatcaagtgataaaagtatttcaaattcctcattctcctcaaaaatcaataattctaatatgacatcaaaatctaaaagcaataacaaatcgtcgaatgaaacgaataaaaataatatcataccgaaaagaaccccgagattaccatttcaacttccaaactttgatgttaccaagttaacattagtacaatccaccccgaccactgatccagcaatttggattacggtcattgaaaatgtcaaagtgtatatgtgtcttatacctgttaatatggatattcttgaaagttcagatagttctatgacccaacctccgcttattccattgcttagaatatataataatgatatggttaatggtactttattactcactgctggtggagtggatagtgatcaaaatcgttcgatcgttctttctctggaaagtagaagaattcgtattcgtaaacattctaatggtttatttggaacttggattcctttaaatcgtgcaagggagttagctagaacttgtagtcttgactctaaactttccgtttttttaagtgataatttaagagattattttccgttgtccgacagcttatctgctattcctttaccattaccgctaacaactaatcctttattagacattaaaaatagtatggcggtggcagcattatcttccttaaatgcggtggctgcttctaccaatgctgttcctgttactacctcaaccacttcaaccacttcaaaatcgacagctactaatggtaaatcaaaggaaattccaatctctatgaaagctcctacaaatccacttcagacggcattgaatttaggaagtatggcgttaaattctaatagtttattattaaataagggaaatcttttaagttccaatcctttattttcttctccttctgcactttcactactattaaaacaattttcatattcacccatttctttacccattggtactactccaaaggtttccatcagcccaagcccaaatacttcttcactattaaagaagcctactaccacaagcaccacttcgacttcctcctcttccaatacaactaaatctcaagcttcaaaaacaactaatgcaacagaaataaatccaccttcctccaccccagcctcgttgacaccgacaccaaacacgacatctattttaacatcgttaccttcagctacagcaacagctacaacaataacttcaacccctactcctgatttggcaacactttcagctttaccattgaatttcccatcaatagccactactacacctatttcagttgcgacgacccctaccccatccgcggcaagtttacaattggcctttgaaaatcctatcaatcctgttagtaaaaatagtaaacctagtagtatttctcaattaatgaaaacaaccagaatcaaaagtaaaaaatttaaaaaaatgcctcttcgttatacgaagaaagaaactcctgttttaaattcaaccttagcaagtttaactaatgaaaaatttcaaaatatgtctctcttaaatgataatggtaataataaaaatttaattgatgaagttcatggttcacaagatactatgctaagtagtaatggtaaaaataattaacaaaaataataataatatatatatatattgaaaaaataaaataaaatgaaatnaaaanaaaaaaaaaaaaaaaaattaactattctttcatattaatatttttttattgatattattttctattatatttacttatttatttatttatttatttatttatttatttatttatttatttgatatatttgatatatttgaatattttatttatatttatagatgattctgattatgaaaatgatcaaaatttattatttttatcttcatcggatgaggaagaggatgaaaataatcaaaatgataatgatgtagaatttttatctaaaaacggttatatatcagaaacgcaacttgatcaaagtacaaatgatagtgaagatgaagatgaagatgaagatgacgacgatgatgatgatgatgatgagaatgatgagaatgatgagaatatggatagagaagatgaagatgaggaaaatgaaaatgaagaagaggatgaagaggatgaagaaaatatagacgatgaccttatggaatatgagaatcttgatgatcttgaaaatgacagtgataatactgatgatatagataaaaatattattaatgtagttgatgattacagtagtgaaagttatcaatccgattctgaaaataatcttgaaagtatgtggtatttgaaaccgagattaactggaggtaaatcaaaaagacttgattctaccgaatacgcaggattaattaacgagattggtaatgagaatattttatctcctgttccatccacctcgaaaaaggatcacaattcaaagaaaaagagttcaaaaggtacttcttcttcttcatcaagaaaaagaaaacactctgagaaatcatcttctaaagcaaatcgtaatgctttggaaaccactcatactaaaaattcagatttacattccagcagaaaaaagaaaaaggtattaaattcttcaacaaatacgaaattaattattaagcagtcccctgaattttattcttcctcctctgtcaccactactaccagtaaaaagaaaaggagatctaagaaactatcaacgagtagtggcaaaataataaatattattagtaataagtcggatattgaagatgacgaaagtgaaattagtattgtcagtgatcacgatagtattattgatattaatggtttaggcgaaagtgaaaacgatgaatatcttgatattgatgatgaagatgaagaaaaagaagaaaacaatgatttttcacctgaaacaagttccatagaaattactaaatcaggtggtggaggtaaaaaaattattattcgtaaacattcttcctcaaatacttcatcgacggcgacctctaaaaaattaaaattggatccaaagggttcaacgactaactcctcagaaaaacgaataaaatctattaccattggtctacccacgaataaaaatgagaaaagtacgaatagacggcaaaagaaaaatagtacaaatagtaccactcgaaaacgaagtgaaagtcatcatggatcagatgtggaggagaaaaagcactcctctactacggccacttctactaccatcaatgaacctattcttcccctatcaattaacattaaaaagagacgtgtcactaaaaaatcgagtaccaccacgatcacttcagattccgcacaatcaacgaatagtaatgataactcaacctcaaaatactcaattcatgatttagatcataataaagcttccatagctaaccatgacgctattagcttaatgaacagtaatacaagtaataataataataataataataataataataataataatacagatataaataatggggaccaaatcaccacttcccaaacctcatttaatctgccgtccttaacagtcaagagtaaaacgattccatcgaaattggaagaacaattattattacaaaatattgttatgtcttccggtatagtgccttcagtcgcatcttcggataaatcaataaatatgtcaacttccactaaaattatgaaagatccctcctcctccctcatcac

SEQ ID NO: 1195 - DNA, 4000 bp, Escherichia coli
  misc_feature (233)..(233): n is a, c, g, or t
  misc_feature (453)..(453): n is a, c, g, or t
  misc_feature (457)..(457): n is a, c, g, or t
  misc_feature (521)..(521): n is a, c, g, or t
  misc_feature (523)..(524): n is a, c, g, or t
  misc_feature (543)..(544): n is a, c, g, or t
  misc_feature (553)..(553): n is a, c, g, or t
  misc_feature (556)..(556): n is a, c, g, or t
  misc_feature (566)..(566): n is a, c, g, or t
  misc_feature (634)..(634): n is a, c, g, or t
  misc_feature (664)..(664): n is a, c, g, or t
  misc_feature (700)..(700): n is a, c, g, or t
  misc_feature (736)..(736): n is a, c, g, or t
  misc_feature (759)..(759): n is a, c, g, or t
  misc_feature (775)..(775): n is a, c, g, or t
  misc_feature (838)..(838): n is a, c, g, or t
  misc_feature (847)..(847): n is a, c, g, or t
  misc_feature (853)..(853): n is a, c, g, or t
  misc_feature (868)..(869): n is a, c, g, or t
  misc_feature (907)..(907): n is a, c, g, or t
  misc_feature (1039)..(1039): n is a, c, g, or t
  misc_feature (2634)..(2634): n is a, c, g, or t
  misc_feature (2664)..(2664): n is a, c, g, or t
  misc_feature (2883)..(2883): n is a, c, g, or t
  misc_feature (3071)..(3071): n is a, c, g, or t
  misc_feature (3383)..(3383): n is a, c, g, or t
  misc_feature (3842)..(3842): n is a, c, g, or t
  misc_feature (3869)..(3869): n is a, c, g, or t
  misc_feature (3890)..(3890): n is a, c, g, or t
  misc_feature (3893)..(3893): n is a, c, g, or t
  misc_feature (3968)..(3968): n is a, c, g, or t
  misc_feature (3970)..(3970): n is a, c, g, or t
tgaaagcaccgcgcaagctgatgatgccgaacgcgtttctgtcaccctcaccaccgcattgaataccgcggacaccggtgctgcgactgacgtatcgtatgtgcctgtcgcccagaatatcgcggcgaacggggcggacacgccagcaattattcccagcctgatcgttccgaacgacagcggtgccgcgatcgtagaagcccgtgctgaaacgaacctgagcagcgaagcgnatattcgttctgtatccggcaaccgtgtgaatgtccgtggtggcccgggcaccgagtttcaggtcgtgagcaagctaggtcgcggcgattcggtcgagatcattcaggataacggcgatggatgggtaaagatgcgtcccgtagacggcgggccagagggctggatggccgatttcctgttgtcgaacgggtaaactactcaacaactcccgagacaacngttnatgcaacaacgtacaattttaattaccggctgctcctccgggatcggctacgcggctgcgcatncnntgcgcgaacgcggctgganngttttcgcntcntgccgccaancacgcgattgcgagaggctagccgccgaaggatttgatgcgccccagctcgactatacggatgccagnagcatcgccgctgcgctggatcatgtactngagcaaaccggtggcacgctcgatgccctttataanaacggtgcccatgcgacacccggtgccgtcgaaganctccccacagacgcgctgcgcgngatattcgaaagcaanttcttcggctggcacgagcttacgcgcaagatcatccctgtgatgcgggcacagggtcacggncgcattatncaatgntcgtccgtcttgggnnttgtcacaatgccgtggcgtggcgcttacaattctacnaaattcgcgctggaaggcttaacagacacgcttcgtattgagctgcgcgacacccccatccacgtgaccctgatcgagcccgggcccattacatccaacatccgcgcgaactctatcccgcacttcgagcgntggatcgattggaaaagctctgcccgaaaggtgcaatacgaaagcgcgttgttagacaggctatacactgcgagagggcccgacaggttcgagcttccgccacaagcagtcgttgacaggcttatccatgcgctggaggccgaccgcccacggccgcggtattatgtcacgacgccgacgcgtatctcgggcattttaaagcgtattttaccaacacgtgccctagactgggtgctctctcgataaattcgggttgcgctactgcatgaccccgctacatctttcagcaacacaaaggatgcttatgttcgctgatccgttatatatcctgaccgtcgttgccgtgattgcggtggttgtcgtattgatttttgggcttgggggcttcgctggtggcggagaattcaataagcgcaattcaaataaacttatgcgcatgcgcatcatcgcacagttcatcgctgtcgttctcatcgtcatatatgtgtacctgcgaaaggacgctggctgatggttgttcttaataaaatctacacccgcaccggcgacaaaggcgaaaccgcgttgggaaacggggaccgtgtggccaaacacgacctgcgggtcgaggcatatggcacatccgacgaattgaactgttttgttggtgtcgcgcggcttgaggcgaaaggcgaaaccgacgccgcgctgtcgcgtatccagaacgacctgttcgacctgggcgctgacctgtgccgccccgatatggaagcggatgcagacgccgaatacccgcctctgcgcctcgcggcggcgcaggtcgacaggcttgaacgtgagatcgacgtgatgaacgctgatctgtccccgctgagaagctttattctacccggcggcaccgcacttgccgcgcatttgcacgtgtgccggacagttgctcgccgcgccgaacggcttgcggtgcacttggctgacagagattctattaatccggccgccgtcaaatatctgaaccggctaagcgattggtttttcgtcgcggcgagggcttcaaataacggcggtaaggacgatgtattatgggtgcccggggcaaatcgctaaggccgtcagtcagaaacgccgcgtcgaaagacaataaattactatttttgactgttttgcattcgattgcttcgttacaccgacgaagagttcacatgatcggggccgaaccggcccggatcgtcaactgaggagagagaacgctcatgaaggtactggtacctgtaaagcgcgtgatcgactacaacgtgaaagtacgcgtcaaagcggacggcacgggtgttgatcttgccaacgtaaagatgtcgatgaacccgtttgacgagatttccgtcgaacaagcgatccgcatgaaagaggccggccaggtcgaagaagttgtggtcgtctctatcggcgtaaaacaggcgcaggaaacactgcgcacagcgctggcaatgggcgcggaccgcgcgattctgatcgtggcggccgacgatgtgcacaacgatatcgagcctttgaccgttgccaaaattctgaaaggcgtcgtcgaagaagagaagcccgaccttgttctttgcggtaagcangcgatcgacaacgatatgaacgccactggncagatgctgtccgctctgctggggtggtcgcaagcgaccttcgcctccaaagtcgacatcgatggcgacagcgctgttgttacacgtgaagtcgacggtggtttgcagactattaaggtttccatgcctacagtcgtgactgtggatcttcgcctgaacgaaccacgctatgcgtcgctacccaacatcatgaaggcaaagaaaaagcctttggatganaagacacctgccgattatggcgtcgaggtttccaaccgtttggaaatcatcaagacggctgagccagcagaacgtgctgcgggcatcaaggtcgagtcggtcgatgaactggttgcgaaacttaaagaagcgggggctgtgtaatggctgttctactccttgcagaagtaactgatggcgaactggcncttgacgcgacatccaaagccgttgctgcggccaagatgctcggcgatgttactgttctctgcgctggtggttccgccgctgcggcgggcgaagcggcggcgaaaatcaacggtgtttccaaagttctggtcgccgaggatgagacccttggccaccgcctcgcggaatccacggcggcgttgatcgtatcgctcgccggtgattacgaccacatcaccgcgccagcgaccacagacgctaaaaacgtgatgccacgtgttgcagcgttgcttgacgtcatgttgctgtccgatgtgtccggtgttgtcgangccgacacgttcgaacgtcccatctatgcgggcaacgcgatccagacggtcaaatcctcggatgcgaaaaaggttatcaccttccgcaccacgacgtttgacgccgctggcgacggtggctccgcctctgtagagacggtatccgctgcggccgatcccggcctgtcttcctgggttgaagaccacgttgcagaaagcgatcgccccgagctgacatcggctggcgtggttgtttccggcggccgtggcgttggctccgaagaagacttcgccttgatcgaaaagctggctgacaagctgggtgccgctgttggcgcttcgcgcgctgccgttgattcgggctatgctccgaacgactggcaagttggtcagaccggtaaggttgtcgcgcccgagctttatgtggcggttggtatctccggtgcgatccagcacttggccggcatgaaagacagcaanatcatcgtcgccatcaacaaagacgangaagcgccgatcttccaggtngcngactatggtctggtggcagatctgttcgaagccgttcccgagctgatcgagaaactgtaagcctttaaggttttnanggataaggcccgcaatcacctgcgggcctt

SEQ ID NO: 1196 - DNA, 4000 bp, Escherichia coli
  misc_feature (1980)..(1980): n is a, c, g, or t
  misc_feature (1987)..(1987): n is a, c, g, or t
  misc_feature (1992)..(1992): n is a, c, g, or t
  misc_feature (2409)..(2409): n is a, c, g, or t
  misc_feature (2412)..(2412): n is a, c, g, or t
  misc_feature (2443)..(2443): n is a, c, g, or t
  misc_feature (2556)..(2556): n is a, c, g, or t
  misc_feature (2636)..(2636): n is a, c, g, or t
  misc_feature (2773)..(2773): n is a, c, g, or t
  misc_feature (2851)..(2853): n is a, c, g, or t
  misc_feature (2859)..(2863): n is a, c, g, or t
  misc_feature (2866)..(2867): n is a, c, g, or t
  misc_feature (2870)..(2872): n is a, c, g, or t
  misc_feature (2874)..(2881): n is a, c, g, or t
  misc_feature (2885)..(2887): n is a, c, g, or t
  misc_feature (2889)..(2890): n is a, c, g, or t
  misc_feature (2892)..(2892): n is a, c, g, or t
  misc_feature (2896)..(2896): n is a, c, g, or t
  misc_feature (2899)..(2899): n is a, c, g, or t
  misc_feature (2902)..(2902): n is a, c, g, or t
  misc_feature (2906)..(2906): n is a, c, g, or t
  misc_feature (2909)..(2909): n is a, c, g, or t
  misc_feature (2912)..(2912): n is a, c, g, or t
  misc_feature (2915)..(2916): n is a, c, g, or t
  misc_feature (2918)..(2925): n is a, c, g, or t
  misc_feature (2928)..(2929): n is a, c, g, or t
  misc_feature (2932)..(2932): n is a, c, g, or t
  misc_feature (2934)..(2935): n is a, c, g, or t
  misc_feature (2937)..(2940): n is a, c, g, or t
  misc_feature (2942)..(2942): n is a, c, g, or t
  misc_feature (2945)..(2952): n is a, c, g, or t
  misc_feature (2954)..(2961): n is a, c, g, or t
  misc_feature (2965)..(2966): n is a, c, g, or t
  misc_feature (2968)..(2973): n is a, c, g, or t
  misc_feature (2975)..(2979): n is a, c, g, or t
  misc_feature (2982)..(3005): n is a, c, g, or t
  misc_feature (3007)..(3012): n is a, c, g, or t
  misc_feature (3014)..(3014): n is a, c, g, or t
  misc_feature (3016)..(3022): n is a, c, g, or t
  misc_feature (3024)..(3029): n is a, c, g, or t
  misc_feature (3031)..(3031): n is a, c, g, or t
  misc_feature (3033)..(3036): n is a, c, g, or t
  misc_feature (3038)..(3040): n is a, c, g, or t
  misc_feature (3042)..(3046): n is a, c, g, or t
  misc_feature (3049)..(3049): n is a, c, g, or t
  misc_feature (3051)..(3052): n is a, c, g, or t
  misc_feature (3054)..(3070): n is a, c, g, or t
  misc_feature (3072)..(3093): n is a, c, g, or t
  misc_feature (3095)..(3095): n is a, c, g, or t
  misc_feature (3097)..(3098): n is a, c, g, or t
  misc_feature (3100)..(3105): n is a, c, g, or t
  misc_feature (3107)..(3118): n is a, c, g, or t
  misc_feature (3120)..(3121): n is a, c, g, or t
  misc_feature (3123)..(3125): n is a, c, g, or t
  misc_feature (3127)..(3134): n is a, c, g, or t
  misc_feature (3136)..(3136): n is a, c, g, or t
  misc_feature (3139)..(3144): n is a, c, g, or t
  misc_feature (3146)..(3149): n is a, c, g, or t
  misc_feature (3151)..(3151): n is a, c, g, or t
  misc_feature (3153)..(3157): n is a, c, g, or t
  misc_feature (3159)..(3162): n is a, c, g, or t
  misc_feature (3165)..(3171): n is a, c, g, or t
  misc_feature (3173)..(3186): n is a, c, g, or t
  misc_feature (3188)..(3193): n is a, c, g, or t
  misc_feature (3195)..(3201): n is a, c, g, or t
  misc_feature (3203)..(3210): n is a, c, g, or t
  misc_feature (3212)..(3212): n is a, c, g, or t
  misc_feature (3214)..(3217): n is a, c, g, or t
  misc_feature (3220)..(3246): n is a, c, g, or t
  misc_feature (3248)..(3248): n is a, c, g, or t
  misc_feature (3250)..(3278): n is a, c, g, or t
  misc_feature (3280)..(3284): n is a, c, g, or t
  misc_feature (3286)..(3286): n is a, c, g, or t
  misc_feature (3288)..(3291): n is a, c, g, or t
  misc_feature (3293)..(3293): n is a, c, g, or t
  misc_feature (3295)..(3296): n is a, c, g, or t
  misc_feature (3298)..(3298): n is a, c, g, or t
  misc_feature (3301)..(3313): n is a, c, g, or t
  misc_feature (3315)..(3316): n is a, c, g, or t
  misc_feature (3318)..(3323): n is a, c, g, or t
  misc_feature (3326)..(3328): n is a, c, g, or t
  misc_feature (3330)..(3332): n is a, c, g, or t
  misc_feature (3335)..(3336): n is a, c, g, or t
  misc_feature (3338)..(3338): n is a, c, g, or t
  misc_feature (3340)..(3340): n is a, c, g, or t
  misc_feature (3343)..(3347): n is a, c, g, or t
  misc_feature (3349)..(3349): n is a, c, g, or t
  misc_feature (3351)..(3352): n is a, c, g, or t
  misc_feature (3356)..(3357): n is a, c, g, or t
  misc_feature (3359)..(3359): n is a, c, g, or t
  misc_feature (3362)..(3364): n is a, c, g, or t
  misc_feature (3366)..(3367): n is a, c, g, or t
  misc_feature (3369)..(3369): n is a, c, g, or t
  misc_feature (3372)..(3374): n is a, c, g, or t
  misc_feature (3376)..(3386): n is a, c, g, or t
  misc_feature (3389)..(3389): n is a, c, g, or t
  misc_feature (3391)..(3393): n is a, c, g, or t
  misc_feature (3395)..(3395): n is a, c, g, or t
  misc_feature (3398)..(3405): n is a, c, g, or t
  misc_feature (3407)..(3408): n is a, c, g, or t
  misc_feature (3411)..(3414): n is a, c, g, or t
  misc_feature (3417)..(3421): n is a, c, g, or t
  misc_feature (3423)..(3428): n is a, c, g, or t
  misc_feature (3430)..(3431): n is a, c, g, or t
  misc_feature (3433)..(3433): n is a, c, g, or t
  misc_feature (3437)..(3443): n is a, c, g, or t
  misc_feature (3446)..(3449): n is a, c, g, or t
  misc_feature (3451)..(3468): n is a, c, g, or t
  misc_feature (3470)..(3478): n is a, c, g, or t
  misc_feature (3480)..(3484): n is a, c, g, or t
  misc_feature (3486)..(3486): n is a, c, g, or t
  misc_feature (3488)..(3495): n is a, c, g, or t
  misc_feature (3497)..(3497): n is a, c, g, or t
  misc_feature (3499)..(3502): n is a, c, g, or t
  misc_feature (3504)..(3504): n is a, c, g, or t
  misc_feature (3506)..(3524): n is a, c, g, or t
  misc_feature (3526)..(3527): n is a, c, g, or t
  misc_feature (3530)..(3540): n is a, c, g, or t
  misc_feature (3542)..(3546): n is a, c, g, or t
  misc_feature (3548)..(3549): n is a, c, g, or t
  misc_feature (3551)..(3553): n is a, c, g, or t
  misc_feature (3556)..(3569): n is a, c, g, or t
  misc_feature (3571)..(3607): n is a, c, g, or t
  misc_feature (3609)..(3613): n is a, c, g, or t
  misc_feature (3615)..(3629): n is a, c, g, or t
  misc_feature (3631)..(3632): n is a, c, g, or t
  misc_feature (3634)..(3636): n is a, c, g, or t
  misc_feature (3638)..(3642): n is a, c, g, or t
  misc_feature (3644)..(3650): n is a, c, g, or t
  misc_feature (3652)..(3652): n is a, c, g, or t
  misc_feature (3654)..(3663): n is a, c, g, or t
  misc_feature (3665)..(3675): n is a, c, g, or t
  misc_feature (3677)..(3681): n is a, c, g, or t
  misc_feature (3683)..(3687): n is a, c, g, or t
  misc_feature (3690)..(3691): n is a, c, g, or t
  misc_feature (3693)..(3697): n is a, c, g, or t
  misc_feature (3699)..(3707): n is a, c, g, or t
  misc_feature (3710)..(3712): n is a, c, g, or t
  misc_feature (3714)..(3721): n is a, c, g, or t
  misc_feature (3723)..(3730): n is a, c, g, or t
  misc_feature (3732)..(3732): n is a, c, g, or t
  misc_feature (3735)..(3735): n is a, c, g, or t
  misc_feature (3738)..(3740): n is a, c, g, or t
  misc_feature (3742)..(3754): n is a, c, g, or t
  misc_feature (3756)..(3764): n is a, c, g, or t
  misc_feature (3767)..(3770): n is a, c, g, or t
  misc_feature (3772)..(3781): n is a, c, g, or t
  misc_feature (3783)..(3787): n is a, c, g, or t
  misc_feature (3789)..(3789): n is a, c, g, or t
  misc_feature (3791)..(3792): n is a, c, g, or t
  misc_feature (3795)..(3795): n is a, c, g, or t
  misc_feature (3797)..(3801): n is a, c, g, or t
  misc_feature (3803)..(3808): n is a, c, g, or t
  misc_feature (3810)..(3812): n is a, c, g, or t
  misc_feature (3814)..(3814): n is a, c, g, or t
  misc_feature (3816)..(3818): n is a, c, g, or t
  misc_feature (3820)..(3825): n is a, c, g, or t
  misc_feature (3827)..(3829): n is a, c, g, or t
  misc_feature (3831)..(3834): n is a, c, g, or t
  misc_feature (3836)..(3840): n is a, c, g, or t
  misc_feature (3842)..(3843): n is a, c, g, or t
  misc_feature (3845)..(3850): n is a, c, g, or t
  misc_feature (3852)..(3855): n is a, c, g, or t
  misc_feature (3857)..(3857): n is a, c, g, or t
  misc_feature (3861)..(3864): n is a, c, g, or t
  misc_feature (3866)..(3875): n is a, c, g, or t
  misc_feature (3878)..(3880): n is a, c, g, or t
  misc_feature (3882)..(3891): n is a, c, g, or t
  misc_feature (3893)..(3895): n is a, c, g, or t
  misc_feature (3897)..(3899): n is a, c, g, or t
  misc_feature (3901)..(3901): n is a, c, g, or t
  misc_feature (3903)..(3911): n is a, c, g, or t
  misc_feature (3913)..(3916): n is a, c, g, or t
  misc_feature (3918)..(3930): n is a, c, g, or t
  misc_feature (3932)..(3934): n is a, c, g, or t
  misc_feature (3936)..(3937): n is a, c, g, or t
  misc_feature (3939)..(3941): n is a, c, g, or t
  misc_feature (3943)..(3943): n is a, c, g, or t
  misc_feature (3945)..(3945): n is a, c, g, or t
  misc_feature (3947)..(3947): n is a, c, g, or t
  misc_feature (3949)..(3960): n is a, c, g, or t
  misc_feature (3962)..(3964): n is a, c, g, or t
  misc_feature (3966)..(3966): n is a, c, g, or t
  misc_feature (3968)..(3976): n is a, c, g, or t
  misc_feature (3979)..(3981): n is a, c, g, or t
  misc_feature (3984)..(3984): n is a, c, g, or t
  misc_feature (3986)..(3990): n is a, c, g, or t
  misc_feature (3992)..(3992): n is a, c, g, or t
  misc_feature (3994)..(3994): n is a, c, g, or t
  misc_feature (3996)..(3996): n is a, c, g, or t
  misc_feature (4000)..(4000): n is a, c, g, or t
tgaaagaccaggtcaagcgagctgtgagctttgtaactgcttttgaggaggcactcgctcacgctgcccgcaaaaggggttttgacggtgttgtatgtggacatattcatcgcgcggagatccgcatgattgatgatgtgctttattgcaacgatggtgattgggttgaaagcatgacggccttggtcgaacatccggatggtcgtcttgaaattatcgattggcccaaaaccaagcttagccagcaagcctcaagcgagcaactcgccctcgatctgaaagcccgtatgggatcgctatgaaccccggcaatatggttttcgatgcaatagggccgcaaaggcgatgaaatccccggtagcgcaagttgtgtttcacgcattatcaccatgaatttgattatctggagacatgccgacgctggcgacagtcttgaagaccacaaacaagaccttgagcgtagcctatcagagcggggcaagaagcaagcgagcagaatgagtcgatggcttgacgcaagacttcctgaaacttttgcggtggtcagcagccccgcccagcgcgcactgcaaacagcgatgaccttgtcagcaaaagtacgccccgagccgcgcttactgccgggcagctcgcttgaagaggctttgcaatcgatcaaagtcgatgaagcgcatttgcgaaagtctgggcatctggttgttgttggacatcagcctttgcttgggcatttaatgtcgcacttggtcagtggcggggatgcttgttggagcttgaaaaaaggtgcgctttggtggcttcaacgcaaggatgcagagcccttctggcaagtcaaagctgcgatcggacccgatttggtatagggtagaggcttgatgatttgccccgtcgtggggctggagcctctggatgactgaaatcgagcttaaattacaggtccccgccacagtgcgggctgcactggcacaagaaattaaagaccgctcccccgataacctacgcagacagcgcctgcaagcggtttatttcgataccccgtcgagattgttagctagtgaagacatggcgctgcggcttcgccgtgaagggcgcaattgggtgcaaaccctgaaggcgggaaaaggtctcgacagcatcagccgtgaagaagacaacattcgattacctgatcgtagcgcggctgagccagcgctcgacgttagcaggcatctgcgcagcccggcagggcgaaggctgcaagtacttttgcaaagggtacaaggcgagagcttgcagcgccgctttgcgaccgacgtaaggcgtcagagccagattcagcgcactcggcgcggctttgttgagctctgcttcgatgaggggatcattcaaagtgagcaacgccagcttgggcttcgcgagcttgaaatcgaatcgatcaaaggctcgccgcttgccgtactcgaagctgctgcgggttatattaaacgttatcaactctggattgatttgcgtagcaaagcgcagcgcggtcacatgctctttgaggatcgcgcatttatctcgccgacaaaggccggatcgattcgccttgaagcaggcgctaatatcgatgaagccttattagcgatcttttccgactgccgccgacaggtgatgcaaaatgcatcacaaattgccgctgaagaggggcacggacccgaacatgttcatcagatccgagtcggactaagaaggcttcgcacggcgatgaaattatttggtcagcgattacaagcgattgcccactgggatgcccaggctcgatcgctggccacagatcttggcgcaagcagagaccgcgatgtgcttgccgaaagtctgtggccgcgactacgtgacattgatgcacccctcattgaactaccctcaccgactgatctaaaatcgccaagagatctgattcgcgataaacagtgtcagttatggtttcttgagtggctagagcacgacatgaagcttgatctngatcgtnccagnaacgataacgaactcggacaaatgccagcgcaagacttgctgcttgaagttcttcaacgctggcatcgtaagtgtaagaagatgagtgccaactttggccaactgagtgttgacgagcgacatgatttgcgcaagcgtatgaaacgtcttcgttatggcgttgagtttgtgcgcagccttttacaggaaaagcgacttgaacattttctacaagtgatggctgaggctcaagacgcgttgggtgaatacaatgatttgcatgttgcccatgcactttataaatcgcatagtgcgcatcagcctcaggcctggtttgcggttggttggcttgctgcgcaatcggattatgccgctgatcgctgcattaaagtcttgcaagactttgccaaagtgcaggcgccctggcgaaaaaggganatnccacgaaacaacacaaatcccgaaatcattnctccagggctatgatcgagatcctgcttctaaccccgctagcacgggctattaagacgagccgcgggtcgcaaccaaccctataaacttgcgttaactcgtccttgaacctgncaagctatgggctcgaactgaggcgcaattcaaaggcgtagtctgtgctttggctgccggtttgctgcatccataaaacnattggcccagcggacaactgggctgccgtcaaattttcgactaaattttgtcccagcttttcgggaccaaagtgcccgaaggcaatcattcggcttgtaaagcacctcgcttgattccggcagttgagctatcaacntaggtgccagcggattggttgaaaactcgatagcttcgccagcacttgcttgcaccaagtccagttcagatcgatctnnngagttnnnnnccnnatnnncnnnnnnnntgannngnntngcangancantacnaantanccnnannnnnnnnccnncancnnannnncnggnnnnnnnntnnnnnnnncganncnnnnnncnnnnnttnnnnnnnnnnnnnnnnnnnnnnnncnnnnnnangnnnnnnnannnnnntnannnngnnngnnnnngancnntnnnnnnnnnnnnnnnnntnnnnnnnnnnnnnnnnnnnnnngngnnannnnnngnnnnnnnnnnnngnngnnntnnnnnnnncntgnnnnnntnnnnancnnnnngnnnncannnnnnngnnnnnnnnnnnnnngnnnnnncnnnnnnngnnnnnnnncngnnnncannnnnnnnnnnnnnnnnnnnnnnnnnncnannnnnnnnnnnnnnnnnnnnnnnnnnnnngnnnnnancnnnntnanntnggnnnnnnnnnnnnnannannnnnnaannnannngcnncncnaannnnntncnnaccnngntcnnncnngnacnnncnnnnnnnnnnnttnannncnctnnnnnnnnanngannnnccnnnnncnnnnnntnncnaagnnnnnnnccnnnntnnnnnnnnnnnnnnnnnngnnnnnnnnngnnnnnancnnnnnnnntncnnnncncnnnnnnnnnnnnnnnnnnngnnggnnnnnnnnnnngnnnnncnnannntgnnnnnnnnnnnnnngnnnnnnnnnnnnnnnnnnnnnnnnnnnnnnnnnnnnnannnnnannnnnnnnnnnnnnnanncnnncnnnnncnnnnnnncnannnnnnnnnntnnnnnnnnnnnannnnncnnnnngannannnnnannnnnnnnnccnnngnnnnnnnngnnnnnnnncnaanaannnannnnnnnnnnnnnannnnnnnnnggnnnncnnnnnnnnnncnnnnnananngcnannnnnannnnnngnnnanannnannnnnntnnntnnnnannnnnannannnnnnannnnanaaannnntnnnnnnnnnnagnnnannnnnnnnnnannnannnangnnnnnnnnncnnnnannnnnnnnnnnnngnnnanncnnngncntnannnnnnnnnnnncnnngntnnnnnnnnnccnnnccnannnnngncntnggcn

SEQ ID NO: 1197 - DNA, 4000 bp, Escherichia coli
  misc_feature (181)..(181): n is a, c, g, or t
  misc_feature (1029)..(1029): n is a, c, g, or t
  misc_feature (1034)..(1035): n is a, c, g, or t
  misc_feature (1131)..(1131): n is a, c, g, or t
  misc_feature (1526)..(1526): n is a, c, g, or t
  misc_feature (1540)..(1540): n is a, c, g, or t
  misc_feature (1587)..(1587): n is a, c, g, or t
  misc_feature (1990)..(1990): n is a, c, g, or t
  misc_feature (2115)..(2115): n is a, c, g, or t
  misc_feature (2208)..(2208): n is a, c, g, or t
  misc_feature (2218)..(2218): n is a, c, g, or t
  misc_feature (2860)..(2860): n is a, c, g, or t
  misc_feature (3394)..(3394): n is a, c, g, or t
  misc_feature (3440)..(3440): n is a, c, g, or t
  misc_feature (3460)..(3460): n is a, c, g, or t
  misc_feature (3500)..(3500): n is a, c, g, or t
  misc_feature (3562)..(3562): n is a, c, g, or t
  misc_feature (3611)..(3611): n is a, c, g, or t
  misc_feature (3731)..(3731): n is a, c, g, or t
  misc_feature (3799)..(3799): n is a, c, g, or t
  misc_feature (3915)..(3915): n is a, c, g, or t
  misc_feature (3917)..(3917): n is a, c, g, or t
  misc_feature (3936)..(3936): n is a, c, g, or t
cgctgcagttcccaggcgagcagcgcactcaccagccccaccgcggccactcccgcggccagccagtagagcacccgcgtgatgacgaaggtgcggtcgaagatgcgcatcgagagcgcgcgaatgtcggcgttggagcggatgaagagcgcctgccggccgcgcgccgccgcgcgcagcncgccggccgccacccgtgcctcgactcccggggcgagatagattccgagcccgctgatcgagtcgtcgtcccagagccgccggtactcgtcgagccccatcagcacctcgccgcggtcgttgccgtactcgcggtacacaccggccaccgggaaggcgcggggtcccgaggccgtggtgagagtgagcgtgtcatgcggcgcgagttggagccgccaggcgaggggttcggagatgaggatcgcgccgcgcgcgaactctcgccacgcgctcgtcgcgctcgcttgcgtgaatcgcacgcccgcgtaactctcgggcgcgagcctgaccgcgttcacatccagcgggccgtgcggcgagggaaccacgacccggcggctctcgctgtgagtgcgcacggcgggcacggcgaggagggagcgcacgacctcggggtcgagccttcgcccggagtcctcccccgcggctggagcgctgacgtagacgtccgcgcgcagcgcctgaatgagccactcacggagcgattcccggaagctctgcaccatgatcgcgacaccgatcatcgcggtgagcgccatgccgagcgcggcgacggccacccccgtgcggctgagcgaaccggcgatgtcccggcaggcgagccgcgccaccggaccgagccgcaccgagagccttgccgcggccagcgccagggctctaagcgccgccggcgtcaccgccgcgacgccgaggagcagcatgaagagcgtcgcgaagccggcgagaaggctgcgaccggagacccagaccagcaagcccgcccccgcggcgagcgaggcgccgacgacgagcagcgaccgcgccaggtgnagcgnncgcctctcgagcaccgagcgcgagagcccgagctgcggcgcgctcgccgcgacctcgagcgccgggagcagtgccgcggcgagcgcagtcagcacnccgccgcccgcggcagcgaccagcgagacagccggaacgctcatctccctcaccgccacgacgaaatagagatcgttgatggtctgcgacacgagaccgacgagccctcgccccatcacgagtccgagcagcacgccgcagaccgcgccgacgatgccgagcgccgcggcctccgcgagcacgagtccgagcacctggccacgggtggccccgagtgcgcgcagcacggccatgatcgggcggcgctgcagcacggcgaagctcaccgcgccgtagatcagaaacgcgcccaccaggagcgccagcaggctcatggccttgagattggtcgtgaacgcgtccgtcatggcgagcgtctcgcgaagctgcgcgcgcgtggcgcgcagctcgagacngggaagcagctgcntgcggagccgcgcgaggagctcttcgcccggcgcgcccgcgggcagncgcacatcgatccgcgagagccttccggtggcgcccagccactcctgcgcctgagcgatgtcggtcagcagcaccccgtcgaggcccgggccggccccggcagcttgggcgatgagcgtggcgggtcgcggcacgccgcccacgagaagctcgaggcggcggcccgtcgcgagcccgagttcggaagcggcggtcgcgctcatgaccacggcgcccggctcggtcagccagtcccgcagcgtgtcgaggccgtcggtcgccggatccggcacaccgggtgcgcgcccttcgcctgcgagctcgagggccgcaaaaggatcgacgccgaccagctgcatcgttcgctcgccgatggcgacatagcccgcgagcaccggcgcgaaaagcggcggcgagcgtccgntggactgcgcgcgcagccgcacgtacagccgctcatcgataccgcgcggaccgccagtgatctgatgcgtagcggggccattcacggcctcgagcgagagctcgaatgcgcgccgcgagctctcngtcgccacctccaccgccacgatcgtgcccaccccgagcgcgagcccgaccagcgcgagcgccagctgcgccgggtggcgcagcagatgccgnacgcccgccnggtgcagcgcgttcatcgaggcgcggagaccgccggctcgcgccgctcgtgcagccgtccctcgcgcagctccagcacgcggtccgcggcgcgcgacagcgcgagatcgtgggtcacgatcacgacggtggtgttgcgcgcgcgggcgagagacaacagcgcgggcaacacctcgccggcggtctgctcgtcgaggttgccggtgggctcgtcggccaggagaagcggcggctcatggaccagcgcccgggcgatcgcgacgcgttgctgctcgcccccggagagccggtccaccgcgctgtccgcgcgcgcggcgagacccacgtcggagagcaccgcgaggctgcgcgcgcgtgcctgcgcgccccgtacgccgttgagctcgagcaccaggcgcacgttctcctcgacatcgagggtcgggatgaggttgaagaactggtagacgaagccgatgtgagcgcggcggaagagcgtacgggcgggctcgcccatcgccgtcacctcacggccgtcgatctgcacggttccgccgtcggcgtggtcgatgccgctgatgagattgaggagcgttgacttgccggagccgctgcgccccgtgaccgcgaccgtctcgccgcggcgcacctcgaggtcggcgcnctcgagcacgcggtgcacccgtccgccttcgctgaagctgcgggaaagctgtcgaacgctcagcatggctggctaaaattcggaaacggctcgcaaatccggggtttcacggcaaaaaagtgagcgcgcgggtcgttaatgggccaaactccccacccgctgcggctcccaagccgtgccgtgcacggcccgcatgcgctcgaagggtaacccatgacactgccagcgccgcgccgcggccgcacccacctcatcgtcaacaccgctgccatcgccgtgctcattgccggcgcgacgctcgcggctgcggaggagcccgccgcgggggcctcggctgcggcgcccgccgctcccgcgaaaaaggctccggcgaagaccggcgccgccaaggaggcacccgcgaaggcgggctccgccagttacagcgtcggcgtgtcgatgggcgagcagctgcgcggcagcggcgtgacgcctgcgctgatcaacccgcaggagctcgcgcagggcgtgcgcgacgcggttggcggcaaggcntcgctcaccgacaaggatcgcgagaacatccgcaacctggtgaacncggtcggcgagtccaatcangccgcagccgtcaagttcctggccgagaacggcaagaagnccgacgtggtcacgaccgcgagcggcctgcagtacaaagtgctgaatgccggcaacggggantcgcccaagaagaccgacgaggtcacggtgaactaccgcgggtcgctgntcaacggcaccgaattcgacagcagctacaagcgcggtcagccggcgacgttcccggtgaacggcgtcattcccggctggaccgaggcgctcggcctcatgaagccgggagccaagtggnagctgttcgtgccgccgcagctggcctatgacatgcagtcccggccgccgattccgccggggtcgctnctgatcttcgaggtcgagctgctgagcgtgaagggggccggcacgccggcgccgcccacctcgtccgcgtctcccgctccggcgcaaccggcaactccctcgcagcccccgaagtnangccacagccctcgatgcgnggcgcgggccgatgaccgcccgcgccttcttcagccctcggcgttcgcgcccggtgtgtagcgc

SEQ ID NO: 1198 - DNA, 4000 bp, Escherichia coli
  misc_feature (1)..(4): n is a, c, g, or t
  misc_feature (7)..(7): n is a, c, g, or t
  misc_feature (9)..(10): n is a, c, g, or t
  misc_feature (12)..(18): n is a, c, g, or t
  misc_feature (20)..(20): n is a, c, g, or t
  misc_feature (23)..(23): n is a, c, g, or t
  misc_feature (27)..(29): n is a, c, g, or t
  misc_feature (41)..(43): n is a, c, g, or t
  misc_feature (45)..(49): n is a, c, g, or t
  misc_feature (51)..(51): n is a, c, g, or t
  misc_feature (54)..(57): n is a, c, g, or t
  misc_feature (59)..(63): n is a, c, g, or t
  misc_feature (67)..(67): n is a, c, g, or t
  misc_feature (70)..(70): n is a, c, g, or t
  misc_feature (72)..(72): n is a, c, g, or t
  misc_feature (75)..(75): n is a, c, g, or t
  misc_feature (81)..(81): n is a, c, g, or t
  misc_feature (90)..(91): n is a, c, g, or t
  misc_feature (97)..(100): n is a, c, g, or t
  misc_feature (103)..(103): n is a, c, g, or t
  misc_feature (109)..(110): n is a, c, g, or t
  misc_feature (114)..(114): n is a, c, g, or t
  misc_feature (120)..(120): n is a, c, g, or t
  misc_feature (122)..(122): n is a, c, g, or t
  misc_feature (125)..(125): n is a, c, g, or t
  misc_feature (127)..(127): n is a, c, g, or t
  misc_feature (133)..(136): n is a, c, g, or t
  misc_feature (138)..(144): n is a, c, g, or t
  misc_feature (149)..(150): n is a, c, g, or t
  misc_feature (153)..(154): n is a, c, g, or t
  misc_feature (162)..(163): n is a, c, g, or t
  misc_feature (166)..(167): n is a, c, g, or t
  misc_feature (170)..(172): n is a, c, g, or t
  misc_feature (174)..(174): n is a, c, g, or t
  misc_feature (177)..(180): n is a, c, g, or t
  misc_feature (182)..(185): n is a, c, g, or t
  misc_feature (187)..(191): n is a, c, g, or t
  misc_feature (193)..(195): n is a, c, g, or t
  misc_feature (198)..(199): n is a, c, g, or t
  misc_feature (202)..(202): n is a, c, g, or t
  misc_feature (204)..(205): n is a, c, g, or t
  misc_feature (207)..(207): n is a, c, g, or t
  misc_feature (212)..(212): n is a, c, g, or t
  misc_feature (215)..(216): n is a, c, g, or t
  misc_feature (218)..(218): n is a, c, g, or t
  misc_feature (220)..(221): n is a, c, g, or t
  misc_feature (226)..(226): n is a, c, g, or t
  misc_feature (229)..(233): n is a, c, g, or t
  misc_feature (236)..(236): n is a, c, g, or t
  misc_feature (238)..(238): n is a, c, g, or t
  misc_feature (242)..(242): n is a, c, g, or t
  misc_feature (244)..(245): n is a, c, g, or t
  misc_feature (247)..(248): n is a, c, g, or t
  misc_feature (252)..(254): n is a, c, g, or t
  misc_feature (256)..(256): n is a, c, g, or t
  misc_feature (258)..(262): n is a, c, g, or t
  misc_feature (264)..(264): n is a, c, g, or t
  misc_feature (266)..(267): n is a, c, g, or t
  misc_feature (270)..(273): n is a, c, g, or t
  misc_feature (276)..(282): n is a, c, g, or t
  misc_feature (284)..(284): n is a, c, g, or t
  misc_feature (286)..(288): n is a, c, g, or t
  misc_feature (292)..(294): n is a, c, g, or t
  misc_feature (296)..(300): n is a, c, g, or t
  misc_feature (302)..(306): n is a, c, g, or t
  misc_feature (308)..(310): n is a, c, g, or t
  misc_feature (312)..(312): n is a, c, g, or t
  misc_feature (314)..(315): n is a, c, g, or t
  misc_feature (319)..(321): n is a, c, g, or t
  misc_feature (324)..(326): n is a, c, g, or t
  misc_feature (329)..(330): n is a, c, g, or t
  misc_feature (332)..(333): n is a, c, g, or t
  misc_feature (335)..(335): n is a, c, g, or t
  misc_feature (337)..(337): n is a, c, g, or t
  misc_feature (340)..(342): n is a, c, g, or t
  misc_feature (345)..(346): n is a, c, g, or t
  misc_feature (348)..(348): n is a, c, g, or t
  misc_feature (350)..(355): n is a, c, g, or t
  misc_feature (357)..(357): n is a, c, g, or t
  misc_feature (359)..(362): n is a, c, g, or t
  misc_feature (365)..(367): n is a, c, g, or t
  misc_feature (371)..(371): n is a, c, g, or t
  misc_feature (373)..(374): n is a, c, g, or t
  misc_feature (376)..(378): n is a, c, g, or t
  misc_feature (384)..(386): n is a, c, g, or t
  misc_feature (389)..(392): n is a, c, g, or t
  misc_feature (394)..(395): n is a, c, g, or t
  misc_feature (397)..(397): n is a, c, g, or t
  misc_feature (399)..(406): n is a, c, g, or t
  misc_feature (410)..(410): n is a, c, g, or t
  misc_feature (412)..(414): n is a, c, g, or t
  misc_feature (417)..(419): n is a, c, g, or t
  misc_feature (421)..(424): n is a, c, g, or t
  misc_feature (426)..(428): n is a, c, g, or t
  misc_feature (430)..(432): n is a, c, g, or t
  misc_feature (434)..(434): n is a, c, g, or t
  misc_feature (436)..(436): n is a, c, g, or t
  misc_feature (438)..(438): n is a, c, g, or t
  misc_feature (440)..(440): n is a, c, g, or t
  misc_feature (442)..(442): n is a, c, g, or t
  misc_feature (445)..(448): n is a, c, g, or t
  misc_feature (450)..(450): n is a, c, g, or t
  misc_feature (452)..(454): n is a, c, g, or t
  misc_feature (456)..(458): n is a, c, g, or t
  misc_feature (460)..(465): n is a, c, g, or t
  misc_feature (468)..(473): n is a, c, g, or t
  misc_feature (475)..(476): n is a, c, g, or t
  misc_feature (479)..(480): n is a, c, g, or t
  misc_feature (482)..(483): n is a, c, g, or t
  misc_feature (486)..(490): n is a, c, g, or t
  misc_feature (492)..(494): n is a, c, g, or t
  misc_feature (496)..(497): n is a, c, g, or t
  misc_feature (501)..(501): n is a, c, g, or t
  misc_feature (503)..(504): n is a, c, g, or t
  misc_feature (506)..(506): n is a, c, g, or t
  misc_feature (508)..(509): n is a, c, g, or t
  misc_feature (512)..(518): n is a, c, g, or t
  misc_feature (521)..(527): n is a, c, g, or t
  misc_feature (530)..(530): n is a, c, g, or t
  misc_feature (532)..(534): n is a, c, g, or t
  misc_feature (538)..(539): n is a, c, g, or t
  misc_feature (541)..(545): n is a, c, g, or t
  misc_feature (547)..(547): n is a, c, g, or t
  misc_feature (549)..(552): n is a, c, g, or t
  misc_feature (554)..(555): n is a, c, g, or t
  misc_feature (557)..(557): n is a, c, g, or t
  misc_feature (559)..(567): n is a, c, g, or t
  misc_feature (569)..(572): n is a, c, g, or t
  misc_feature (575)..(575): n is a, c, g, or t
  misc_feature (578)..(580): n is a, c, g, or t
  misc_feature (583)..(583): n is a, c, g, or t
  misc_feature (585)..(585): n is a, c, g, or t
  misc_feature (588)..(589): n is a, c, g, or t
  misc_feature (593)..(593): n is a, c, g, or t
  misc_feature (600)..(600): n is a, c, g, or t
  misc_feature (603)..(606): n is a, c, g, or t
  misc_feature (608)..(608): n is a, c, g, or t
  misc_feature (610)..(620): n is a, c, g, or t
  misc_feature (622)..(625): n is a, c, g, or t
  misc_feature (627)..(627): n is a, c, g, or t
  misc_feature (629)..(632): n is a, c, g, or t
  misc_feature (634)..(636): n is a, c, g, or t
  misc_feature (638)..(638): n is a, c, g, or t
  misc_feature (640)..(640): n is a, c, g, or t
  misc_feature (642)..(644): n is a, c, g, or t
  misc_feature (647)..(649): n is a, c, g, or t
  misc_feature (651)..(653): n is a, c, g, or t
  misc_feature (655)..(655): n is a, c, g, or t
  misc_feature (657)..(662): n is a, c, g, or t
  misc_feature (664)..(664): n is a, c, g, or t
  misc_feature (666)..(668): n is a, c, g, or t
  misc_feature (670)..(670): n is a, c, g, or t
  misc_feature (673)..(676): n is a, c, g, or t
  misc_feature (679)..(682): n is a, c, g, or t
  misc_feature (685)..(686): n is a, c, g, or t
  misc_feature (689)..(695): n is a, c, g, or t
  misc_feature (698)..(701): n is a, c, g, or t
  misc_feature (703)..(704): n is a, c, g, or t
  misc_feature (706)..(709): n is a, c, g, or t
  misc_feature (713)..(713): n is a, c, g, or t
  misc_feature (716)..(716): n is a, c, g, or t
  misc_feature (720)..(721): n is a, c, g, or t
  misc_feature (724)..(724): n is a, c, g, or t
  misc_feature (727)..(730): n is a, c, g, or t
  misc_feature (732)..(732): n is a, c, g, or t
  misc_feature (734)..(743): n is a, c, g, or t
  misc_feature (745)..(745): n is a, c, g, or t
  misc_feature (755)..(756): n is a, c, g, or t
  misc_feature (758)..(759): n is a, c, g, or t
  misc_feature (761)..(761): n is a, c, g, or t
  misc_feature (763)..(763): n is a, c, g, or t
  misc_feature (765)..(768): n is a, c, g, or t
  misc_feature (770)..(772): n is a, c, g, or t
  misc_feature (774)..(776): n is a, c, g, or t
  misc_feature (778)..(780): n is a, c, g, or t
  misc_feature (784)..(785): n is a, c, g, or t
  misc_feature (788)..(790): n is a, c, g, or t
  misc_feature (793)..(795): n is a, c, g, or t
  misc_feature (797)..(800): n is a, c, g, or t
  misc_feature (802)..(802): n is a, c, g, or t
  misc_feature (804)..(807): n is a, c, g, or t
  misc_feature (809)..(810): n is a, c, g, or t
  misc_feature (812)..(813): n is a, c, g, or t
  misc_feature (815)..(815): n is a, c, g, or t
  misc_feature (817)..(819): n is a, c, g, or t
  misc_feature (821)..(824): n is a, c, g, or t
  misc_feature (826)..(827): n is a, c, g, or t
  misc_feature (830)..(833): n is a, c, g, or t
  misc_feature (835)..(835): n is a, c, g, or t
  misc_feature (837)..(837): n is a, c, g, or t
  misc_feature (840)..(841): n is a, c, g, or t
  misc_feature (847)..(848): n is a, c, g, or t
  misc_feature (850)..(852): n is a, c, g, or t
  misc_feature (854)..(857): n is a, c, g, or t
  misc_feature (861)..(861): n is a, c, g, or t
  misc_feature (863)..(864): n is a, c, g, or t
  misc_feature (868)..(868): n is a, c, g, or t
  misc_feature (871)..(871): n is a, c, g, or t
  misc_feature (873)..(873): n is a, c, g, or t
  misc_feature (876)..(876): n is a, c, g, or t
  misc_feature (878)..(881): n is a, c, g, or t
  misc_feature (883)..(884): n is a, c, g, or t
  misc_feature (886)..(886): n is a, c, g, or t
  misc_feature (888)..(893): n is a, c, g, or t
  misc_feature (895)..(896): n is a, c, g, or t
  misc_feature (899)..(899): n is a, c, g, or t
  misc_feature (902)..(907): n is a, c, g, or t
  misc_feature (911)..(912): n is a, c, g, or t
  misc_feature (917)..(917): n is a, c, g, or t
  misc_feature (920)..(923): n is a, c, g, or t
  misc_feature (925)..(927): n is a, c, g, or t
  misc_feature (929)..(933): n is a, c, g, or t
  misc_feature (935)..(935): n is a, c, g, or t
  misc_feature (937)..(939): n is a, c, g, or t
  misc_feature (941)..(942): n is a, c, g, or t
  misc_feature (946)..(946): n is a, c, g, or t
  misc_feature (948)..(948): n is a, c, g, or t
  misc_feature (950)..(951): n is a, c, g, or t
  misc_feature (954)..(954): n is a, c, g, or t
  misc_feature (956)..(956): n is a, c, g, or t
  misc_feature (958)..(959): n is a, c, g, or t
  misc_feature (961)..(963): n is a, c, g, or t
  misc_feature (965)..(966): n is a, c, g, or t
  misc_feature (968)..(968): n is a, c, g, or t
  misc_feature (970)..(970): n is a, c, g, or t
  misc_feature (972)..(972): n is a, c, g, or t
  misc_feature (976)..(978): n is a, c, g, or t
  misc_feature (980)..(982): n is a, c, g, or t
  misc_feature (986)..(986): n is a, c, g, or t
  misc_feature (989)..(997): n is a, c, g, or t
  misc_feature (999)..(1002): n is a, c, g, or t
  misc_feature (1004)..(1005): n is a, c, g, or t
  misc_feature (1007)..(1007): n is a, c, g, or t
  misc_feature (1009)..(1018): n is a, c, g, or t
  misc_feature (1022)..(1022): n is a, c, g, or t
  misc_feature (1024)..(1030): n is a, c, g, or t
  misc_feature (1032)..(1035): n is a, c, g, or t
  misc_feature (1039)..(1047): n is a, c, g, or t
  misc_feature (1051)..(1055): n is a, c, g, or t
  misc_feature (1057)..(1069): n is a, c, g, or t
  misc_feature (1071)..(1077): n is a, c, g, or t
  misc_feature (1081)..(1082): n is a, c, g, or t
  misc_feature (1084)..(1084): n is a, c, g, or t
  misc_feature (1089)..(1092): n is a, c, g, or t
  misc_feature (1096)..(1098): n is a, c, g, or t
  misc_feature (1100)..(1100): n is a, c, g, or t
  misc_feature (1102)..(1102): n is a, c, g, or t
  misc_feature (1106)..(1106): n is a, c, g, or t
  misc_feature (1109)..(1112): n is a, c, g, or t
  misc_feature (1114)..(1114): n is a, c, g, or t
  misc_feature (1116)..(1116): n is a, c, g, or t
  misc_feature (1119)..(1120): n is a, c, g, or t
  misc_feature (1123)..(1123): n is a, c, g, or t
  misc_feature (1126)..(1128): n is a, c, g, or t
  misc_feature (1130)..(1134): n is a, c, g, or t
  misc_feature (1136)..(1136): n is a, c, g, or t
  misc_feature (1139)..(1139): n is a, c, g, or t
  misc_feature (1141)..(1141): n is a, c, g, or t
  misc_feature (1144)..(1146): n is a, c, g, or t
  misc_feature (1149)..(1153): n is a, c, g, or t
  misc_feature (1155)..(1155): n is a, c, g, or t
  misc_feature (1157)..(1159): n is a, c, g, or t
  misc_feature (1162)..(1162): n is a, c, g, or t
  misc_feature (1164)..(1164): n is a, c, g, or t
  misc_feature (1167)..(1167): n is a, c, g, or t
  misc_feature (1169)..(1171): n is a, c, g, or t
  misc_feature (1174)..(1176): n is a, c, g, or t
  misc_feature (1178)..(1178): n is a, c, g, or t
  misc_feature (1180)..(1185): n is a, c, g, or t
  misc_feature (1187)..(1187): n is a, c, g, or t
  misc_feature (1189)..(1192): n is a, c, g, or t
  misc_feature (1194)..(1194): n is a, c, g, or t
  misc_feature (1196)..(1204): n is a, c, g, or t
  misc_feature (1206)..(1209): n is a, c, g, or t
  misc_feature (1211)..(1215): n is a, c, g, or t
  misc_feature (1220)..(1220): n is a, c, g, or t
  misc_feature (1222)..(1222): n is a, c, g, or t
  misc_feature (1224)..(1224): n is a, c, g, or t
  misc_feature (1227)..(1229): n is a, c, g, or t
  misc_feature (1232)..(1235): n is a, c, g, or t
  misc_feature (1237)..(1239): n is a, c, g, or t
  misc_feature (1241)..(1242): n is a, c, g, or t
  misc_feature (1244)..(1251): n is a, c, g, or t
  misc_feature (1253)..(1262): n is a, c, g, or t
  misc_feature (1264)..(1281): n is a, c, g, or t
  misc_feature (1283)..(1283): n is a, c, g, or t
  misc_feature (1285)..(1285): n is a, c, g, or t
  misc_feature (1288)..(1288): n is a, c, g, or t
  misc_feature (1290)..(1291): n is a, c, g, or t
  misc_feature (1295)..(1298): n is a, c, g, or t
  misc_feature (1301)..(1303): n is a, c, g, or t
  misc_feature (1306)..(1307): n is a, c, g, or t
  misc_feature (1309)..(1309): n is a, c, g, or t
  misc_feature (1311)..(1311): n is a, c, g, or t
  misc_feature (1313)..(1314): n is a, c, g, or t
  misc_feature (1317)..(1317): n is a, c, g, or t
  misc_feature (1320)..(1320): n is a, c, g, or t
  misc_feature (1322)..(1323): n is a, c, g, or t
  misc_feature (1325)..(1329): n is a, c, g, or t
  misc_feature (1333)..(1334): n is a, c, g, or t
  misc_feature (1338)..(1339): n is a, c, g, or t
  misc_feature (1344)..(1344): n is a, c, g, or t
  misc_feature (1513)..(1513): n is a, c, g, or t
  misc_feature (1589)..(1589): n is a, c, g, or t
  misc_feature (3677)..(3677): n is a, c, g, or t
nnnncgngnngnnnnnnnanacncgannncgcgcgcgcgannnannnnngnacnnnnannnnngaangangnaancgaagnaccgacgcnncgacgnnnnagngcgagnngacnaacacnancangnacgagnnnnannnnnnngacgnngtnnacgaaganncgnngcnnngncannnnannnngnnnnngnnnacnnccncnnanacgangannantnngacgncgnnnnnggngnagangnngnngggnnngngnnnnnangnngannnngannnnnnncngnnngggnnngnnnnngnnnnngnnngngnnggtnnngannncgnnanngngngannnagnntngnnnnnngngnnnncgnnncggntnngnnngcgacnnngcnnnngnngngnnnnnnnntgcntnnncgnnngnnnntnnngnnntngngngntncgnnnngngnnncnnngnnnnnncgnnnnnngnntgnncnnatnnnnntnnncnntctngnntngnnggnnnnnnngannnnnnntgngnnnctcnngnnnnncnannnngnncngnnnnnnnnnannnntgncgnnncgncnccnngcgngctcgcnacnnnngntnnnnnnnnnnntnnnncngnnnngnnncncngnnncgnnnannngncnnnnnngnannncncgnnnncgnnnnagnnggnnnnnnncgnnnncnngnnnnccangancgcnnaanacnnnnancnnnnnnnnnntnaagctctcanncnngnangnnnngnnnannngnnnaagnntgnnnccnnngnnnnanannnnanngnncncnnngnnnngnngcnnnnanangcnnacgcgnngnnnannnnggcnanngcgnaancncgncnnnngnncnannnnnncnngcnctnnnnnngcgnnaagangcnnnngnnncnnnnnancnnnannccgngngnngtngncnngnnngnncncncnaccnnngnnncggngcnnnnnnnnncnnnncnnancnnnnnnnnnncgancnnnnnnncnnnnccgnnnnnnnnngccnnnnncnnnnnnnnnnnnncnnnnnnngtcnncncgtannnnacannncnanaaanttnnnnantnttnncgntgnnncnnnnncnacnangannncgnnnnnancnnncgncncgntnnnttnnntncnnnnnntntnnnnantnnnnnnnnnannnncnnnnncacanananaannnaannnncnnncnncnnnnnnnntnnnnnnnnnntnnnnnnnnnnnnnnnnnntntntantnntacnnnnccnnnccnntnanannttnaangnntnnnnntcgnnattnnatttngatggatgttgcataaatgtatatattaatacttttgcgaccccctcgcattttgaaggttcatgactagtcatttcattttgtgaatttttcgtgaatttttcgagaaattccagaagatacggttttgaccgttcatgaatcaaaaatggagtaacccactcgcgtnacgagacctaactcaaagtttacaaaattggttttttcttcgaatcacgaaccgacaagtgagtcccccactgcgnacgatttaatactcaaaaaacgcaaattttcgagaaaaaacgtaaattattccgaaaataatgcacgagtcgtcactcagaaaacttttgggactcgggacatttttggtggagattacgatggaaatttacgccgaacgtgaattttcgtctttgcccgcgcctctctccgcgacggccgcgccgatggcgctcgttctcgagtatattttgtaactttacatcttctttccaacgacccctcgttcgtcaccactcgtgcggtatcgagttctcgaccgcgcttcttcgatggacccttcgcccgccccgtcgagctctacggtttcttgtagtttcttttgaatcggtactttgtcccattaagtatgttgagtagtactcatactgtgataacgtatttccgattcgttatgtttttgtgtgcatgtccgcgagagggcttcgacgcggctgcgctcggcgggcgcgcgccacacgacggcgtccgcacgcgcgcgcgaacgcgatgatgacgacgagaatgacgacgacgaggacgatggcgctcccgaagactcggggcgccgccgtcggacgccccgcgaggctggcgacgacgacgtcggtcgtgggtggacgaggaagattcgcgacgacggtgtctcgaccgacggcgtggaaggcgctcgtcgcggcggcgtccgcggccgagggcggcgaggagtacggcgcggcggcggcgagcgatgatgacgtcgcggcgtacgaagaggcggcggcgccgacgcgaagaacggtggtgccgtttacgagaacaaaggagaaggatccgtacaagaggttagggatcgataaggatgcgacgagcgaggaagtgtcgagcgcgtttaattacttgatccgggaacacgccggggacgagcgcggagtggagtctatcgaggcggcgtacgataaggtgatcagtgagcgattgacgacgcgtaagatgcaaaaggggcttagaaagttgaaaaaggagaagaagggcgacgaggttgattacgacgcgccgattgtgcagcgcatcaagtttatgtttgccaagccggatcagcaaacgctcatccgcagaacgttgttgtacgtcatcatctcgggatgggcgatcgcgcagccggcgacgagcggaccggcgttccagatggcgtgcgctttcggggcgtgcgtctacttcttgaacgagaagcgtgggggacagggaactttgggcaaggcgttcagagattccctcatcgcgttggtgctcgcgtggttagttggttccatcgttccggtgtacattccgttgttcccgcaaggcatggccccagaattgattctcgcgttgttctcttttgtcgccatgtgggctacgtgcacctttttgaagtagaggaggcgcataacgcaaccactcgcgcgcgtctcgatgccgccgttgcgtcgcgaggagaggagaaaagaatcagtacacgaaagattgtttgagcgttcctgtcgagacggaacgacgagaaggatttgctgctaatagcttgttataattctaacaaaaaaattattgaacgtcgtcttcccgtctactactaacgttcgtcgccgcgcatcttgcgaatcggtggtacgtaacctgccggcttcggtggaagaatgtcatatcgcaaaagtctgcaatcgactccgccgataccgactgggtgtttgcgcgaagcacgcatgcgaatggctcgagatacctcgggattaccgctcaatacgtatgcggaagaatccggacactcgcgcttgaggaaaaccccgagcgagttccacacctgttcgagcgcctcttccggagtgacatccgctcctcccatcgtcgtgtcgcggtcgtacgtctcttcttcgtattcatcgccctcctctgcgtactcttgttgctcgttccttcgcccgttcccggcgccgatgcgcttaccccaaggtggattagtgacaaccagccgaggggcgtcgggctcgattctcgccccagctcctgatccactgagatgaaacatttcgcaatcatttctgaagacctctatcatcccatcgacgcgagcngtctcggctcccttgcccgcgagtgtcacggcgcccggatggatatcgttcccgatgatgactggtggaacggacgaaatcgcccgagtctccgcaccaattcgcctcgcattttcgagtgactcttccaacgttcgtgggttgtgatccggccagcgctcgaacgcgtagccgatcgtttcgcttctaatgagccccggggcgacgttggccgccatcaaagcgccttcgatgagaaaggttccactcccgcacattggatcgatcaatacgggcggcgacccgtttgatggatcattttgccactgttcgagcatttgggg

SEQ ID NO: 1199 - DNA, 4000 bp, Escherichia coli
  misc_feature (34)..(34): n is a, c, g, or t
  misc_feature (406)..(406): n is a, c, g, or t
  misc_feature (438)..(438): n is a, c, g, or t
  misc_feature (453)..(453): n is a, c, g, or t
  misc_feature (455)..(455): n is a, c, g, or t
  misc_feature (1583)..(1583): n is a, c, g, or t
  misc_feature (1591)..(1591): n is a, c, g, or t
  misc_feature (1854)..(1854): n is a, c, g, or t
  misc_feature (1985)..(1985): n is a, c, g, or t
  misc_feature (1987)..(1987): n is a, c, g, or t
  misc_feature (2180)..(2180): n is a, c, g, or t
  misc_feature (2222)..(2222): n is a, c, g, or t
  misc_feature (2225)..(2225): n is a, c, g, or t
  misc_feature (2279)..(2279): n is a, c, g, or t
  misc_feature (2282)..(2282): n is a, c, g, or t
  misc_feature (2348)..(2348): n is a, c, g, or t
  misc_feature (2413)..(2413): n is a, c, g, or t
  misc_feature (2522)..(2522): n is a, c, g, or t
  misc_feature (2552)..(2552): n is a, c, g, or t
  misc_feature (2764)..(2764): n is a, c, g, or t
  misc_feature (2906)..(2906): n is a, c, g, or t
  misc_feature (2979)..(2979): n is a, c, g, or t
  misc_feature (2983)..(2983): n is a, c, g, or t
  misc_feature (3158)..(3158): n is a, c, g, or t
  misc_feature (3206)..(3206): n is a, c, g, or t
  misc_feature (3208)..(3208): n is a, c, g, or t
  misc_feature (3214)..(3214): n is a, c, g, or t
  misc_feature (3226)..(3226): n is a, c, g, or t
  misc_feature (3228)..(3228): n is a, c, g, or t
  misc_feature (3235)..(3235): n is a, c, g, or t
  misc_feature (3259)..(3259): n is a, c, g, or t
  misc_feature (3280)..(3280): n is a, c, g, or t
  misc_feature (3309)..(3309): n is a, c, g, or t
  misc_feature (3358)..(3358): n is a, c, g, or t
  misc_feature (3397)..(3397): n is a, c, g, or t
  misc_feature (3457)..(3457): n is a, c, g, or t
  misc_feature (3503)..(3503): n is a, c, g, or t
  misc_feature (3508)..(3508): n is a, c, g, or t
  misc_feature (3517)..(3517): n is a, c, g, or t
  misc_feature (3592)..(3592): n is a, c, g, or t
  misc_feature (3619)..(3619): n is a, c, g, or t
  misc_feature (3631)..(3631): n is a, c, g, or t
  misc_feature (3637)..(3637): n is a, c, g, or t
  misc_feature (3649)..(3649): n is a, c, g, or t
  misc_feature (3766)..(3766): n is a, c, g, or t
  misc_feature (3778)..(3778): n is a, c, g, or t
  misc_feature (3820)..(3820): n is a, c, g, or t
  misc_feature (3850)..(3850): n is a, c, g, or t
  misc_feature (3861)..(3861): n is a, c, g, or t
  misc_feature (3871)..(3871): n is a, c, g, or t
  misc_feature (3878)..(3878): n is a, c, g, or t
  misc_feature (3895)..(3895): n is a, c, g, or t
  misc_feature (3898)..(3898): n is a, c, g, or t
  misc_feature (3910)..(3910): n is a, c, g, or t
  misc_feature (3955)..(3955): n is a, c, g, or t
agcgatcaacctattcatcctggcacttataggncgcattctcatagagatgattgtctcgttctctagaaattttcgcgcccccagctggtttacccgctgcgcagagctgctttttgttgtcactgatccggcagtaaaagcactacgacgaatcattccgccgcttcggatgaataatgtttccctcgatttatcggtcttagtgctctatatcgggttgcaattcttatacgtcctcgttgctaactatcttcctggctaatgcgtgacctcaatgctgtcgggtagcaaaatcgactacagtcataggctgcaaacttgctagataccgtcatgtgggtgtggtttgacgggctggtgtaggggtggaaaactacccaattatcgccataaatgtgagagnaatacaggaattagctgcggttttgttaagantaaccccctacttancntaaaaattacctgggatatattccaggggtagcccattacccacggctgggggtctaagaaccctcagatttgcagtaacttcgtcacatttggtgagaaattggaaaaaatttccctagaccacgtttggccctaaaaaccccgctgacgggtgtattttttgatgcatagcgctaaaataacgggtacataacggttagatttcatctttatacttaacatttagacttgaatgtgcgttatggttaacaggaacgttataaaagctatatcaatgatggacgatcatcgttgatattttatgaatctcgaagggaatagttccatgccgctgactccagccgatgtgcataacgtcgcattcagcaagccgccaattggcaagcgcggctataacgaggacgaggttgatcagttcttagacttggttgaagatactcttgccgagattcaagaggagaacgacgatctacgccaacaaacagacgaattgaagtcggaactggaacaagcccgtgccggtgggggcggcggcggtggagctgacgaagcggccatccgtgcccgggtggaagcccagctcaagcagcaattcaacgccgaacttgcggcagctaaggcagaaactgaacgagccaaagaagaagcacgcgcagcaaaggccgaagccgaggccgcgaagaaggctgccgaaggcgccatggttccctccggggagactgcacacccagaaacccacatgcaagccgcaaaggtgctggggctggcgcaggaaatggcggatcgcatgaccaccgaggcacaggccgaatcgcggtccatgctggaagatgcccgcaccgctgccgaaaagcagatctcctccgctgaagcgactgcccgcgctactcttgacgacgcacgcatgcgcgccgagaagcaagtgaacgaagccaccgccaccgcggaacgcctcgtcaatgaggcacgtatccaggccgaaaaaaccatttccgaggcgaatgctcgtgccgaagcccagatcaaggcggccgaagacaaagccaatgccctccaggccgacgccgaacgccgccacaccgaaatcatggccacggtcacgcagcagaagaacgccctggaaaccnggattgcngagctgcgtactttcgaacgcgaataccgcacccggttgcgcaccatgctgcaaacccaattggaggaattggatgctcggggttcggcccaacccggcccccaaagcaacaacaaatagcccagtgttgctgtgaactgataagtttaagccctcaatgtagaccacgcattgagggcttttccctgaggaggtagtgaatgttcatagcggcactgggattgggcgtggccagcttaggatttctcattgcggccatcgtnggcagtagccaaatctggcagtggccggcaatcggctgcgcgctcatcggcctggtgctacttatcgttgaccacattcgctaccggggtgctagccgtgagttggaggaggagccggagccgccccgcangncgaacccgcgcagctctcactcgcatcatcgtcgccaagacccgaaataagttgacgcagcgtgggccacaatccgccgcgcaccgcatccgcatgaaaataccaccaaaaatagcctcccacgaaccgtggccccacctgtgcccgtaactcattatgcatgccgtaatagtattgggctatttgttgtttntccgctaaccccggatcctgggaccgaccatcgctgcggttntgngccccaacctccccaatgcccaggcgcgcgtggggaaacaccgttcccagggcngtnagcgtgtgtgctatgtcggccgcggtggggtgctgcggcggatcgcacgccgtctcatagataganaaaaacacatagtccggttgcctggtgacggtgtgggcgaaccgcattgtgtcctcccatgcgtnttcgtagcagtccggcgacgaccaatagttgagggtgagcgcggtcggccgaccggcctgggctacgacgtcgtgcgccgcggccaccttggcgttgatctccttaggnctggaccccgcccactccccattgggctcnttaccgatctcccacacatccacccattcccccaggtcacgcagcgccgccctggtgcggtcggccacctcggtggtcgacaactccgtaagctgttcggagtccaccacctgcaccatgacctgcgcccggtcgtggattcgggccaccgcatcccggtactcctcgggttgcatcgcagtgtccatgaccacccgcaccgtgagcggggnggggcttgccgccatgaggtccaggctccggcccaggtcatctagagattcgagggtgatgccccgcagcggggtggtgagctgccgcggtggtggtgccggcggcgactctgaggtggtgcacgatacgagaaataaggcngccatgagaaaaacggccaggtggccgtgggcgaagcgtcgtaaagcgcgcatggtttcatcatatgtggtangctntgctggtttaaacggctatgatccggcaatcaccggggagccatctggaagaaccggcagcgactgcctcagtagaaccagacgggtaagaccgacatctccttcaaacgaagcggggcccatgcggcccaaccagggtggtaccgcgtgcaagcgtccctggattcccactgantctttgaaggagaccataccgtgaccaaagtcggcaatgtataccctngngtgganatgaccgggggntnccagcgnttttccgacatggaacaacaggtnctgcgctactgggaccttgancaaaccttccaagcctcctgcgacaaccnggaaaccagccccgaatatgtgttctatgatgggccgccgtttgccaangggctaccgcactatgggcacctgctgaccggctacgtnaaagacatcatccccaggtacaaaaccatgcgcggctacaaggtggcgcgcgtattcggntgggactgccacggcctgcccgccgaactggaggccgaaaaacagntgggnatcaaaganaaaggccaaatcgaggccatgggcctggaaaaattcaacgagtactgcgcccaaagcgtgctgcaatacacggangaatggaaagcctacgtcacccggcangcccggtgggtngatttngataacggctanaaaaccatggacctggatttcatggaatccgtcatgtgggcgttcaaaaccctctacgataacggcctgatctaccagggcttccgggtgctgccctattcctgggccgaacacacncccctctccaancaggaaacccgcctggacgactcctacaaaatgcggcaagancccgcggtcaccgtcaccatgccgctggtngacaccccagnccatccgctnggggccncgctcgccggcgtcaangcnctcatctggacnaccacgccgtggaccctgccctccaacctggccatcgccgtcaanccggacgtcacctatgccgtggtgcgggccgccgacggggaacgc

SEQ ID NO: 1200 - DNA, 4000 bp, Escherichia coli
attgtccgtagtaggtattagatcaccgtcagagtttatacagatttcaacaccactggcgccaacacataaggcatctggatttgtaggcatattcccggtaacacgggcagatataagaccactataaaacccaatagcaattatgataaaaagaaataaacctaaaaacttaaatattttttgcattacttttgcctccggtaattatcaatgtttcgcattgcgctatttgtcggatcgagaattccggcggcgcgttttaattgttcacacattcttctaaacattggattattaacttcctcattaaaagatttatcgactgctgctcgatattcttgattcttggtagcatcaagtttaggccattttcctacttcttcttttgtaagagcgtgtttctcgatgtatgctttagcttggttaaactcttttaaggctttatctttttgctttccacttccttcttttggaaggaacgcggctaaagccctttttttaaccgcaagttgctgttcaagttgcgcgacattaattccgcctgcttcaaaactcgtgattccttttaagtccgttgaacctttttttaatccgtctatatacacctgatcacgattgatttcatattgccgagcttctaccgcagcaggtgatataggcattatttttctccgtaaaactcttccacttccttttcttacagccatattatccctccgtctgtatttttacttatgaaacttcatgtccgaatataggtctccaatcgggagagctaacattacaagacatataacctgcatgttttgaagttagcgtatcaatatcaccagcataaaagaactcaaccggattccattgataaaacttaaaataatccttcattaagtttttagttcccatgaaccaattatcatcatcggtgagccagttgtgccatacaataagctcataacggcctttatggacgttaggattattgttcgcggtattaacctgttttacagaagagattaattcaagaccagcatcctcattacctgtggctacaataagagtatccgggaagtcaagggcaatattatcgcgattagttttatacttaatcattaaccggcgagtagcggccactgaggcaggtgaaaatgaagaagatcctgcattagcctggctagatccaccaacatcggaggtatgagtgctattgcacaaggaaacagcatccgcagtgagtgtcgtgctaaacgaattgtttaaaaaatttgcacctatagattctttttttgcgcgaaatctatcagctaaagcggcagcagatcttttagcgacaccatataaatcatttcttcggaattttttggatattttaataccgagagagtattcaatttcctcaacggtctttttatatgattgtttactttcatcataataaatctgtccgtcgaatgtttgaacaccaccaagatcaccaagcattaactcggtaactatagcttgatccggagtttcaacatcaaagattgccggaatcatggatttaaactctccataccttactgcaaaaatctgagaaagatttttttgtataacatctgggtgattagcttgtgttaatgcgggcatataagcctcctattattaattagtgtaaattcctacatactaccgattagatattttattaatctatcggcgctataaaagtgttattgggcattacaagacttctgaataccgggtgtaatccattcaactgaaaattatgatgtgcgttgggttcaagatcaatccagctttcagagccatcatatctcatttgattgcggatagttctagcggtccaagttccggctgcggcatcagttccgaatttatccattgttgcgtttaagtggtgtaatccgtgcccgataggtggtattttaattaatgtggtgtctgcagcgaccaaagtcgtagtaagcgcggcgatagttagatcggtattatcatcatagttaatgaaagctaattgaccaataccagtgccggcaacagcatataaccagcctccacttatatgatcttcgattgaagttatagtgattgcagttgcggttgctgtggcaatagccatagtatcagtttggtcatattcacatgcgacaacacagccaggacagaatggttcaacttccgccataacatgagccgcgccagtgaacacatcagaatcaccaactactgatacatcatgtttagcaacaaggagtccgtacgcatcagcgccggtttcatcagcaagaacagcactgccgtaagtgtcacttccatttccagcttcggttgttcctggtttgagcatagcgccggcattaatatcagcagctacaccgtcgataggtaattttattagtcctaaaggagagcttataattttcatacacacctcataataattagttcaaggtgagtattcaggttggataaaatttaatttttccaggttggattaatcaaggtggatacttctctaataggatataatactttttttaatgtgtcaagtcttttttaaaaaattcttacttccgcagagtgggcaaccggcgccttttcttacagaattttcacctactccgtcggtaattgtgatagttccaagaccgccattacctgttaatgttccgccggaatgatcggttttatttatatcaacaggatgcccacattgcgcgcatttataaattagcttagggcttttcttgccgtggccttctccggtttttagactattcggccgggctctaccactcccggccgtatgagaaggatacatttttttttcatttaattgtttaggattaaatttcattttaatcgaatgatggagcctcatcaaaattatttggaatttttacatcattgggactacgttcattggactgaacttttttccactcttttttatcgattactccaccgacacggattttttcaccagtcttagaaatatactcaccatcttctatctcgcctttttcagcgccggtatttttaggatcctcatcataagaaatatcgtcgtcatctgcttgcgctatcttttttgtaagtgctttaggagttttcgtaaacccatacttgcctttagcatagaagatagcagtttgcatatgcttagcaatagcttcattagtgagtttttgattgtttggaattgtatcaaagtgctctttaattcctgccctaagttttgtaagccgaggatttttttctatttcatctgcgatagcatcgcgaacattttgacgagcttctatatcgtcttgccttttatttgttacatgagatctatactcagctttaatagtctctcggtctttgccggtttgagtttcaagcgttatccattgatcttcagagaactgatccatatttacagctgtaataggaacagccgcgggagttttaggtttttcaagctcagttattttctcttttagtttgacgttttcaatctcagcctctgtaagttcgagttcttcttctgtaccttcttcttctataacttcctcatctgtaggatcagcagcgtttgccggcgccggttctccatccatgagtattctaaataatttgtacatgttttccctccttgggtttgtttattagtttttttatcttatcattgtcgttagcgatatcctcattaagtctatcgattgatatttgagaagacattatattctttttaattcctttaatgataagtgcgactttagcattagaccgaagtgtgacctgctctttttgagcgtcaggaatatccttagtttcaaggatggttgtgtttattctatttaaagtatcaattattttatcgaattcattgataagtggtttattggtttttaatttagccaattgttgtaactgtttaattctttcgtgcttagttttaatgctaactttaatattagcggcctctatcaatttttgtttgctttccatt

SEQ ID NO: 1201 - DNA, 4000 bp, Escherichia coli
  misc_feature (1)..(2): n is a, c, g, or t
  misc_feature (4)..(9): n is a, c, g, or t
  misc_feature (12)..(14): n is a, c, g, or t
  misc_feature (16)..(16): n is a, c, g, or t
  misc_feature (18)..(18): n is a, c, g, or t
  misc_feature (20)..(21): n is a, c, g, or t
  misc_feature (23)..(28): n is a, c, g, or t
  misc_feature (30)..(32): n is a, c, g, or t
  misc_feature (36)..(38): n is a, c, g, or t
  misc_feature (40)..(43): n is a, c, g, or t
  misc_feature (49)..(49): n is a, c, g, or t
  misc_feature (52)..(53): n is a, c, g, or t
  misc_feature (57)..(58): n is a, c, g, or t
  misc_feature (62)..(63): n is a, c, g, or t
  misc_feature (69)..(70): n is a, c, g, or t
  misc_feature (72)..(73): n is a, c, g, or t
  misc_feature (76)..(76): n is a, c, g, or t
  misc_feature (78)..(79): n is a, c, g, or t
  misc_feature (82)..(82): n is a, c, g, or t
  misc_feature (84)..(84): n is a, c, g, or t
  misc_feature (86)..(88): n is a, c, g, or t
  misc_feature (93)..(93): n is a, c, g, or t
  misc_feature (95)..(97): n is a, c, g, or t
  misc_feature (100)..(102): n is a, c, g, or t
  misc_feature (104)..(105): n is a, c, g, or t
  misc_feature (107)..(110): n is a, c, g, or t
  misc_feature (113)..(113): n is a, c, g, or t
  misc_feature (115)..(115): n is a, c, g, or t
  misc_feature (117)..(117): n is a, c, g, or t
  misc_feature (119)..(120): n is a, c, g, or t
  misc_feature (124)..(129): n is a, c, g, or t
  misc_feature (132)..(135): n is a, c, g, or t
  misc_feature (137)..(137): n is a, c, g, or t
  misc_feature (139)..(140): n is a, c, g, or t
  misc_feature (143)..(146): n is a, c, g, or t
  misc_feature (148)..(152): n is a, c, g, or t
  misc_feature (154)..(155): n is a, c, g, or t
  misc_feature (158)..(161): n is a, c, g, or t
  misc_feature (164)..(164): n is a, c, g, or t
  misc_feature (167)..(168): n is a, c, g, or t
  misc_feature (170)..(170): n is a, c, g, or t
  misc_feature (172)..(173): n is a, c, g, or t
  misc_feature (176)..(179): n is a, c, g, or t
  misc_feature (182)..(182): n is a, c, g, or t
  misc_feature (184)..(189): n is a, c, g, or t
  misc_feature (192)..(192): n is a, c, g, or t
  misc_feature (194)..(195): n is a, c, g, or t
  misc_feature (197)..(197): n is a, c, g, or t
  misc_feature (199)..(206): n is a, c, g, or t
  misc_feature (208)..(215): n is a, c, g, or t
  misc_feature (220)..(225): n is a, c, g, or t
  misc_feature (229)..(233): n is a, c, g, or t
  misc_feature (235)..(236): n is a, c, g, or t
  misc_feature (238)..(238): n is a, c, g, or t
  misc_feature (241)..(242): n is a, c, g, or t
  misc_feature (244)..(246): n is a, c, g, or t
  misc_feature (248)..(254): n is a, c, g, or t
  misc_feature (258)..(258): n is a, c, g, or t
  misc_feature (260)..(261): n is a, c, g, or t
  misc_feature (263)..(263): n is a, c, g, or t
  misc_feature (266)..(276): n is a, c, g, or t
  misc_feature (278)..(278): n is a, c, g, or t
  misc_feature (280)..(282): n is a, c, g, or t
  misc_feature (285)..(287): n is a, c, g, or t
  misc_feature (290)..(294): n is a, c, g, or t
  misc_feature (298)..(298): n is a, c, g, or t
  misc_feature (300)..(300): n is a, c, g, or t
  misc_feature (302)..(302): n is a, c, g, or t
  misc_feature (305)..(306): n is a, c, g, or t
  misc_feature (310)..(317): n is a, c, g, or t
  misc_feature (319)..(321): n is a, c, g, or t
  misc_feature (323)..(328): n is a, c, g, or t
  misc_feature (330)..(330): n is a, c, g, or t
  misc_feature (334)..(338): n is a, c, g, or t
  misc_feature (340)..(344): n is a, c, g, or t
  misc_feature (346)..(349): n is a, c, g, or t
  misc_feature (351)..(352): n is a, c, g, or t
  misc_feature (355)..(355): n is a, c, g, or t
  misc_feature (359)..(360): n is a, c, g, or t
  misc_feature (362)..(362): n is a, c, g, or t
  misc_feature (364)..(368): n is a, c, g, or t
  misc_feature (370)..(372): n is a, c, g, or t
  misc_feature (1315)..(1315): n is a, c, g, or t
  misc_feature (1631)..(1631): n is a, c, g, or t
  misc_feature (1715)..(1715): n is a, c, g, or t
  misc_feature (1992)..(1992): n is a, c, g, or t
  misc_feature (2018)..(2018): n is a, c, g, or t
  misc_feature (2054)..(2054): n is a, c, g, or t
nnannnnnnttnnnantnannannnnnnannntttnnntnnnnaaaaanatnnaaannaatnnattaannannaanannttncnannnaaaanannntannnanntnnnnaangnantnngaannnnnntgnnnntntnnaannnnannnnnannaannnntanaannangnnttnnnnatntnnnnnnttnanntntnnnnnnnnannnnnnnntattnnnnnnactnnnnntnnangannannngnnnnnnngatnanntnaannnnnnnnnnntntnnnttnnnaannnnnaaantnantcnnattnnnnnnnnannncnnnnnnancgannnnnannnnntnnnnannaantagnngnannnnnannnttggttgcgggggctggatttgaaccagcgaccttcaggttatgagcctgacgagctaccagactgctccaccccgcgataaaatttgtatatttgttctattttttaatattatattttatgtttttttaagcaaacaaaattagatattataatctctcattcttttgattttttttgatcttttaatattttcttgtctttctcttttttttctttcagaaggtttttcgtaattacttttaatttttaaaattttaaaaaaaccttccctctgaagctttcttttgagaattcttaatgcttgatcaacattgttatctttaacttctattttaataattacctcctaattaaagatgcattaactaacattaaaaaaaaaggttgtccagctagaattggaagggttttgtagattcgttttttctaagctttttttataattaatcttcaattttttgattttctttgtctatcttttttttctttccagtagcttttaggttagctttctctactgcattttttatatcaatttgagaacagagactggagaccactggatcctttggtgtcaaattagaagaattccaataattgttgttttttatcaaagatacagtattttttgtgctccccacaagttttcctatttgtctatcagacagctcaggatagtttttgattaaccaaagcgctgcgttaggtctatcttgtctttttgataacggaacatacctcggttttttttttcgagtacttatacttatatctaaattttttttacttagtacaagaggtctattactatctttagaagatgctacaatttcttctcttgtcaattgtccagctaggataggattataagcttttattcctttttctacatctccatcagctataccctttacttcaagttcgtgaagattacaaaaancagctatttgtttgaaacttattttagtgttttcaactaaccaaacagcagttgctttaggcattaaaggtctatcattcattactattttttgctcgttgaccgcaaattcttaaattttttaaaaaacttacttactctacctttgtctaagactttttgagttccacctgtccaagcagaatgagatttagaatcaatatcaagtttcaaagtttcgccctcttttccccaagtagacatggtttcaaaatgacttccgtcagtcataataacttttatcttatgataatttggatgtatgttttttttcatntcggaacaatttaatataataaaacaaaataattgacaataaaaaactaactacttcaaaacttcaatcatttcttcattaatnttggagtttgttactaaaatagttttattttcgatatattcgttatttcctttaaaatctgtaacgaatcctcctgcttctttaactaaaactacgcctgctgcaatatcccaataatttaaattcctttgccaataaccatcacatcttcctgcggcaacataggccatatcgagcgaggcactacccattttcctaattggtatcattactctggatgaaaatttgtaatattcatttaatgagagttgtctgtccttatcttttgatttaaagnttggtcctccggtaataattaaacantcttttaattttgatctagatgaaactcgcagtcgntgattatttaaatatgatccattacctttttcagctagaaacatctcatctttaattggatcaaagataattccacaaataatctcttttttatgttctaaacctaaggatattgcaaagtgtggtattccatgaagaaaatttgcagttccatctatgggatcaattatccatttaaattcttcatcatttgtaatttgcccaatttcctcacttaaaatagaaaatctaggtctagctttttgaagttcttcgattaaaattttttctgcctttatatctgatgctgtaacaaaatctccaggtcctttaagagaaacttggagtttttctatttcaccaaaatctctaattatattttttgcagcttttctacaagctttaaccattacatttatatttgctgaagaaagtttcatttatttaatttttttaatgtactccaaagtacttgtatctaaaataattttatctccagaattgataaatggagggaccataatgttaattccattttctaaagtagctggtttgtaagatgatgaagcagtctgccctttgattgttgcatctgtattggtaattgttaattcgacagaagatggtaaatcaaccgataaagcttgatcttcataaaaatgaacatttaccgccatgttttcttttaacaatttgtttttttctcctaatagagatttattaattgcaatttgttcaaagttagtttggtccataaaatgacaattattttcatcctcatatagaaaattaaattttttttcatctaaaactgccctttcaacactatcgctagatctaaacctttcatttaatttagttcctttcttaacactttttaattcgacttgattaaaagcaccaccttttcctggtttgacatgttgtgcttttaaaaccgaccataaatcatttctatgttcaatgatcattcctggtttgatttcatttcctaatattttcatttttttatttaaatttttttattgctgaagctggatctaattttttattattccaaatatagctagagcaagcaataaaatctgctccattagataaaatttttttataattagaactattgattccacctattgcaacggtcggcatattaattttttttttagcccaacgcaatattgctaagttggctttaaaagcagttttttttgtttgagatttaaaaaatgatccaaaggcaacataatttgcaccatgcttttttgcttttaaggctaattttttagaattatgacatgtcactccaataattttattttttcccaatatttttctactactcataaaatccacatctttctgaccaatatgacaaccatcagcactaaccatttttgctataaaaggtttatcattaattaaaaatttaacattattttttctaactatttttttaatttttttagatatttttaataaattatgagtaggtattttttttaatcttaattggaagtatttaactttattagtttttaatacttgattaagttccttataaaactttgtccctcttatcctttgaggtgatattagataaatatatcttttcaattttagttaggcagttatttgtttttccaagtccatactccattttgctgaagtagaaaggccattcattttagatctatgattaaagattttttgagtattgcttgtatctttaatgttttttgcccaatttttaagagcactttgttgtagagctcttccataagaaaaactcattataaaatttgtatcattaattttattaatttcgtttaaattttgtgttgcctcaatttcagtttgtccgcctgataaaaaagctattcccggaacatcactaggtacattttcttttaaacatttgagtgtcattttagcaatttctgctgtgttacttttatcttttgatt

SEQ ID NO: 1202 - DNA, 4000 bp, Escherichia coli
  misc_feature (7)..(7): n is a, c, g, or t
  misc_feature (25)..(25): n is a, c, g, or t
  misc_feature (61)..(61): n is a, c, g, or t
  misc_feature (82)..(82): n is a, c, g, or t
  misc_feature (172)..(172): n is a, c, g, or t
  misc_feature (178)..(178): n is a, c, g, or t
  misc_feature (181)..(181): n is a, c, g, or t
  misc_feature (184)..(184): n is a, c, g, or t
  misc_feature (187)..(187): n is a, c, g, or t
  misc_feature (196)..(196): n is a, c, g, or t
  misc_feature (301)..(301): n is a, c, g, or t
  misc_feature (307)..(307): n is a, c, g, or t
  misc_feature (322)..(322): n is a, c, g, or t
  misc_feature (364)..(364): n is a, c, g, or t
  misc_feature (385)..(385): n is a, c, g, or t
  misc_feature (486)..(486): n is a, c, g, or t
  misc_feature (796)..(796): n is a, c, g, or t
  misc_feature (867)..(867): n is a, c, g, or t
  misc_feature (893)..(893): n is a, c, g, or t
  misc_feature (924)..(924): n is a, c, g, or t
  misc_feature (1221)..(1221): n is a, c, g, or t
  misc_feature (1266)..(1266): n is a, c, g, or t
  misc_feature (1296)..(1296): n is a, c, g, or t
  misc_feature (1299)..(1299): n is a, c, g, or t
  misc_feature (1419)..(1419): n is a, c, g, or t
  misc_feature (1455)..(1455): n is a, c, g, or t
  misc_feature (1476)..(1476): n is a, c, g, or t
  misc_feature (1503)..(1503): n is a, c, g, or t
  misc_feature (1512)..(1512): n is a, c, g, or t
  misc_feature (1596)..(1596): n is a, c, g, or t
  misc_feature (1599)..(1599): n is a, c, g, or t
  misc_feature (1842)..(1842): n is a, c, g, or t
  misc_feature (2003)..(2003): n is a, c, g, or t
  misc_feature (2024)..(2024): n is a, c, g, or t
  misc_feature (2030)..(2030): n is a, c, g, or t
  misc_feature (2036)..(2036): n is a, c, g, or t
  misc_feature (2216)..(2216): n is a, c, g, or t
  misc_feature (2476)..(2476): n is a, c, g, or t
  misc_feature (2496)..(2496): n is a, c, g, or t
  misc_feature (2538)..(2538): n is a, c, g, or t
  misc_feature (2568)..(2568): n is a, c, g, or t
  misc_feature (2595)..(2595): n is a, c, g, or t
  misc_feature (2598)..(2598): n is a, c, g, or t
  misc_feature (2766)..(2766): n is a, c, g, or t
  misc_feature (2775)..(2775): n is a, c, g, or t
  misc_feature (2817)..(2817): n is a, c, g, or t
  misc_feature (3343)..(3343): n is a, c, g, or t
  misc_feature (3465)..(3465): n is a, c, g, or t
  misc_feature (3635)..(3635): n is a, c, g, or t
  misc_feature (3638)..(3638): n is a, c, g, or t
  misc_feature (3647)..(3647): n is a, c, g, or t
  misc_feature (3848)..(3848): n is a, c, g, or t
gagtgtncctgcatcatcactattnaaagtgttcttgatgcgcaatggaatacccttttcnataagaggaataatggttttngcgtgaagtatagaagccccaaagttagccaactcattggcttcttcataagaaagatgacgtatgattttggcttcgggtactaattcnggattngcngtnaanataccatcnacgtgagtgtagttttgcagttcagaggcattgagatagttagccaaaagggctgctgaatagttgctaccattgcgccccaaggtggtggtatcgcctttttcngtagangcaataaagcctgtnactactgctacgtgattgggaggaatagtagcaaagcggtcncgggtgagtttttcggatacngaattgataatttgtgcattgcctactacagcatcggttttgaagatttcacgactatcaacaaaggtgctttctaagcccttgcgtttgagtagtgctgntacgagtttagctgacattagttcgccttgtgccaataccaaatctttagtcttgggactataatcttttaatagagatactccttcaaggagtttttcgagtagctgaaattcgggttcaaacgacactcgaggatcatactgctgttcgtttttcaagtgttgaaaatcggcagtgtaatcctctcctttacttgctttttcaagcagtgcctctaattcatcagtagtattacctctcgctgatactactaccgatagaggttctttatgtgaagtaatgataatgtcaatcaccttttcaataccntcattggcaagtgatttaccaccaaattttaatattttcatatttttatcttttacttagtttgagatttnccgttagattaaaagattttcttcanaaactgttctaactgtttgtgttctatcaanaaagcatcgtgcccgtgtatagagtgtatttcgtagtaatctacaggtttgcccatttcgcgcagctcggctacagtatcgcggttttcttgaggcacaaaatacaggtcagaatcagtacttacgatagtaatatgtgccgtaataggcgctaccgcttcagcaaaactaccacggtctttagaaatatctattgtttttaccaattgattcatcagcttataagccgaaagcgaaaaacgtttgttcagcttttcaccgtgatgcagcaaccagctctctacattgtataactgngtaggcagatgggtagtgcgttcgaacttcattttcagtgattgnggggtacgataacacagcatagcgtgcagncgngcatcgtgcaaggggtgtgtagagtttttgagtatctgctcttgcaagaggcagttgcctataatccaatcggttgccttccagtcagcggctactattactaattgctgaaagtagtcnggcgcaagagctgccatctcccaagcaataccgccncctaacgaacagcctactaangcaaaaacagagtttagccccaagtgntctttgagngctatattgaataagcgcgccacatctaccgccgcccaatgctggtagttagttatcatatcttcctcgcgtgcgtggaagccnttnccgggaatgttaaatgctactacggtatatgtatcagtattaatcactttggcagtacctatagcctctgcccaccaaccgttttcgcctgctacttgcgaattgcccgtaaaagcgtggtttaccactactaccggagctgtgcctaaaggcttaccaaacagttgataggtaaccctaagtgaaggaatacgcactccatacgaagtaacgaaatcaagcaagtcataatgcaaaatatcnaacatagcttactttttaatatctaccattaaccgttaataattgtttgatttgtttgctctatatattgtgttagctcctcttttcctgttttattctgtgctgaagttacaaaataaggaggaaattcctcccaccactcgagtagcgcttctttatangctgctacattgcgctctatngcttgnggtttnagcttatcagctttggtaaagataatagcaaatggtatagcccgttcgcccagccactgcataaactctacatctattttttggggctcgtggcgtatgtctactaacacaaaagcactcaccaactgctcgcgttgctcaaaataatccgtaataaagcgctgaaatacttgtttagtngtttttgacacccgtgcataaccatagcctggcaaatcaactagaaaccagcggtcatctattttgaaatgattgataagctgtgttttaccaggacgccctgaagtcttagctaaattcttacaattggtaagcatattgataagagacgatttcccaacattagagcgccctataaaagcatactcaggcagcctgtccttaggacacttggccacctgtgagttgctcattacaaattcagctttttttatcatctnttgctaattatcaattattnattgttttaagccactggtctaatatttggttaaactcttgnggtcgctccatcataggggcgtgcccacanttgtctatccaatgaagctcggcattnggnagtagttccttaaattcttctgctactttaggaggggttactatatcatttttgccccagataaggcaagtaggagtggtcatcttaggcaaatcttttgccatattatggcgaattgcactcttagctaatgctaatgttttgatgagtttagagcgatctgaaatnttagcaaanacctcatctactatctctttagtagccacagcagggtcatanaacacctcttcgcatttttttctgataaaatcatagtcaccacggcggggatacccatcgctcatagcactttcatacagccccgaactacctgtaagcactaaacctaacacatttttagggtacagcttagtataaagtaagcctacgtgtccgcctaaagagtttcctaacaagataactttttcaaatttcttgtattttataaacttttgaatgtatttagctaatgtttttaccgaagtagtgagcaaaggcattgtgaaaagaggtagctcgggcactaccaccttatatctatccgaaaaaaaagaaattacgtcttcaaaattactcagcccccccatcagcccgtgtaatacgatgataggggttccttctccttgttcgatatatgaaaatttaccttctttttttacttctgttgtcattggtatttatcaaaaagatttttgaagcacaaagataatattttatttctaattgtacacaacaaaagagaaaaatattttttatctgtttattnttcaagtgaaaaacaagtgattatcaagtcttctaaaaaataaatacataaaaaaactttgccaaagtcgtgaaactttggcaaagttttttatcaattttgcgttctttgttttgtatttngtctttggtattacgcctctccggtgataccaaaaagcggaatagtgtgtgtatcgcttttttctgctatcataccgtgagcatcttcgtagtggcgtatgttttctgccaaagcccctaacagacgcttagcgtgctctggagtgagtatcaccctactgcgcaccttnccnttaggcatncctggcattacgcttacaaaatctactacaaactcagtagccgagtgattgatgatagccaagttagcatacaccccttgcgctatctgctcgtccaactctatgcttagttgtccgttgccttcttttatctcttctaattcgctcatagtctatctcgattttttcttttccactactggttctaagtcagctttagancctacgattatcttctcataacgtttaagaccagtacctgcaggtatacgatgtcctacaattacgttttcttttagtccgtctaacgaatctaccttaccgcttaccgcagcctcattgagtactttagtagtttcttggaacgatgctgc

SEQ ID NO: 1203 - DNA, 4000 bp, Escherichia coli
  misc_feature (1985)..(1985): n is a, c, g, or t
tccaggaacgcggcgagaaccaccccgcctcggcccgcttgcagcactcggcccgaagtccatcgcccacaggctgtcgcagcagctgcccactgttgaagtcgccgatgtcgatcactcgggctatcacccgatcggggttgcgcagcgactgttcggcaggttgccacagatcagctcagccgcctgccgaagagcttcaggcactccgggtacaaccgcttctgggtcagtgcagccccctcaccaggggcagcactgaccctgctggcgcagcaggtggtcggcgagtaccagggcccaccatcggtacggcccgcggcagcacgccgggatcgtggcggcctttggctgtgccaacaggctctgccgatcggcgacagggggtcgctcctaggccggctcaatctccgcgtttctgctcgccgctgagctggcggatgtactccttgtggctgaccgtggctgaacggctcggccgctgcatccgcatccggagcagactgcgctggccttcctccagcaacgagagctccgagccacggcggcgcgcgaagatcgcgaagccacaggccagggccaggcaggcgccggtgttgcgcaattgctccggcaacaaccgcagcggatccgtggccggcaacgccgcccgctggcgggcgaactgcacctgggcctgatccagcgccatggtggcttgggccttgagctgtggcagcggcagctccagatcggccggcgatacgccggggccgttcaaggcctggaagcggctcttgaggtcggccttgctggctgcctgggccaccgcctggtgcaggccggccagctgccgctcagcccgctgcaactggctgcgctgctcggcgccgccgcggctctgcagccgcaggccggcactgatctgcagcggcgccagcagcagaaaaccgaggctggcggcgatggccagctgcgcgaaacgctcctgccgcgccctgatgcgcggatcgcggggctcgaggtggcgggccagctgcagcagcgctagggccagcagcggcagcgtggctacattcaccagcacggcaccgaggcggatctgccaggcggcatcgaggggctggaaggggaagaggctgccgagcacgagcagggcgaacagcagggcgaacaccagggctagctggctgaaactgcgcaccggcatcacgggcaccacggggagaacaacggatcaggtcaacaaaaaggccccgccgtggcggggccagaagagggaagacaaagccgagagctcaggcctgtgacgcggagccggcgcgcacacgggcccgcaggcgacggctgtgggagaaggcggccgccgcaccgagcaggggaagggggcccgggacggaactgggtggaggagcggtaccaacccgcacttcgatgctgtcgctgcccacggtccaggtgccgagcaggcctggggtggcactcagattgaggccggccagggtttgccctgaaaacaaacctgagccgttgattacatttccctggacgtagctactgtcgagaactagttggttaaaaattccaaacaaaacaacgttgtcgcccgtgtagctgctgaatgagaacgtggtgctgcccccggggccaaagctggccggtcctgagactgcaagttgcaggccgctggcaatattgccggttgagaccagagcaaggtctggtccaataactgagccaaggctggtgctgccgttggtgccagacggaagaccggagagtgagccagcaatattcaatccaacatcgctgccttgctggatgaattcaaaaacaaggagggcatcggcatcgcccgcgttgatcacagtgcatgccgaagccgtcaagagagcgatgggaaaccttagtcgcttgagcatgccgccgatcgccatcatctaagccgtaaagacgctgcaatgctgacctccggcgcgtttttgtgggggggggggggggggccngtgatccggccgtccccatctctgggcgctccgccatgcggaaaagggatcagttcggcgaagattctgaggaaaattccgggttgcgcctggctgttgctcgtgaacggctgctgatgccctggccgcgcggagccctggttggcgccgctgacgccgcgcgtcggtagcagacaggcccaggagagcagcgcctcgacttgtctgcagggctgccgcacccatcctctggcccgaagacatcggcgggcagttcatcgcccagggcatccggggtgcgggtggggcatagagcttgtccagcacccgggcctggcgttgcccggcccattaccagcagatcaacatccgagcgacggctggctgtgccccgtgcccagctgcctcaccagactctccagtgacgccagcagcccgcagcgaaacccaacaggcagattgttggcctcgattccgcggtgtagcgccggccgtgcgtcagccccaggtttgattccagcgcctgggctttccggttgtgctcaggcgctgcgctcccctgcgagaagccctgggcctcacttcgggccgctcccttgtgggctgacaacagatggctgtgatcttgctcgtccattgcctggcggagtggtactccctgcccgccggcagaggcgtgtcgtccgacgcacggctgagccagaaatcccccgttctcctgttcaggggcgacggtgctggcctcccagcaggcgattcagtccgtcacccctggaaggctccggatgccatagtcttaagaccatggtcattctgagtggcatggattcccctcctcctgcgccatccgccacgccgcagcaggtctcgaaatcccacttcaaggcccatgccctggagttgttccgccaggtggaggccagcggtgaaccgctcgtggtgaccgatcacggccgccccaccctggaggtgcgcccctatcgcccggcccggcccgactccgacccactggaacagctgcgcggctcggtcctgcgcttcgacgatccgttcgcgcccgtcggcgagaacgactgggaagccctggcgtgatcctgcttgattcccatgcgctgatctggtgggcggatggggatcgtctgcggctgtcagcgactgccctggccgccatcgatcaggagatcgagagcgccgtccgtccgggcggttccccagggctgctggtgtcggcgatcagctgctgggaagtggcgatgctggtgaaccggggtcggctcgccctcagccttgatgtggagcgctggttggcgctgctggcctcccatccggccgtgcgctttctggctctggatcccgccgtggccgtggcggccacgcgcctgccgcagccgttccacgccgatcccgccgatcgcttcctggtggcccaggcccgcgcgctggggattcccctgctcagcgccgacagcaagatccgctcttatgaccatgtgaacagcctgtggtgagcaggcctacctcctttgagcggggctcgtgcatccagcgggagcccgctcgcgtgggcggcttcaccagaggctgcactggccctgctggcgcagcaggtgatcggccagcaccagggccaccatcgcctccaccatcggcacggcgcggggcagcacgcagggatcgtggcgacccttcgccgccagggtggtggcggcgccggaggcgtcgatggtctgctgctccttgcggatcgtggcggtgggcttgaaggccacccgcagccggatctcctcgccgttgctgatgcccccctggatgccgcccgagttgttggtggcggtgcgcaggcggccgtcctcgctgggcaggaaggcatcgttgtgctcgctgccccgcagcagagtgccgccgaagccggagccgatctcgaagcccttggtggccggcagggacatcagtgccttggccagatccgcctccagcttgtcgaacaccggcatgcccagagccaccggcggccgtcgcaccaggcactcgatcac

SEQ ID NO: 1204 - DNA, 4000 bp, Escherichia coli
  misc_feature (1102)..(1102): n is a, c, g, or t
  misc_feature (1986)..(1986): n is a, c, g, or t
  misc_feature (2328)..(2328): n is a, c, g, or t
  misc_feature (2370)..(2370): n is a, c, g, or t
  misc_feature (3109)..(3109): n is a, c, g, or t
  misc_feature (3113)..(3113): n is a, c, g, or t
  misc_feature (3117)..(3119): n is a, c, g, or t
  misc_feature (3122)..(3122): n is a, c, g, or t
  misc_feature (3125)..(3127): n is a, c, g, or t
  misc_feature (3131)..(3131): n is a, c, g, or t
  misc_feature (3133)..(3133): n is a, c, g, or t
  misc_feature (3141)..(3143): n is a, c, g, or t
  misc_feature (3149)..(3149): n is a, c, g, or t
  misc_feature (3153)..(3153): n is a, c, g, or t
  misc_feature (3156)..(3156): n is a, c, g, or t
  misc_feature (3161)..(3161): n is a, c, g, or t
  misc_feature (3164)..(3164): n is a, c, g, or t
  misc_feature (3168)..(3169): n is a, c, g, or t
  misc_feature (3173)..(3173): n is a, c, g, or t
  misc_feature (3184)..(3186): n is a, c, g, or t
  misc_feature (3188)..(3188): n is a, c, g, or t
  misc_feature (3191)..(3191): n is a, c, g, or t
  misc_feature (3195)..(3195): n is a, c, g, or t
  misc_feature (3198)..(3201): n is a, c, g, or t
  misc_feature (3205)..(3207): n is a, c, g, or t
  misc_feature (3210)..(3210): n is a, c, g, or t
  misc_feature (3212)..(3212): n is a, c, g, or t
  misc_feature (3215)..(3215): n is a, c, g, or t
  misc_feature (3219)..(3219): n is a, c, g, or t
  misc_feature (3229)..(3229): n is a, c, g, or t
  misc_feature (3240)..(3242): n is a, c, g, or t
  misc_feature (3251)..(3251): n is a, c, g, or t
  misc_feature (3254)..(3254): n is a, c, g, or t
  misc_feature (3258)..(3259): n is a, c, g, or t
  misc_feature (3263)..(3264): n is a, c, g, or t
  misc_feature (3271)..(3271): n is a, c, g, or t
  misc_feature (3277)..(3277): n is a, c, g, or t
  misc_feature (3279)..(3279): n is a, c, g, or t
  misc_feature (3283)..(3284): n is a, c, g, or t
  misc_feature (3293)..(3295): n is a, c, g, or t
  misc_feature (3299)..(3299): n is a, c, g, or t
  misc_feature (3301)..(3301): n is a, c, g, or t
  misc_feature (3305)..(3305): n is a, c, g, or t
  misc_feature (3307)..(3307): n is a, c, g, or t
  misc_feature (3309)..(3309): n is a, c, g, or t
  misc_feature (3311)..(3312): n is a, c, g, or t
  misc_feature (3314)..(3314): n is a, c, g, or t
  misc_feature (3316)..(3317): n is a, c, g, or t
  misc_feature (3320)..(3320): n is a, c, g, or t
  misc_feature (3330)..(3330): n is a, c, g, or t
  misc_feature (3334)..(3334): n is a, c, g, or t
  misc_feature (3336)..(3337): n is a, c, g, or t
  misc_feature (3339)..(3339): n is a, c, g, or t
  misc_feature (3344)..(3346): n is a, c, g, or t
  misc_feature (3348)..(3348): n is a, c, g, or t
  misc_feature (3358)..(3358): n is a, c, g, or t
  misc_feature (3397)..(3397): n is a, c, g, or t
  misc_feature (3406)..(3406): n is a, c, g, or t
  misc_feature (3421)..(3421): n is a, c, g, or t
  misc_feature (3431)..(3431): n is a, c, g, or t
  misc_feature (3629)..(3629): n is a, c, g, or t
  misc_feature (3668)..(3668): n is a, c, g, or t
  misc_feature (3842)..(3842): n is a, c, g, or t
tatggtcctggtagtactgtagcacaagatagaaataaaattcatttctttgatataaaaactggaaatcttgtacacacaatacgagatccggaacattcaactgaccctggcaaaaaatggccactgtttatggatgtatcagaagatggtaattggttagtggtaacatgttataatagaactgtgaacggagttgtaaatgctggtagagcttatatctatgatgtttctactaaacaactagttcacacattagacagaattcccaatgatacttctcttttatatggatattcggccgcaaaaatcacaaattcccatacatttattccacattcgtattatgacaattacacaggtggcatacacatgtatgagaattccactggcaattacataagaacaattacaagtccatgggctaatcatactttcacgggatctcccaatggagttcagtctatcggtggcacccctggcggatttgcggcatacggtggtatttacgctgttagctcacacgcatatgaatggaatggtagtacttatgcatatacttatagaatctttctatattctctcgttacagggaatgtagttcttactattgataaaccaggtaacggttcaactggatggggcgagaaaattacattagattctaattatattgttactactgacagcctcagagtttacatttacagtatccaaagtggaaatcttgcaggtacagttaatcggcctgcgcagcctaccgatcatcaatatgacacaggatatgattggggtaaactttcaaatttagagatacaaggaaatagaattattgtaggatcagaaaattggagtaatatttacggcggcagtgcagagtctggcagaataacaattatcaccggtgatatgtgggaaaatgcagttgctggtcagcctacttttgcgagtgtgtcacctgcatcatatagtggtggcgcaaacagaagtttaacattgactggtactaaatttgaattagatactacaatagagttgattgattctaataacatttcaactacagtaaccgatttcacaacaatggaccctaatactattntatttaatacaccaaaatcatatacaaccactgaaggtccattaagtataaaaataacatcatctacgggcgagtctgttactgaagtaaatgcattagcgacaggttttaatccagtatggacaacagcatcaggtaatttgtcatctggtactgcggatggagcaggaacaaatgcacattatttcttaacagaagatgtatcagaaacaatagttgcgactgatacagaagatccagaagtaatatatactatagaaagtggtagtctaccaccaggttgcacaattaatgctaattctggtgaaatttctggtacaattccagcagcagatattggaagtgatactgtatataactttactgccggtgtaaatgattctggtggtaacttaacaaccagagattttagcataacagttaaaaattctgctgctgttaattatgatttcacatcatttacatttagaggaaaagcaactggtgccacggggccaacacttagcgaaacattggctttttacgatacaacaacttattcttggttaaataatactacatatttcaatgttacttcagacaatatgcaaatttggaaggttcctgcgacaggtaactatagaataaaaacaattggagcagcaggaggatcaccaactgcacaaatgaatattgataatggcggaatcggtggatatggatcatatactgaagcagatatatatcttgaacgaaatgcacatttgttaattgttcctggacatatggggtcagcagattcacttggtggcgcaggtggtggcggtggcagttttgtagcgtatcgtccatctggagcaggaacatcatttaccgatgctgatcttatttttgcaggcggcggnggcggcggcggtgcaaagatgtctacttcaacaggcatagctattggtggcaacggcggtcttgagtttaaaggtgaaaactcaccagatggatatcgtacaggtgcaggcaatagtgcaacacaaggaagcttaactagttacgtaggcgataatgcctatggagatggcggcaattggggcggtggaaacggtgcaggttggcttggcgctggaagagcaagtggcggcggtgctggctctgctggtagatatggttccggcggtggtgcaggtttcaacgattcatatgttcctctaggcggtggccaatatcgtattgaaggtggttttggcggcggnggctctccaggcggtgctaataatggagaaggtggtggcggnggtggcggtggctacagtggcggcgcaggtgattatgctgactatggaggaaatgcaaattggtccgattatagatatataaatggcggaggcggaggtggtctatattatcatagtgatcctactcttccatctatatctaatttggctacaggtattaatacagtcctagagcatggtactataataattacactgattccataataacacaaatataatctaaagaaaaactcggcattaatgtcgggttttttgttgtttatctacataactacgaatataaatgataaatactgttgtaattgggagaagccgcaatgaataaagatagcatatggtggaatgcacctgaatatttcagtagatggagattatttccacgtgcatttatttcaatgtatatatatcttctttgggatgttgttacgtggtttatggaattgcctgatccaaatatgaatcaagcaggacttgttagtgttatcgttggtgcaggagcagcatggtttggactatatgtaaattctaattctactaagttcgaacaaactacaccgacaatgccaactactacaatatattcagatgaatcaagaagagaacctagtagagaacctgaacctaaaaaagaaataaagagtagatactaatgagtaagaaaaatttcaaacatcatattcgaattcaattgaatgaagaattagacaagcatgacataactggtatcttaatggtncttnaaannnctnttnnnaacntntttgatgnnnataaanaagnagnaaatnatnatanngaanataacaaacannnanatnattntannnnagannnttnantancagnagcagaaggngaagcaatacnnnacgttatanaanagtnnacannaaatganttcttntnaganntaacaacannngaanantacntncnanntnannatnaatatgaaantganannantagtnnncntcataatagntggatgaatgaaaaagtaacagaaggatggagatacggnttagaattnagtgaagatcaaaanactgatcctngattaagaccgtatcatgaattgactgataaattaaaaaatttatagtataacttgacaatattaaatttatagtgtataattgatattgtagaaacataggtagaaaatgtccggtataaggaaaacatatgacttagcagaaaagaactatttcaagttcttcggagtcaataaacaacaaaatttgagtgtgcgnagtcttacaacacactacaaaaaaatactcacaatactnaatgaagaagaagatagtttttataaacgtgaaaagattgagtttgcaacaagagcatttgaaacactcgcagatcctatatcacgtgcaaaatatatcatatcattaaatggctttgataacgatgtgcgtgatagtgcagaacctagtgattttgtttttgtaaatcaattnaatttccaatatgataatgccaatacaaaggaagatataaatgaatttatattggaacttaaaaatcaaactacatggatcaaagaacagatagaagacagtattgatgtatatgaaaactttaaggttgcagcagggttgttgaatcgcttttatga

SEQ ID NO: 1205 - DNA, 4000 bp, Escherichia coli
  misc_feature (1188)..(1188): n is a, c, g, or t
  misc_feature (1513)..(1513): n is a, c, g, or t
  misc_feature (1597)..(1597): n is a, c, g, or t
  misc_feature (1990)..(1990): n is a, c, g, or t
  misc_feature (1994)..(1994): n is a, c, g, or t
  misc_feature (3974)..(3974): n is a, c, g, or t
  misc_feature (3982)..(3982): n is a, c, g, or t
ttttcgaagcccgaaagtacgccagagcccgtcgtcctgaaagcctactcgcatgtaatttgtgattagtttgcgattatccagcttcagttcgttgccaggtttaccattgatcaaatcaacagaaaaatgatctttccattgttcgccccattcggtgcgataataacgcttcaggacaaataccagctccttcacatactggggtatgctttccagccattcattgtatgagtcggtgtaatctttactggatggggtgagcagtttgatgacagatcccaacgagcgttcgtggctgagaatgccacgctgatcgacccgagatgtgtcgcggaatcgatttgaaaaatctcgattcagaatcgcttcgacttgttcgaggtcttccttgatattagcgacgatgaccggtccctggatgatggcgtctgttaccggtttggagatttccgatttgcctccccctgaaacagtgcagggtttatggcaaatcagtccctcagccaccgtgccaatcagacgccaggatcggttcccgggcggcttttccagatgtactttgtagccggagggtctgacataggttttcccttgaagtaacttgatggactcggtgcgacctttccagggccagctgactcgttggctatggaggtcgaaatgcacatcctccgagacatagatgatatccgagaatcgcttgtcgatggcatagccttcaggctgcaagtccatgatatcttcgaactggtctagcatctcctcaaagctgtgccccagtcgcttgacgtgcagatgcccgctgaactcctcgcccaggtcatagctcgggtagaccaaagctcctccagcatgctcctcttcggccaaaccaaacagattggccgagaaactgatctgcgtcttgacctccttcttgcaatagccgaaataattatcagcaatgatggtgaccatcaccccctggtcatcccgtgcgcagagcttgaatgccgtgcctccattgtaaagttccttggggtcttcccaacacatgccttgctcccgctgcctaggcgttgcctcatcatgatggggtaaaccggcttccttcttggtgatttttgtcaggtggggtgcgaggatgacgcagccggtgtgacccgtccagtgatcggtatccaacccggcatcattctctggtanatttggatcccccccattaccgaagatgctctcgacgaagtccaagttgctgaccaaatttcccggggcaaaaaaacggatctcgctgcgcttctccttcatgactccggggacttctgggatgaccaaaggtcggagcagcagggatacaaagcactgtgccttttcttcttgttcactggtgaagggtaattgcatcagttcggccggcggattgagcgcatggcgcagcatccggttgaaagtgcgcctgggcgccgcaatcttgtctgctgggactggaagacccgcatcggcgatatgaaagacgccttgggttgtgcgncgatcattgactggattgtgtaggacgccttgatggatgcggtaggaatggatgatgtcggatttgaattcatctcccttggcngggagagataaattgcgcgcgactccgtggcgatcgaggacaaaagttcttgatgggagtcgagggatgtctccagtgtcctggagaaaggtgtccagccattgttggatacgccagtcagcagggcagaggtaattggccagtaatcgcttctgttctcgatgattggcaatgagtgactcagcgacatcccgaaatggagaatctgattctatgtcggcagtcgggcaacctaaggcggccaattttaagttgatatattctaccaagtgctgacttgggtagacatcaccggttgcgggcaaaccgatgagcttttgtaatttgctggtattcattcgagttttgagaaatgcagtgaacagaaggcactgagaagctccaactaggcgncatnttattccaagaaggcaggctaggcaagcatgtgactgagcgccggctgctttcagcctctcgatgggtggattttacttgggttgcggcttgcttgatgctgtaggatacccctacgtgaaaatggttggttcatggcgcccggagttgctgatcaaataccttgccttcctgctgatgtgctttggcatgagtggcgtgagcctatactggttccagcgggctgaagcagctggtgtgggcattgattccagcaccagcctcttgcttagcaatttgatatttcttcaattgggtatgcttggggcgacctggctgcttgtgcgagaccatggactgacctgggatcaggtctttggctttcagttcgttgctcctggcaaaatcctgtttcaagcttttaaggtagcctcatttggcttcgtggtctcatgcctattgggaatggtggtgcatcaaatttttgaattgctgggaagagaaagttccgagcaggctattgtggagctcttcgttcaaaatcagggtctagggcaacgagccctgatttgctttacggctttgctgatggctcccctggtggaagaattactctttcgcggcgtgctttacaccgttttgctgcagtatctgacaaggccgctcgccttgattttgagctcgctactctttggtctggttcatttccacgaaatcggtttgcttcccttaagcgcgctcgccttgttgctggccctctcctacgagaaaagtcgcaacctctgggttcctatttttgcgcacactttttttaatttgatcaatcttgggctcctgctatgggtgccctccttggattgagagaacaaggtatgaatcgagaggtagaactgattaagtcccttacccaaggcttgcctcgacgccaggacacgatcctgggtgtcggtgatgattgtgccatcgtcaaggctggccccgagcaggaatggttgcttaagaccgatgccatggctgagggggttcattttttaagggatgatcctgcggtcatggttgggcgcaaggcaatcagccgacttttaagcgatgtggctgccatgggaggtgagcctggcagcgtgttggtaaccattggtgtgccgaaggatttggatccggcgtggctagatggtttttatgaaggtctaagggatgtcgccaagcatcatgaattggccatcgtcggaggtgaaaccattcagacacctgggccatttttttgctcccttgccatgacgggtcatgtgcaaccaggcaaggctatcctccgaagcggagcccgtgtgagggatgctatttttgttaccggggatttaggtggttccatcgccggtaagcacctgaactttgaaccgcgcatcagagagtccagatggctagtcaagcagttcgagattcatgccatgattgacctttctgatggccttgctggagacctaaggcatctctgcgaagcgagtgaagtgggggccgagttatggacttccttcattcccatcagcaggtcggcaaaacaacgagcccaatccggtgagtcccctcttcctgctctggctgctgccttaagtgatggagaagattttgagttgctcttcacggtggatccctcggaggctgttcgccttaaagatgcctggaaagaggccttccccgagaccccactgagttgcattggtaggatcatggagcagcccaggctcatgctcagggatgaccagggtcttcgtccccttaccctcgatggatacgaccatttcaacgcatcctgatcagaccttcgagctgggcaagcagtgggcccttgagctggatcatgcttggaccctaggtttttcgggcgatttaggcgtcggtaagactcgtctgatccagggtatttgtcatggatggggtgtcaccggtcgagttgtgtcgccaacttattcgctgattcatgaataccaggctaacggaaaggtgnttcaccanctggatctttaccgactc

SEQ ID NO: 1206 - DNA, 4000 bp, Escherichia coli
  misc_feature (1025)..(1025): n is a, c, g, or t
  misc_feature (1418)..(1418): n is a, c, g, or t
  misc_feature (2341)..(2342): n is a, c, g, or t
  misc_feature (2355)..(2355): n is a, c, g, or t
  misc_feature (2367)..(2367): n is a, c, g, or t
  misc_feature (2655)..(2655): n is a, c, g, or t
  misc_feature (2697)..(2697): n is a, c, g, or t
  misc_feature (2889)..(2889): n is a, c, g, or t
attcgacgccgaatttctcaagcacataggccaccaagcccaccgacggcgaaaacaaaaacaaccacagaaccccagccaccactggcgcgaccgcataaggcaagattagcaggctgcggtacaaccagatgccccgcaccacgcggtcggcgaaaaaggccaaaaccaatgacagcgaaatccccaagcctgccaccaacaccgaaaacaaagcggtggttttgaacgattccaaataggtctcatcgcgccacaaagcgacaaagttgtccaggccgctccactgaaccgaagtgccaaaagcatcagactgttggaaagactgcaccaaagcctgaccggctggccaaaagaagaacgccaaaatgatgaagccttggggtgcaatcagcacccaaggcaaccatttggaccgaaaaataacttttttatcgctgctcaaaatcattcaagccagccgacgcgaacaccggctggcttgccttaaaaaagacctaaaaaatcaggacttattggctttttcaaacttctcgagcaattcattgccgcgcttgacgatgctgtccaaggcgtctttggcagactttttgcccgcccagacttgttcgagttcttcgtcttcaatggttcggatttgcacatagttgcccaaacggatgccgcgcgacttttcggtggtcttgcgaatcatctggttgaccgacacgtcagttccggggttttgcttgtaaaagcccgaagcttctgtgatcttgaaggcttccattgtcacaggcaagtaaccggtgcgcttgtggttcaccgactgaacgactgggtcagacaggtaattgaagaaagctgcaacgcctttgttctcttcggctttcttgcctgccatggcccagaggctggcgccaccgatcacggtattctgaggcgcaccggccacatcggggtaataaggcaaggtgcccacggcaaacttgaacttggcgtttttgctgataccggcataagcagccgatgagttggtgtacatngcgcactcgccagactcaaacgtggcaccggcagcaccggcgcgacctttgtaaacaaacaggccttgttgggccatgttgcccaagttttctatatggcgcacatgcaaaggcgagttaagaaccaagcgggcgtccatgcctttcatgccgttgcctttggtggccaattcggtgttgtgccaagtggagaagctctccaactgggtccaaccttgccaagcagtcgtgaaggggcacttgtggccgctggctttgagtttggccgcggccaaagcgacctcaggccatgtttgaggcagcttgtcggtcgaaacgccagctgccttaagggcatccacgttgaaccacatcacggtggttgagctgttgaacgggaaagacatcatttgnccgttgggcgctgtgtagtaaccggacacggcgggcacataggatttggggtcaaatttataacctgcatcgcgcatgattttttctgctgggaccaccacgcctttggaagccatcatcgtggcagtgcccacttcaaacacctgcaaaatatgtggggcattgccagcgcggaaggcggccacggcggccgtcatggattcgtcgtagttgcccttgaagacgggcacaattttgtaatccttttgcttgccgttgaaatctttggcaatgtcaccaacccattcgccaagtgcgccagacatcgagtgccaccactgaatttcagtttgggcttgcgcgccgaagcttgcaaatgcggccacagcgacagtggcaagtgtttttttgtagttcataagtactcctttgagtgttgtatcaaacatcagcataaattcatggtttgtacatcgtattacaacctcatgaagctttggtgacaacccgagctttccatgatgaaactcaaagtctggggtcactgtccccacctgtggtgcgtgaattagcccctgaagtaaaatatcgctcaaatctcatgaacgctccaaccacgctccaacacctcctgcaggctgacgattcgtcaccccgcttgcgcgaaattccttacaactacaccagcttctccgatcgagaaattgtgattcgtttgttgggaaatcgtgcctgggacctgctcaatcaactgcgagacgaacgccgcacgggcaggtctgcccgcatgctttacgaagttttgggtgatatttgggtggttcagcgcaatccctatttgcaagacgacttgctggacaacccaggccgccgaaagcagttggtagaagctttgcaacaccgcttgggtgaagttcaaaaacgccgcacacccgaagcagatnntttgcgagacggnttggtgggtganttgttggtgttggcgggccatgcggtcaaattgtttgatcaaacttttacggccatggcccagttgcgccgtaagacgcaaaaaggactcggcaagcacacagccaaagacaacatcaaatttgatgccttgtcacgcgtgagccatgtcacagatgccactgactggcgtgttgaatatcctttcgtggttctaacccctgacacagaagccgagatggccaatttggtcaaagcttgtttcaccttgggcttgaccatcattccgcggggcggcggcacaggctanaccggcggtgcagtgccgctgacttggaacagtgctgttatnaacaccgaaaaactcgaggccatgtctggcgtcgagatgcttcagttacccgggctcgacaaacaagtgcccaccttgtggaccgaagtgggcgtggtcacgcagcgcgtggccgatgccgcagagcgcgccggttgggtgtttgccgttgatcctacgtctgctgaggccagctgcattggcggcaacatngccatgaatgcgggtggcaaaaaggccgtgttgtggggcactgcactcgacaatttggccagctggcgcatggtcacgcccgatgcgcagtggctcgaggtgacccgcttgaaccacaatcttggcaagattcacgatgttgaaatggccagctttgaattgaaatatttcgaagccaatggcaccacgctggttcgcgaagaaagactcgacattcctggctcgaccttccgcaaagaaggcttgggcaaagatgtgaccgacaagtttttggcaggtttgccaggtattcaaaaagaaggttgcgacggcttgatcaccagcgcgcgctggattttgcaccgcatgcccgatcacacgcgcacggtttgcatggagttctttggcaacgccaaagacgctgtgcccagcattgtcgaaatcaaagacttcatgtttgccgaacaaaaacgctcaggcgtgttgctggcgggcctagagcacttggacgatcgttatttgcgggcggtgggctacaccaccaagtccaaacgcggcggtctccccaaaatggtattggtgggcgacattgcgggcgataacgccgatgacgtggccaaagtcacttctgaagtggtgcgcattgccaactcacgcagtggagagggcttcattgccgtgagtcctgaagcgcgtaaaaagttttggttagatcggaaaaaaacagcggccattagcaaacataccaacgccttcaagatcaatgaagacgttgtgattcccttgccgcgcatggccgaatataccgacggcattgaacgcatcaacattgaattgtccttgcgcaacaaaatcaagttgtgcaacgagttggaactgtttttaagcaagggcaatttgcctttgggcaaagacgaagatacgagcgaaattgcttctgcagaattgctagaagagcgcgtttcacaagctttggcggtggtgcacgaggtgcgtgacctgtggcaaggctggttgcacggcgtagaaactttattccctcaattgcaagaccacaccttgcgtgccagttggaaaacgcaaatcaagacaagcttgcagaccatcttcacgggcgctgccttccagccta

SEQ ID NO: 1207 - DNA, 4000 bp, Escherichia coli
  misc_feature (272)..(272): n is a, c, g, or t
  misc_feature (365)..(365): n is a, c, g, or t
  misc_feature (401)..(401): n is a, c, g, or t
  misc_feature (1202)..(1202): n is a, c, g, or t
  misc_feature (1454)..(1454): n is a, c, g, or t
  misc_feature (1480)..(1480): n is a, c, g, or t
  misc_feature (1987)..(1987): n is a, c, g, or t
  misc_feature (3681)..(3681): n is a, c, g, or t
  misc_feature (3957)..(3957): n is a, c, g, or t
catcatcattttctaatgagtccagaatccatctcttcaaggcttcatattttgagtcaaagccacctagttcttcagcggcaataactagttcatctagatcaccaaatctaccgagaattctatgctctgcctcatcaattgtaatatcagttgcttcgtcttcgccctctgtgtcaaaattaaatgcatttcgagcagcatctcttagttgtgtacggacatgatttgcaaacgcaggcagacaactactagccattctttcaggaacnaccaatgcccaatcaaaacggtcagaatcaggatgccgcagttgcattaaatgccatgtccaccttcttgctgcttcatacaatctccattcngcctcagttaattgtacatctaatgtgattgcatcncggcgtgctaaatctagttcaagatcacgttttcttgtccgcacaatcaattcatttagtggccgtaattgccgtagtaaatctgccaacaatcttctctgcttatccaatgattctcctgtccaaccaagtgggtcttgacatagctctattgcggcccgcaatcttgggtctgcagtaaaaccaggcgtcaattccaacatatccaatgctttaaccgccgctgctaaatcaggtatggtctgtgacactgcatccaatgatgtattgagtaaacgcattggtctcatggtattctgaaaagacatgaaatcgggccacctatcaggtgctagaagggagagttgcacccataattcctcatttgaaagattgactggagttgctgtgaggaacagagtgcgtttgctatgaagtgttagaagttgaaccgcatcatgtaggcgactgcgcgggtttcggcagtggtgtgcctcatcaacaatagttaggagcatttcaggaactccctcctccatcaactcacgcaacaatgttggttgccttagaattccatggctagtgactacaactattgattcaccttgcctaatcctttcaaacgcctcacgcagttttgcaccagtattagcttcaaaaccttcaaggtcacatctatgaaacatctcttgaatccatttcagtcgtaagccgcccggacaggctattatcacacccccaacttctccaatagaatgtaaacgacgtagaacatgaagtgctgagacagttttgcccaatccaacttcatctgcaatcaanaggccattccaatgactagatgcaagccgagacgctggtaaatgttggtgaggttggtcttgccagcgcccgaaatgtagcaaggggcagtaatctgtaggtggataacgtatgtctagatcataacgcaacagattccattcatcttggtcaagaaccaccccgctaacgcccgcttcattactctccaagtcgctcaacagggaactaccgcaaattgaccgtacttgaatatacgcgaatccagaggcnatatttgcaaaaaatcaaactattcnggtggaagcgttacactaatttccttgacagtattgagtactacatgtgtagttgagcgagccacaccatcagtggagagaactgtcttagtaaaatcatccaagtcatctctatctctaactcgtgcaaataccaaactatccatttcaccagtcacatcatagactgcaaaaacgcggggatccgatgctatgagttcttgaacttctagcaattctcctttcattatttgaagacccacaaccaccgtcatctcccagccaattttatctgcgtcaagattggcggtatatcctgtaatgactccgctgtcctctaatttaccaagtcgattagaaaccgtaccaagggcgacgccaacttgttctgcaagtgacctcattgatagccgtccatctacttgcaatgctgaaattaattttctgtctacctcatctagctccattttaccactcccggagtcggctcggattacaggcggcatttgaacgttatcgtggaaaatngcgatattattgttcagatgaacagttattcacatgttatcattatatgagttacattcgttcatttttcaactaactggtaaaattaagtcaagaacccaaccacccagttcttcaacctctactttccaatgtgtaggagcctctgttgttgcatcctcagagcaccttaacttgacagtgaaatttctactagttcctgctacaactaactgctgtttggggacctttcctaatttccaaggctcatcagcatacgcccccattaatgtcacatctcgtttgccagcagtaattacaacctctgcataccaacccttcttatcttgaagtaaagttcccctcaatcttggtagccctacctctctttgttgatcttgacgaatgatgattattaatccaacaattactgcaatagcaattagaatagtaggtaacattccagcggtatctggaatgctgctaggtgtttgcaactgtacagaatcaaccccatatatcgagttattaaggtcgtcaacgaagagaattactacttctaatctccacaaatcttctgctgagaatggtatgccatcctcttgcagacgttccgtacttatttcctgactccaattagtgacatttccttcatcatgatagaaagatgaagtccacccgtaatgtttcactaggtcgtgaacaaccccttcccctagaggggagtggtcaactgtgatgaaccatctgagattgagtgattcctcaaggtcttccaatggtacaatctgagcagatagatacaatcctggaataatatcttcaccaccttcttgtacatctgtggattcagatggaaaatgtgcgtctacttccaaagtaacttcaactaattgaaacaactcacttgcattattggaagcaacctcgccattaacccatgatgaacacctttcagctccaagtgctgttgctctttgttgccctgcaagtgtacttccatcaccataagcccagtttagccgtacatcgtttttcgaagcgtcatcaagattacattctgtttcgtcaataaatgattccaatactgcggtggtaatattttgagagttacccccttcaacaattccaagagagattggtgccatcataaataatagtaaagccatcacaaaagaaagaaccttcacgatatcacctccaaccctaaggagtgagagagcagaaggcgttcggcatcgggtatcatcaatgtcaacttaccacccagccatgcaggtagccaccatgtaacctcttctttagtgaagcgtagtactaccccacccaatctttcattttcaagagtgggaattgattgaatcacctcttcaacactttggccccctttagtaagaattgtagtcaacagttcttggcctatttcatgaacatgcacctgacattttggggctgtgaggtgtattccttttgaggtgggcctctgcaatatgcccttgcgcaattcccaagttggaagtcctgcttgtatgatttgaaatggatgccaatgccctccgggtaattttttccctcgcctcaacattctttcaccaagccagaaccaatcatgaatttcatatgatatggtgtagattttactaccacggacgaacattttttcaggttccacgccccaatcatttgaaatggtctgaagtagttctgaagatgcnggaatctgttggtttctattgggttgaggtggttctcgcaggggcttttcagccatttccgaatcattcagtaatgcttcagcaacctcactatcacctatgtgcttgaaagccgcaacaaagaatcctccagaatcattttcatcattccaaatccgtttgcattttgtcaattctgccaacatgtcactatcaaaagattgagcagcatttctttccatcccattccattctgtcattcccggcctcgtaaccagccccgggcaataatcagtnataccagtttcatcaagaataagaaaatcacaggtgtggagta

SEQ ID NO: 1208 - DNA, 4000 bp, Escherichia coli
  misc_feature (1213)..(1213): n is a, c, g, or t
  misc_feature (1972)..(1972): n is a, c, g, or t
  misc_feature (1978)..(1979): n is a, c, g, or t
  misc_feature (1982)..(1982): n is a, c, g, or t
  misc_feature (1984)..(1984): n is a, c, g, or t
  misc_feature (1986)..(1987): n is a, c, g, or t
  misc_feature (2652)..(4000): n is a, c, g, or t
gcagaggttgtgaggaattcgtactataatgtaaagttggcagactcaaagaaaccttaggagctctaccatgaccaattgacgccggtggagacatatggctgcaaagactcccaagatgacgagaaatctccagcgactcagcgaaacgaggtgaaccgaaatcgcgaattcatcacaaacgagtaggcagcatactgcgacgactagaactgctcgttgagtctgaggtgctcaagatgtctcaggaaccagaccgaataacgccaatatgccaaccaaaatattcagccacgatccaagtctcaaaattctcgcccaccacagcaaagcacatcatacatacatacatcctctcaaacacaaatctagaccaaagctggttctcaacagtccagatcccaccaaagcaactgcggtaccgatgcgaacgtggatcgagctcatcatagcgcctctgcctcacgacagagaagccaacagcaatcactgggtcaaataaaaggaataaatgtaaggcactcacatcaagatattgaaaatagagaggcactcttcttgaggaattcttagaacttcgatggctaccagcatcctaatcaatcagaatatccccagttggatgttcggaactctcataattatcaaagcctagtagaaatatcctaccaagacctgtaattgttcaaccgcttgaagaagatgatcgatgccacagcccagatggagtgcattggatgccagaagctcatccctaccattcagttttatgagcacctccttgagtcaaatgatgctgatactgaagaagagtaacttgcgatgtagagccacatgcagctccatggagaggaattccagaagatgactcagaatcaccagcagttcaatcagttttatgatgagtccatctccgatgccaattgccttgcaatgtccaacagcaatcttcacaatgagtctcatggcgcctatttgaaccctcatcaagactctcagcaacgagtgggtgctttctaggccaattctcgtccaagtcgttccaagtcagcaggcaggccaaccgccaaccagcaatagcatcttctcacacagccacagctcgctatgacagggtagccattcttggccgaagactaataataataagacaccttcaagccaaagttcctggaacaatcgcagaaatatcaaaatgccctgataatcatcnaaaagcagtaggtgcaaatagccgagcagagagcatagctccaagagttccaagaagtcatccaaaagcaagatcaagcactgctggtatatagccaccagctccagcaaaatggagctgacggctcttggcaacttcttcagtcagccaactcaagccagctgccaaatggtgagatcgaggagcttcagcagctgaaggatgacaagcaaagaatgcagctcagcatggatcgactgaagctataactggaacaaaagaagacatagctcgccctcctagaagagaagaaggcagagaacgagctcgagctaaagaaagagaagaagttcttgctcgagtccttcctcaaggccagagacgagaacaagtagctcattgaactgcagcagcaacagttcatggaggcatagtgcagcaacgaccaatttactcagaatcagcaaaattacaacgacgatcaaataataaatgaaaatgattttgatcttcaaaactacgaaaacaatggcgaagagcatcctctctatgatcataacgatgagagtcaataattgataaaccttcaataatttgagctacagagtcagcatacatcatcacatcatagcagcacgtagaatcagaccaatatgaatttgaacaagacagactacatcttggcttcaggcttctccacccatatgaattctcaggtcgccaacatgaaagctctgaatgccaatcaataccaaacatgtgctgagtagaactaccagnaaaatnngangnannaggctcagcagaaccagcagcagaccgttggggctgccaagctggcaagtcagaagaagtatcgcctcaagatcattgattcatcacataccaatacgagagggaccaatagtcagtattagtcagccagcaatatttctagagcttccatataattgcccggaagtcagtagcaatacgcgcggctcaaagagggcgcagagcaccactcaggtggcggtgatctggacgatgacgtgaatgatctcagctccaagaggaggcaggatgaggagacgctctctcagattgaggagctcgagaagaagctagaccagcagatgagcggcatgtacgagccccacaggcacaccgcccatgataattacgatgaggtctctgaaccaaccaactatcccgtctctggcgatggccacatctccagcaagcgaagctccctccgccagccacaacccaagagtacctcgcacttccatcaacaacaagtgacctcaagcaaaaagggttacatcgtaaacccacaaccgatgttctacaacagcaggcaatcacagtggcaagaggtcggccacaacggccactacgttctaaattaatgactcaaagtaatgtctgatactacctatcatgttaattaattataatcgacatttaaaaactaaatnnnnnnnnnnnnnnnnnnnnnnnnnnnnnnnnnnnnnnnnnnnnnnnnnnnnnnnnnnnnnnnnnnnnnnnnnnnnnnnnnnnnnnnnnnnnnnnnnnnnnnnnnnnnnnnnnnnnnnnnnnnnnnnnnnnnnnnnnnnnnnnnnnnnnnnnnnnnnnnnnnnnnnnnnnnnnnnnnnnnnnnnnnnnnnnnnnnnnnnnnnnnnnnnnnnnnnnnnnnnnnnnnnnnnnnnnnnnnnnnnnnnnnnnnnnnnnnnnnnnnnnnnnnnnnnnnnnnnnnnnnnnnnnnnnnnnnnnnnnnnnnnnnnnnnnnnnnnnnnnnnnnnnnnnnnnnnnnnnnnnnnnnnnnnnnnnnnnnnnnnnnnnnnnnnnnnnnnnnnnnnnnnnnnnnnnnnnnnnnnnnnnnnnnnnnnnnnnnnnnnnnnnnnnnnnnnnnnnnnnnnnnnnnnnnnnnnnnnnnnnnnnnnnnnnnnnnnnnnnnnnnnnnnnnnnnnnnnnnnnnnnnnnnnnnnnnnnnnnnnnnnnnnnnnnnnnnnnnnnnnnnnnnnnnnnnnnnnnnnnnnnnnnnnnnnnnnnnnnnnnnnnnnnnnnnnnnnnnnnnnnnnnnnnnnnnnnnnnnnnnnnnnnnnnnnnnnnnnnnnnnnnnnnnnnnnnnnnnnnnnnnnnnnnnnnnnnnnnnnnnnnnnnnnnnnnnnnnnnnnnnnnnnnnnnnnnnnnnnnnnnnnnnnnnnnnnnnnnnnnnnnnnnnnnnnnnnnnnnnnnnnnnnnnnnnnnnnnnnnnnnnnnnnnnnnnnnnnnnnnnnnnnnnnnnnnnnnnnnnnnnnnnnnnnnnnnnnnnnnnnnnnnnnnnnnnnnnnnnnnnnnnnnnnnnnnnnnnnnnnnnnnnnnnnnnnnnnnnnnnnnnnnnnnnnnnnnnnnnnnnnnnnnnnnnnnnnnnnnnnnnnnnnnnnnnnnnnnnnnnnnnnnnnnnnnnnnnnnnnnnnnnnnnnnnnnnnnnnnnnnnnnnnnnnnnnnnnnnnnnnnnnnnnnnnnnnnnnnnnnnnnnnnnnnnnnnnnnnnnnnnnnnnnnnnnnnnnnnnnnnnnnnnnnnnnnnnnnnnnnnnnnnnnnnnnnnnnnnnnnnnnnnnnnnnnnnnnnnnnnnnnnnnnnnnnnnnnnnnnnnnnnnnnnnnnnnnnnnnnnnnnnnnnnnnnnnnnnnnnnnnnnnnnnnnnnnnnnnnnnnnnnnnnnnnnnnnnnnnnnnnnnnnnnnnnnnnnnnnnnnnnnnnnnnnnnnnnnnnnnnnnnnnnnnnnnnnnnnnnnnnnnnnnnnnnnnnnnnnnnnnnnnnnnnnnnnnnnnnnnnnnnnnnnn

SEQ ID NO: 1209 - DNA, 4000 bp, Escherichia coli
  misc_feature (407)..(407): n is a, c, g, or t
  misc_feature (1775)..(1775): n is a, c, g, or t
  misc_feature (2351)..(2351): n is a, c, g, or t
  misc_feature (3146)..(3146): n is a, c, g, or t
  misc_feature (3185)..(3185): n is a, c, g, or t
  misc_feature (3730)..(3730): n is a, c, g, or t
gcttatattaatgaacatagttgcagaaggctttggcgcaatagccgttgttttaaattttattgggtatcgccaaactaacgtagacaagtatttgcttatttctgcgtttgccttaagtgcacttagcgtgcatttttttatgctagatgccatggccgcaggcattggaacactgcttgccagcgttcgtaactttattgccattaaacatagaagcaatgccattttatttttctttgttgcggtgaatctaggcttcctcgcttatgagtggtttgtgctagagcacagctggataatcttcattgcctatgcgtcttcacttatttttacagtgggatctttggttatccgcaatacgcacactattagaaaggtttttcttgttgctgaaactttggggntgttatatgccatttccgtgggcagtatttttggaacggtattcaatgtaagtaacttgatcagtattttaagtaagctgcgcaagccctaacgctttagcaataaaactcaccttatcaattagtctaatttgcccactttaatcccgtttagtcgggctgcttttctgcgacttacgctacctgctatatggcttttcatatagtctgcacacccttgtaggccttgccctacatgacttataccaaagttcaatgagctaaagttcaatatcaatttgcgtatgtaagcgtatcattattaatcagtaagtatggtttcagcaatttttcctctgaatgtacggaagtagactcagtgtgtagtaatgaggggagtgtgcgcagtgaaattagtagataactcacaacaatttgaccaatcacctacgcttgaacaatcgtttcagagcgctattaatgaaggcgctgcggtaaacgtgtttgagcttgctcaacagtttaaaaataccaaccctgcttttaaaaaacctcaactggttgaagaacgcacgagtttagagacagagcagctgtggaagaagcgtctttcgatgctgcttgatgcagaaaataaacttatgaaagttatacgttttcgcaaaattactggtatatttaccgttgcaagtatggctatgtttttattttccctgtacatagcgccaacaatgtcgccagtattgttctatggccttattgttgtagctgcatttggaatggcaacgtatccggcgtggttgttagcgtctaaaagcaataaaaagcagagagatgacatttctcgtttgttttataaaagtaatcacgagattgaaatgtcggacggtaaaattacgttaattaacagggcgaactatgcaagtgtaacgcaaatacacgtattggatcgcaaacttggactattcgcaaactcgtagacaacactacacctctcagttcattattgttctgttagtagcatcctttattcttggggtgctactgctggcacccatggatgcattgggccagcttctctcttcaatcgttatcctcattgcaatatccttgtgcagcaaagaagcgcggcacacgcaaaaataccagcatttattccgcattttagctctggtgctagccattgcgcttagcgtcaggtatttgctgtggcgtggtatttacacgctaacctactcagattttctttcaatgattgccgtctggctattatttggcgctgaaatttatgcggggatcacttcagtgttaggggcgatcgttaacgcgtttccgctcagtcgaccgcttttgtccctggaaggggtagataaatcaactctgcccagngtagacgtcatgatcccgagttataacgaagatgaagggatattagaagttactatccgcgctgcaaaaatgctcgattaccctaaagaaaagcttcgtattcatttgcttgacgatggcggaaccgaccagaaaattaacgctgaaaaccctgtgtcagcggccactgcaaaacagcggcgacaagatttgcaagcactgtgcaaacgcttggatattacctatcacactcgagcaaaaaatgagtttgccaaggcgggtaatgtgaacagtgcaatacaaaataccacgggtgatttgattgttatcttggatgctgatcatgttcctacttcggattttcttgatagaaccgtgccgtggatgcttaaaaacgagaaggtctttctcgttcaaacccctcattttatggctaacccagatcctgttgagcgtaactacttctctgcgtttactcgcatgccttcagaaaacgacatgttttacggcactatacagaaaggcttagactactgggggagttccttcttctgtggatcagccgcattgatgagaagaaagcacctcgatttggtngggggcatttccggcgactctatcactgaagatgcagaaaccgcgttagatcttcacaaaatgggctacgagtctgtatatgtggacagacctatggtaagcggccttgcgccagaaacttttgatgcgtttattcagcagcgtatgcgctgggcacaaggcatgacgcaaattttactactcaaaaagccttttaaagcgcaaggactaaaatggtatcagcgagtgggctacatgagttcaatcatgttttggctgttcccgtttgctcgcatcatctttttgcttatgccactggcgtatttggtctttgggcttcaggtttaccatgcatcgatgctggaaatttttgccttcaccctgcctcacgttattgccacatacatgatatccaccatgctctttgggcgaacccgatggcccttagtgtcagagttatatgaaatactacagtgcgcatttacgctaaacgcattaatcaaggttttcttaaagccgcgggcaccttcatttgttgtaacaccaaaaggagagagtcttgacagaacctttgtatcgccactatcgagcgtgttttactggctaatattggtaatcacattcgcattagggagcggtgtctataagttcataacagagcctcttacacgcgaacttactgtggtggtcatgttgtggaatgtatttaatttgattctattgttgtctgttcttagtgtgttattagagcggaaacaggtgcgtagtcaggcacgcctaccagctacgaacagtgtcgttattaagactacaagngatgaagcttgggttggagatttggtcgatctttcgctnggtggagctcggttacgcttgaaaggtgagggagcgttagtacctgaaaatgccacgctcacatcgtggagtcacgcactgaataagaacgttcatttgccaattagcgttctgcattacgacaataggtcaaaaattcttcgagtacgctttatgcctcaaaccgaagaacaagaaaacgaagtcgtcgcctattcactgtgtgatagtctgcgctggatgtcgtttcaacgaagaagaacaagggctatctcatactggttcggcgcaaaacatgtgttgaaagttgggttaaagcctgttttattgcatatgcttgtattaatggggaagttcgccgggaaattaggtttgcttgctaaaccggcaaaggaaaatcaatgataaaaaaataccttatgttcatcgtatgtttgtgcatgccttttaccctagcggcgcaaactgacacgtatcgattaaccgacttttttggcggtgaaagtaccgtgcgcttgcagggaaaatctgcctccattgatattccaattccccttagttcagtnactgatgtggacagcgcgctacttacattagaagtggtcagctcgcaggcgttaatcaaaaaacgttctcagctgtatgtgagattcaataatgcgaccattggacagattgcgttcgacccagacagaccttctcttgtatctgaaattgcgatccctacttcattgtggcgagccgggtttaactctctgacactagcggtaagtcagcactatgccgagcaatgtgttgacggcagtgcgcctgaattgtggagcgaaattaatgca

SEQ ID NO: 1210 - DNA, 4000 bp, Escherichia coli
  misc_feature (695)..(695): n is a, c, g, or t
  misc_feature (704)..(705): n is a, c, g, or t
  misc_feature (771)..(771): n is a, c, g, or t
  misc_feature (1422)..(1422): n is a, c, g, or t
  misc_feature (1988)..(1988): n is a, c, g, or t
  misc_feature (3103)..(3103): n is a, c, g, or t
tagtgtgattgcaagaattcttggtggtaaaaaagctttatataaagttccattaccaaaaaaaaatcatgaaaaaaaagcaattctagaaacttatacaaaagaatactctgcagagtatcaagctcaagcattgatagatattgctaaaaagctaaataaaaaaattaataatttaaatgaaattaaaaaaatagatatttttaccagtcatcatacacattatgtaatcggtacaggtgcaaatgatccacaaaaaatgaatccgaatgctagcagagaaactttagatcactcaataatgtatatttttgctgtagctcttgaggatgggaatttgcatcatataaaatcatatactaaatcaagagcaaaacaaaaaagtacaataagaatatggcattcaattaaaacacatgaagataaaaaatggactaaaaaataccacgacccaaaaccaaaaaataaatcatttggagcaaagacagtagttactttaaaaaacggaagaaaaattatagaaagtttaaatagagctgactctcatccatacggtgcaagaccttttaaaagagataattacataaataaatttctcattttaacaaaaaatataatttcaaaaaaagaaagtgatcgttttttaataactgttcaaaaacttatgaaattaaaagttggacaacttgataagntaaatattnnaattaaaaaaacaaaattaaaaagaaattataaaaaaggaattttctaatgcattttgtcaaaaanaatccagaagaaaaaaggaaagattttgataaaaaacttaaatcaaaaaaaattttgagatttcctggggcttacaatccactgacagcaaaattaattgaagaaataggttatgatggtgtgtatgtgtccggtggagtaatgtctaatgatttaggttacccagatattggtttaacaactcttaaagatgtaagctacagatcaaatcagatttctagagtaattaatctaccaacaattgttgatattgataccggatttaaatcttgtaaagaaacaattcaaacttttgagaattgtggaatagcagcagttcatattgaagatcaggttgaacaaaaaagatgcggtcacttagataataaagaacttatctcaaaagaagaaatggttaaaaaaattaaagaatgtttaagttctagaaaagatcaaaattttaaaataattgctagatcagatgctaaagacgttgaaggaatagataaaatgattgatagatgtaaatcctatgttgaagcaggagcagaaataatatttcctgaagctcttaaagatgaaaaagaatttgaaattgttagaaaatctctggactgttatttattggctaatatgactgaattcggtaaatcaaaaatattaaattacaangaattagaaaatcttggatataatattgttatttatcctgtcactactcagagattagctatgaaaagtgttgaagatggtttgcgtgtcatttatgaagatggacatcagaataacattattgataaaatgcagaccagaaaaagattgtatgatttggtcgaatatgaaaaatacaatacattggacgagagagtgtacaattttagctccgagggacacgaataatgcataatgaaataaaaaaaggattattggggattgttgttgatgaaacaacaatatctcaagtaatgcctgaaataaattctctgacttatagaggttatacagtacaagaactttgcgacaaatgcagctttgaggaagtagcctatttaattataaacggaaagcttcctaacaaaaaacaattaaaaaaatttattaaagaagaaagatcgaatagaaaactttccaatcaaatattaaaagatattgaaaaaatgcccaaaaaagcacatccgatggacgttgtaagaactgcagtgagtttgatggctctggaggataaagagacaataganaactctcctgaggcgaatatgagaaaggctatgagaatattttcgaaaacacctgctgctgtagctgctttctttagagtaagaaagggtaaaaagataataactcctaagaaaaatttgtctttttcagaaaatttttttcatatgtgttttggcagagtgccaaataaagaaatagtaaaagcatttgatgtttctttgattttatatgctgaacatagttttaatgtttcaacattcaccgcaagaacaatcacaagtagcttatcggacattcatggagcaataacaggtgcaatagccagtttaaaggggccattacacggtggagctaatgaggaagttatgcgtatgatgaataagattaaaaagcctgaaaacgctctgaaatggataaacaatgctcttgataaaaaagaagtaataatgggctttggccacagagtttataaaaaaggagattcaagagtaccaactatggaaaaatattttaataaagttgttaaaataaaaaaggataaaaaatttcaaaagatttacgatgtggttaaaaatgtaatgattgaaagaaaaaatattcacccaaatgttgattatcctactggaccaacttatcatttaatgggatttgatattgatttttttacaccaatttttgttatttcaagaattactgggtggtcagctcacattatggaacaacatgctgctaataaattaataagacctctttctaaatacagtggagagaaacatcgaagagtgatgcttttaaatcaaagataattcaattttaagaaaaagcttctgcccaagttccttctgttgctgccttagaatattctgttgcacgaccttcaaaaaaattcatatgctctactgcatttaacattgtatccaaccatgttaacggatttttttctatttgataaattggtttcaatcccaattgaatcaatcttctatttccaatccatctaatataatcttttatctcctgtgaagttaatccttgtataggtcccattttaaatgcaagatcaatgaaggcatcttcgtgagaaactattgttctacatgcttcatagatttctttttttagttgagaggtccanacttctggtttctcttctataaattctctgaacaaccttatcattgaattacaatgcaaagtttcgtctcttactgaccaagtaacaatctgacccattcctttcattttattgtgtcttggaaaatttaataaaattgcaaaacttgcaaagagttgaagaccttcagtgaaagcgctgaatacagcaattgtttttgctatattgtgatctgatttaacatcaaatccttgcatgtaatcatatttatctttcatttctttataatttaagaatgcagaatattcggattctggcattccaattgtatctaaaagatgagagtaagctgcaatgtgaaccgtttccatagaagcgaaagaagacatcatcattaatacctctgttggtttaaagacattcatataatgtctaatgtaacagttgctgacttcaacatcagcttgagtaaaaaatctaaaaatttgcattagtaaatttttctcttccggcgttaaatttttttgccaatctctaacatcgtctcctaaaggaacttcttcaggtagccagtgaattctttgctgagttaaccaagcatcataacaccaaggatacctaaaaggcttataaacaggattacctactaataagcccattttttttgttttttgtttttccccctttttttttaagttttctactgacatgataaacattcctcgtattctatctcatccgatttttcagtttttgatttatatacatttaattttacatctgttgatgatccattgttaatgttctctgctctttgaatagattttgacctgcaataataaaggcttttaaggccttttttccaagcttgaaaatggatttggtgaagttcttttttatgtacatctgcagggataa

SEQ ID NO: 1211 - DNA, 4000 bp, Escherichia coli
  misc_feature (2)..(5): n is a, c, g, or t
  misc_feature (10)..(13): n is a, c, g, or t
  misc_feature (15)..(20): n is a, c, g, or t
  misc_feature (22)..(22): n is a, c, g, or t
  misc_feature (24)..(27): n is a, c, g, or t
  misc_feature (29)..(29): n is a, c, g, or t
  misc_feature (31)..(31): n is a, c, g, or t
  misc_feature (33)..(35): n is a, c, g, or t
  misc_feature (37)..(37): n is a, c, g, or t
  misc_feature (39)..(39): n is a, c, g, or t
  misc_feature (42)..(45): n is a, c, g, or t
  misc_feature (47)..(47): n is a, c, g, or t
  misc_feature (50)..(54): n is a, c, g, or t
  misc_feature (56)..(63): n is a, c, g, or t
  misc_feature (66)..(66): n is a, c, g, or t
  misc_feature (68)..(69): n is a, c, g, or t
  misc_feature (71)..(77): n is a, c, g, or t
  misc_feature (79)..(81): n is a, c, g, or t
  misc_feature (83)..(86): n is a, c, g, or t
  misc_feature (88)..(88): n is a, c, g, or t
  misc_feature (90)..(94): n is a, c, g, or t
  misc_feature (96)..(101): n is a, c, g, or t
  misc_feature (103)..(103): n is a, c, g, or t
  misc_feature (105)..(106): n is a, c, g, or t
  misc_feature (109)..(115): n is a, c, g, or t
  misc_feature (118)..(118): n is a, c, g, or t
  misc_feature (120)..(123): n is a, c, g, or t
  misc_feature (126)..(129): n is a, c, g, or t
  misc_feature (131)..(131): n is a, c, g, or t
  misc_feature (133)..(133): n is a, c, g, or t
  misc_feature (135)..(135): n is a, c, g, or t
  misc_feature (137)..(137): n is a, c, g, or t
  misc_feature (140)..(141): n is a, c, g, or t
  misc_feature (143)..(148): n is a, c, g, or t
  misc_feature (150)..(150): n is a, c, g, or t
  misc_feature (152)..(153): n is a, c, g, or t
  misc_feature (155)..(156): n is a, c, g, or t
  misc_feature (162)..(163): n is a, c, g, or t
  misc_feature (165)..(170): n is a, c, g, or t
  misc_feature (173)..(173): n is a, c, g, or t
  misc_feature (176)..(177): n is a, c, g, or t
  misc_feature (179)..(180): n is a, c, g, or t
  misc_feature (184)..(184): n is a, c, g, or t
  misc_feature (186)..(186): n is a, c, g, or t
  misc_feature (188)..(189): n is a, c, g, or t
  misc_feature (191)..(195): n is a, c, g, or t
  misc_feature (197)..(197): n is a, c, g, or t
  misc_feature (199)..(199): n is a, c, g, or t
  misc_feature (201)..(201): n is a, c, g, or t
  misc_feature (203)..(203): n is a, c, g, or t
  misc_feature (206)..(209): n is a, c, g, or t
  misc_feature (213)..(213): n is a, c, g, or t
  misc_feature (215)..(217): n is a, c, g, or t
  misc_feature (219)..(229): n is a, c, g, or t
  misc_feature (231)..(234): n is a, c, g, or t
  misc_feature (236)..(236): n is a, c, g, or t
  misc_feature (238)..(238): n is a, c, g, or t
  misc_feature (240)..(242): n is a, c, g, or t
  misc_feature (244)..(246): n is a, c, g, or t
  misc_feature (248)..(249): n is a, c, g, or t
  misc_feature (251)..(252): n is a, c, g, or t
  misc_feature (254)..(255): n is a, c, g, or t
  misc_feature (257)..(257): n is a, c, g, or t
  misc_feature (259)..(260): n is a, c, g, or t
  misc_feature (262)..(262): n is a, c, g, or t
  misc_feature (264)..(273): n is a, c, g, or t
  misc_feature (275)..(279): n is a, c, g, or t
  misc_feature (282)..(288): n is a, c, g, or t
  misc_feature (290)..(290): n is a, c, g, or t
  misc_feature (292)..(292): n is a, c, g, or t
  misc_feature (296)..(297): n is a, c, g, or t
  misc_feature (300)..(300): n is a, c, g, or t
  misc_feature (304)..(304): n is a, c, g, or t
  misc_feature (306)..(308): n is a, c, g, or t
  misc_feature (310)..(310): n is a, c, g, or t
  misc_feature (313)..(313): n is a, c, g, or t
  misc_feature (315)..(315): n is a, c, g, or t
  misc_feature (317)..(327): n is a, c, g, or t
  misc_feature (329)..(333): n is a, c, g, or t
  misc_feature (335)..(338): n is a, c, g, or t
  misc_feature (340)..(342): n is a, c, g, or t
  misc_feature (346)..(347): n is a, c, g, or t
  misc_feature (349)..(349): n is a, c, g, or t
  misc_feature (351)..(351): n is a, c, g, or t
  misc_feature (354)..(355): n is a, c, g, or t
  misc_feature (357)..(357): n is a, c, g, or t
  misc_feature (359)..(359): n is a, c, g, or t
  misc_feature (361)..(362): n is a, c, g, or t
  misc_feature (364)..(365): n is a, c, g, or t
  misc_feature (367)..(367): n is a, c, g, or t
  misc_feature (369)..(369): n is a, c, g, or t
  misc_feature (371)..(378): n is a, c, g, or t
  misc_feature (381)..(382): n is a, c, g, or t
  misc_feature (384)..(385): n is a, c, g, or t
  misc_feature (389)..(389): n is a, c, g, or t
  misc_feature (391)..(392): n is a, c, g, or t
  misc_feature (394)..(394): n is a, c, g, or t
  misc_feature (397)..(403): n is a, c, g, or t
  misc_feature (405)..(408): n is a, c, g, or t
  misc_feature (410)..(414): n is a, c, g, or t
  misc_feature (417)..(418): n is a, c, g, or t
  misc_feature (420)..(424): n is a, c, g, or t
  misc_feature (426)..(426): n is a, c, g, or t
  misc_feature (428)..(428): n is a, c, g, or t
  misc_feature (431)..(437): n is a, c, g, or t
  misc_feature (439)..(440): n is a, c, g, or t
  misc_feature (442)..(446): n is a, c, g, or t
  misc_feature (448)..(451): n is a, c, g, or t
  misc_feature (453)..(457): n is a, c, g, or t
  misc_feature (459)..(460): n is a, c, g, or t
  misc_feature (463)..(464): n is a, c, g, or t
  misc_feature (466)..(471): n is a, c, g, or t
  misc_feature (473)..(480): n is a, c, g, or t
  misc_feature (485)..(486): n is a, c, g, or t
  misc_feature (489)..(492): n is a, c, g, or t
  misc_feature (495)..(496): n is a, c, g, or t
  misc_feature (498)..(502): n is a, c, g, or t
  misc_feature (504)..(505): n is a, c, g, or t
  misc_feature (509)..(512): n is a, c, g, or t
  misc_feature (514)..(515): n is a, c, g, or t
  misc_feature (517)..(518): n is a, c, g, or t
  misc_feature (520)..(524): n is a, c, g, or t
  misc_feature (526)..(526): n is a, c, g, or t
  misc_feature (531)..(534): n is a, c, g, or t
  misc_feature (536)..(536): n is a, c, g, or t
  misc_feature (539)..(541): n is a, c, g, or t
  misc_feature (544)..(552): n is a, c, g, or t
  misc_feature (554)..(557): n is a, c, g, or t
  misc_feature (559)..(560): n is a, c, g, or t
  misc_feature (562)..(565): n is a, c, g, or t
  misc_feature (569)..(569): n is a, c, g, or t
  misc_feature (571)..(571): n is a, c, g, or t
  misc_feature (573)..(573): n is a, c, g, or t
  misc_feature (578)..(578): n is a, c, g, or t
  misc_feature (580)..(581): n is a, c, g, or t
  misc_feature (583)..(585): n is a, c, g, or t
  misc_feature (587)..(590): n is a, c, g, or t
  misc_feature (593)..(593): n is a, c, g, or t
  misc_feature (595)..(600): n is a, c, g, or t
  misc_feature (603)..(609): n is a, c, g, or t
  misc_feature (611)..(617): n is a, c, g, or t
  misc_feature (619)..(627): n is a, c, g, or t
  misc_feature (629)..(629): n is a, c, g, or t
  misc_feature (631)..(631): n is a, c, g, or t
  misc_feature (634)..(636): n is a, c, g, or t
  misc_feature (638)..(640): n is a, c, g, or t
  misc_feature (644)..(647): n is a, c, g, or t
  misc_feature (649)..(649): n is a, c, g, or t
  misc_feature (652)..(662): n is a, c, g, or t
  misc_feature (664)..(674): n is a, c, g, or t
  misc_feature (676)..(683): n is a, c, g, or t
  misc_feature (685)..(686): n is a, c, g, or t
  misc_feature (688)..(689): n is a, c, g, or t
  misc_feature (691)..(691): n is a, c, g, or t
  misc_feature (693)..(694): n is a, c, g, or t
  misc_feature (696)..(697): n is a, c, g, or t
  misc_feature (699)..(699): n is a, c, g, or t
  misc_feature (701)..(704): n is a, c, g, or t
  misc_feature (711)..(711): n is a, c, g, or t
  misc_feature (713)..(713): n is a, c, g, or t
  misc_feature (715)..(716): n is a, c, g, or t
  misc_feature (718)..(721): n is a, c, g, or t
  misc_feature (723)..(729): n is a, c, g, or t
  misc_feature (731)..(735): n is a, c, g, or t
  misc_feature (738)..(740): n is a, c, g, or t
  misc_feature (743)..(758): n is a, c, g, or t
  misc_feature (760)..(762): n is a, c, g, or t
  misc_feature (764)..(764): n is a, c, g, or t
  misc_feature (766)..(770): n is a, c, g, or t
  misc_feature (773)..(776): n is a, c, g, or t
  misc_feature (778)..(778): n is a, c, g, or t
  misc_feature (780)..(790): n is a, c, g, or t
  misc_feature (792)..(797): n is a, c, g, or t
  misc_feature (801)..(801): n is a, c, g, or t
  misc_feature (804)..(807): n is a, c, g, or t
  misc_feature (809)..(809): n is a, c, g, or t
  misc_feature (811)..(818): n is a, c, g, or t
  misc_feature (820)..(821): n is a, c, g, or t
  misc_feature (823)..(823): n is a, c, g, or t
  misc_feature (825)..(832): n is a, c, g, or t
  misc_feature (834)..(841): n is a, c, g, or t
  misc_feature (844)..(846): n is a, c, g, or t
  misc_feature (848)..(850): n is a, c, g, or t
  misc_feature (853)..(857): n is a, c, g, or t
  misc_feature (859)..(863): n is a, c, g, or t
  misc_feature (865)..(875): n is a, c, g, or t
  misc_feature (877)..(879): n is a, c, g, or t
  misc_feature (881)..(881): n is a, c, g, or t
  misc_feature (883)..(885): n is a, c, g, or t
  misc_feature (887)..(892): n is a, c, g, or t
  misc_feature (1942)..(1942): n is a, c, g, or t
  misc_feature (1986)..(1987): n is a, c, g, or t
  misc_feature (3419)..(3419): n is a, c, g, or t
cnnnncgcgnnnngnnnnnncncnnnngngngnnncncncgnnnntntcnnnnngnnnnnnnnggngnngnnnnnnnannngnnnngngnnnnncnnnnnngngnnccnnnnnnnggngnnnnctnnnncncncncncgnngnnnnnntntnngnngcgcgnngnnnnnnccncgnngnngagngngnncnnnnngngngngngcnnnncgcncnnnannnnnnnnnnntnnnngngngnnncnnngnngnncnngngnngngnnnnnnnnnngnnnnngannnnnnngngngcgnngcncccncnnngngcncncnnnnnnnnnnngnnnnngnnnngnnncccnngngngcnncncncnngnncncncnnnnnnnngcnncnncgcncnngngcnnnnnnncnnnntnnnnncgnngnnnnngngngannnnnnngnngnnnnngnnnngnnnnngnngcnntnnnnnntnnnnnnnncgcgnntcnnnntcnngnnnnngnngcgnnnncnncnncnnnnncncgcgnnnncnctnnnccnnnnnnnnntnnnncnncnnnncgcncncncgcgngnngnnnannnncgngnnnnnngcnnnnnnngnnnnnnncnnnnnnnnngngngcnnngnnncgcnnnncncgnnnnnnnnnnngnnnnnnnnnnngnnnnnnnncnncnncncnncnngngnnnncgcgcgngngnngnnnngnnnnnnngnnnnngannncgnnnnnnnnnnnnnnnngnnncncnnnnnggnnnngngnnnnnnnnnnngnnnnnncacnggnnnngngnnnnnnnngnngngnnnnnnnntnnnnnnnngcnnngnnncgnnnnngnnnnngnnnnnnnnnnngnnnanannntnnnnnncacggcagccggctgaacgccacgctgcctcagaagcttgggaaatccacaccgggagggctcttgtagcccgaggagcgaagcttcggccagcgcccgataacccccttcaggcgaacccggtccgtctcccccatctcgtccgtcgcgtccccgtcaatgtcgacctcatcggaatccgcagacaccccctcgcttcggcgcaacgtggcgtgggccctcgttggcaatctcggctacagcgcctgccagtggggagtcctcgtctgcatggccaagctcggaaccgcgaccgacgtggggcgcttcgcgctcggcctcgcgctgacggctcccatcatcaccctgaccaacctcaacctgcggctgctccagtcgaccgacgcgcgcgaagactatccgttcagcgtctacctgtccgtgcgcctgatcggcaccgtgctcggtctggccgccatcgccgcaatggcgttcggcctcggctatcaggggatcacgctctacctgatcctggcagtggcgctcggcaaggccttcgaggcggtgagcgacgtcgtgttcgggctcctgcagaaggcggagaacctgcggcgggtcgcggtctcgatgctcgccaaaggtgtcatcagcctgctggcagtcgggctcgtcctccagatgaccggggacatcatcctcgccaccgtggcgatggccctctgctgggggagcttgctgttgacgtacgacctgcctgccgccgtccggctggagagcattcggccgacgctggagctcggctccctcggccggctcgtatcggccgcctttcctttgggctgcgtcgcggggatcagcagcctcaccgtcaacgtgccgcgctatgccgtcgaggccaacggcggtgagccggcgctcggcgtcttcacggcgctcgcctatctcttcgtcgcggcgcttcagccgatgctggcgctgggcgcagccgtcaacccccggctcgcgcgccacttcgtccacgacctcgcggctttccgacggctcacgtcgcgaacgatggtcgtcgcgggngccctcgggctcttggggatcgcggcatgtgcgctgttcggtanncccatgctcaccctgttctacgcgcccgaatacgccaagcacacgggcgtcctggtctggttggcggtggcgacgggcgtcgcttttctcgcccaggccctcagctacgccgtcaccgccgcgcgacggctgccggaacagctcccgattgcggtgttgagcctcgtcgtctgcttcctggcgagccagtacctggtgccacgttacgggctgctgggcgccgcctgggcggtgctcgccaccgagacgtcgaggttggcctgcctcggtggcgtctacgtcgcggcgatcgccggcgcctcgtccgcggcgtcgcgggcgagcaggcgcgccgcccgctggcgggctcctcgcagtgggcacgcccccgaagagcgaggcccctcgccatcctcgcccgtgcggccgggcgctaccgacccgaaggcaccacccctgatcgccgagatcacgggttgctcggggagcggcaagtcgacgctgctcgccgaaattctacgggagtgcgccgcgcgcggcctgcgggttgccaccgcggaggatgtcctgctgccgaggctcgggcgcctgatcctccgccacccgactctgcagaacgtcgcgctcgatctccggggcgcgagcgaggtgatccgcggccgacgacccctcgagtttctcaccttcgcctggacagtcatacgacgcgacaccgactctttcgccaccggcttgagggcgtaccgcgccgtactgcggaaagtcggcatccactccctcttggcccgcgaggcgaccagccggcacgcggtgttcgtagacgaaggcacgatccattcggcccacaacattctcgtccacgtcgagcatcctgcgcgccgcgaggagatcgaggccttctgtcgcctcgtcccgatgccggacctcgtcatccacgtcacggcgccgctcgagacggtgctcgccagaacctttgcgcgccgcaacccgcctctacgcggacgcagcagggacgagatggaacgattcatccgacacgggcacagcatgttcgaccagttgatgaggcacgaagcgctttcgcgaaacacgctgagggtgcattgcgatgatgacgacttcgggagttaccgcaggtttgccagagagatcgtggagcgcctcgccgaacgaagcgcgggtactgccctcgttgcgtgcgctgtttgattccttgcgtcgcgccggcgtgcgctactgccattggaagagcaactggcggctgcgcgagacgctgcgcggcgagacggacctcgatctgctgattcaccggggcgacatctcgcagttcctctcggtcgtcggggctctcggctacaagcccggcagtcgcgaagatcatccctcggtctgtcactactacggattcgaccaggagagcgggaagctgttcgacctgcacgtgtactatcgngtgatcaccgggggcacgatcaagggctaccacctaccggtggaggacatgttgctgggcggcgcacggcagacggaggacggggtgtacgtgcccatgcgcgctgcggagctggtgttgttcgtgatccgcaagagcctcgactacgccgtaccgagcgaggccctcattccacgggatcggaccgcggccgcagacgagctcgggtggttgcgccagggagtggacgatcaggaggtgcgcggcctgctggaggagtatcttccgagcgtcgaattcgcgctcttccggagcctcacggacgccatcgagtcggggcggtcgggggtcggtcgcttccgtctctgtagagcgctggcatcgcggctgagaccgcaccgacggttcgcgggcgggagtgcgagcctggcgcggggccggcgcgcgtggcgcaaggcctggcgcacgctgcggggcgggacgccgacgcaggcgctcctctcgggcggagcggtcatcggcgtggtgggcgcggacggttccggcaagtccacggtggtccgcgaggtgagccgctggctcggagacttcgtgtccgtggc

SEQ ID NO: 1212 - DNA, 4000 bp, Escherichia coli
  misc_feature (590)..(590): n is a, c, g, or t
  misc_feature (667)..(667): n is a, c, g, or t
  misc_feature (743)..(743): n is a, c, g, or t
  misc_feature (798)..(798): n is a, c, g, or t
  misc_feature (806)..(806): n is a, c, g, or t
  misc_feature (838)..(838): n is a, c, g, or t
  misc_feature (890)..(890): n is a, c, g, or t
  misc_feature (980)..(980): n is a, c, g, or t
  misc_feature (1136)..(1136): n is a, c, g, or t
  misc_feature (1342)..(1342): n is a, c, g, or t
  misc_feature (1355)..(1355): n is a, c, g, or t
  misc_feature (1987)..(1987): n is a, c, g, or t
  misc_feature (1992)..(1992): n is a, c, g, or t
gaatgtagcattcgcataatcagttgcatctacatatgaaataaatattgatagagataaaaataaattagttttaaaatttttcattgttttagtcctttgtttcgataacgtctatagatgtaggtactttatacccaacactttcgttaacgtctgtaatattaattgtgatagatttttcaacagtttcaacaccatcggttatggttaatgttatagagtacgaatcttttgtttcaaaatctggaggtgaaacaaaacttaatatattagttgcagaaagttcaaatgactcagcatctgttcctccaagtgttaatgtaaaatcatcaccatcaacatcagcggctgatggattaatggtatcagtcttgttttctacgtaattaattgttgatgctataccaagtgttggagcatcattgaccgcagcaacagtaacagaaactgatgaagttgcagagattgatccctgagtaactgtgtaatcaaaggaatcttgaccattaaagttagctgaaggtgtataggtaagagtatcacctgagatagcaacagaaccattagatggagatgaggtagtaatnacaaaagatgaaccagtggtcaaagaatcatttagtaatggagaaaatgaaacgcttgaatcctcttgcaatgaaanagaatcagaaaatgctaaaatcgttggttgaatatcttcaacattaacattttgatctgtagctatatagtttaanacatcagatgaatatgagcttataagtgattgatctgcagtaccatttactattnaaagaaantcatcttgaaatttatttgtactaaaccttanaacagatgcggttaaatcatttgttgatttaataccaattactggtatcacngatgaaagtgcctttacagcattttgtttatttgcatcatcaattgttaaggatttggcactaattaagttatcaataactttttctatnaatatatctttttcaatatttactgtagcttcgttatctgtataggcaataacaatttcttcggatatagctttaaagtaatcagcagtagaatccatcgatgaattaagactattagaaatattttgcaatgaatatgcaagaatagttaactgnttacctttttcatatagcaaatcataacctccaccatcaccaatatttgcaactggatctgtagtatatatatcaagatcgctgtctaatccaagcacggtatagatatcctgggagggcatgaaatgggcaacagaagttactggtgtaaccataaaactactttctgagtaaccacttaaatctcttaaaagtaataagttatntaattgtgtttgngtatcaacatcttgtccccccaaggaagccaaaacaccattttcatatttgattgtaaatgaaccatcggtagaagaagtcgtggatgtttcatttgaatcaagagcatagtcactatcagtgtctataaaaattgaagctcctgatatatagccatctacagccacaccttgaatatttctatagccttctatcgttatggttctggaagcattaccaccctctccattacatgtaagggtaaatgtagattcaccagctgttgatatttcaacagtttctgaaccggttgtagatttagaaccggtccatgatcctgaagcagtacaacttgttgcattagtcgatgaccaagaaatatcaacagaagagccaacttccgtagaaaaaatgttactagtaaatgaagatatagcagcagcaagtttagcaactgctgtgcttccaccaccaccaccgccaccgccgcaggaggtaataatcaaaagtgaagataagacaaatgtatatttgagacgtgaattcatattaaaaccctattggaggaatagctattaagtaatataaaaattaaatttatttttatttaatttaacaaaaacttaataaaccaaacccatttaaatatcccntaatntaacatataaaattactaaaatgaatatttaatagacgcattaactaagccaaaatttgaatcaaaatgatgttcagatctttgattaaaacttatatcctcataaccaatcaaattattcttgtataaagaaccagatagagatacagatagatttttatgtttatatttaacacctgttttaagtctaatattatgatttggagaagaattaaattgatgataatcacgtgttttaagatacattaaatcaatatcataaaaatagacaatcttagaacttaagttaatatctttatataaatttagacctaacttatgaatttgaaagctagatctttgcggaagtcttcttatttcatttgagacaagatcaccaattctagatccattataagacaaatttgcaataaagccggtctgcagctcttctattggagatatccaattaaaagaattttcactcatcccaagatatataatgtattcatcaaacgcaaaagttttttgtgctctggtgtaatgaatcatatattctgtattttgagcatcaatcattaacaaattatcatctccaagaacgtcatatttacttttggtgtttgatatcgttagaagtgcttcatcgcaaaagcctatggttaatgaagagaatgtataacattgaattttttgagtttctgctacctgatctttataagagatagaaattgcatgactctcagaaagcacatacattaattcgaaataatctgattgagtattaagcgctaatgactttggttgaactggtctttcaagatttaaaaagaaatcgctttttctgacttttaaaccaacattaccctcaataacaagaaactcaaaagatgaaatatcgctataatcaaatgaattaactacctcaggaataaaattccaatctttatcagtagcagagaattcaatctcgaaataaccatttaaggcaaataaatttgcagtaaaggttaagaatattaaaacaagtttattaattataatttagtaaattttatttttattataactgagcatttaaagctggcaatgcttcaaataagtcagctactaaaccataatctgcaacttggaaaattggtgcatcttcatctttgttgatggctacaatgacttttgaatctttcatcccagctaaatgttgaatggcaccagaaattcctactgctatatataaatcaggagcaacaattttaccagtttgaccaacttgataatcattgggaacaaaaccagcatcaacagctgctcttgaagctccaacagcagcacctaatttatctgcaattgaatccagaagatggaagttatctccagattgcatacctcttccacctgaaacaactatgtttgctgcagttaattcaggtctatcacttttagctatctcctctcctacgaattcgctgatgtttgttccgattacagaatctatggattcaactgatacatctgtattatccatcggcgcagcatcaaatgcagttgaccttacggtaattaatttttttgaatcatttgatttaactgtagcaatgcaactaccagcatatataggtcttttaaatgtgtcctcagattctacagagataatatctgaaatttgttgtacatctaatttagcagatactctaggaagtaagtttttaccaaaggttgtagctggagtaagtatataagaataagcatctgcaatactgataactaaatttgtaagatcttcagctaaaaagttcttataaagctcatcatcacaagaaataatatttgatattcctgagattttttttgcttcatctagaacggttgatatatttgaaccagcaactaaaagtgttacttcaccattaagacaagtagctgctgttacagtatttaaagtagctcccttcaaagaagaattatcatgttctgcaataactaatatactcatgtgatcacctttgcttcgtttttaagtttctcaacc

SEQ ID NO: 1213 - DNA, 4000 bp, Escherichia coli
  misc_feature (1)..(5): n is a, c, g, or t
  misc_feature (7)..(7): n is a, c, g, or t
  misc_feature (9)..(10): n is a, c, g, or t
  misc_feature (12)..(16): n is a, c, g, or t
  misc_feature (19)..(19): n is a, c, g, or t
  misc_feature (21)..(25): n is a, c, g, or t
  misc_feature (27)..(30): n is a, c, g, or t
  misc_feature (34)..(35): n is a, c, g, or t
  misc_feature (37)..(37): n is a, c, g, or t
  misc_feature (39)..(39): n is a, c, g, or t
  misc_feature (41)..(42): n is a, c, g, or t
  misc_feature (44)..(45): n is a, c, g, or t
  misc_feature (47)..(48): n is a, c, g, or t
  misc_feature (50)..(52): n is a, c, g, or t
  misc_feature (54)..(55): n is a, c, g, or t
  misc_feature (57)..(60): n is a, c, g, or t
  misc_feature (62)..(65): n is a, c, g, or t
  misc_feature (67)..(69): n is a, c, g, or t
  misc_feature (72)..(73): n is a, c, g, or t
  misc_feature (76)..(82): n is a, c, g, or t
  misc_feature (84)..(84): n is a, c, g, or t
  misc_feature (86)..(86): n is a, c, g, or t
  misc_feature (88)..(93): n is a, c, g, or t
  misc_feature (95)..(97): n is a, c, g, or t
  misc_feature (99)..(101): n is a, c, g, or t
  misc_feature (105)..(108): n is a, c, g, or t
  misc_feature (111)..(112): n is a, c, g, or t
  misc_feature (116)..(117): n is a, c, g, or t
  misc_feature (123)..(123): n is a, c, g, or t
  misc_feature (126)..(128): n is a, c, g, or t
  misc_feature (130)..(130): n is a, c, g, or t
  misc_feature (134)..(135): n is a, c, g, or t
  misc_feature (138)..(144): n is a, c, g, or t
  misc_feature (146)..(155): n is a, c, g, or t
  misc_feature (157)..(158): n is a, c, g, or t
  misc_feature (160)..(162): n is a, c, g, or t
  misc_feature (164)..(165): n is a, c, g, or t
  misc_feature (167)..(172): n is a, c, g, or t
  misc_feature (174)..(182): n is a, c, g, or t
  misc_feature (187)..(191): n is a, c, g, or t
  misc_feature (193)..(193): n is a, c, g, or t
  misc_feature (196)..(197): n is a, c, g, or t
  misc_feature (199)..(201): n is a, c, g, or t
  misc_feature (203)..(203): n is a, c, g, or t
  misc_feature (205)..(208): n is a, c, g, or t
  misc_feature (210)..(212): n is a, c, g, or t
  misc_feature (214)..(215): n is a, c, g, or t
  misc_feature (218)..(218): n is a, c, g, or t
  misc_feature (221)..(226): n is a, c, g, or t
  misc_feature (229)..(233): n is a, c, g, or t
  misc_feature (236)..(236): n is a, c, g, or t
  misc_feature (239)..(239): n is a, c, g, or t
  misc_feature (241)..(242): n is a, c, g, or t
  misc_feature (244)..(252): n is a, c, g, or t
  misc_feature (254)..(254): n is a, c, g, or t
  misc_feature (257)..(257): n is a, c, g, or t
  misc_feature (259)..(259): n is a, c, g, or t
  misc_feature (261)..(264): n is a, c, g, or t
  misc_feature (266)..(266): n is a, c, g, or t
  misc_feature (271)..(272): n is a, c, g, or t
  misc_feature (274)..(274): n is a, c, g, or t
  misc_feature (276)..(276): n is a, c, g, or t
  misc_feature (278)..(280): n is a, c, g, or t
  misc_feature (282)..(289): n is a, c, g, or t
  misc_feature (294)..(295): n is a, c, g, or t
  misc_feature (297)..(297): n is a, c, g, or t
  misc_feature (299)..(300): n is a, c, g, or t
  misc_feature (302)..(303): n is a, c, g, or t
  misc_feature (305)..(305): n is a, c, g, or t
  misc_feature (307)..(307): n is a, c, g, or t
  misc_feature (309)..(314): n is a, c, g, or t
  misc_feature (316)..(320): n is a, c, g, or t
  misc_feature (322)..(326): n is a, c, g, or t
  misc_feature (328)..(330): n is a, c, g, or t
  misc_feature (339)..(339): n is a, c, g, or t
  misc_feature (341)..(342): n is a, c, g, or t
  misc_feature (345)..(345): n is a, c, g, or t
  misc_feature (347)..(351): n is a, c, g, or t
  misc_feature (353)..(354): n is a, c, g, or t
  misc_feature (664)..(664): n is a, c, g, or t
  misc_feature (891)..(891): n is a, c, g, or t
  misc_feature (1073)..(1073): n is a, c, g, or t
  misc_feature (1195)..(1195): n is a, c, g, or t
  misc_feature (1580)..(1580): n is a, c, g, or t
  misc_feature (1803)..(1803): n is a, c, g, or t
  misc_feature (1980)..(1981): n is a, c, g, or t
  misc_feature (1985)..(1985): n is a, c, g, or t
  misc_feature (2425)..(2425): n is a, c, g, or t
  misc_feature (2585)..(2585): n is a, c, g, or t
  misc_feature (3243)..(3243): n is a, c, g, or t
  misc_feature (3454)..(3457): n is a, c, g, or t
  misc_feature (3459)..(3459): n is a, c, g, or t
  misc_feature (3462)..(3465): n is a, c, g, or t
  misc_feature (3467)..(3470): n is a, c, g, or t
  misc_feature (3473)..(3474): n is a, c, g, or t
  misc_feature (3476)..(3480): n is a, c, g, or t
  misc_feature (3482)..(3495): n is a, c, g, or t
  misc_feature (3497)..(3498): n is a, c, g, or t
  misc_feature (3500)..(3501): n is a, c, g, or t
  misc_feature (3503)..(3507): n is a, c, g, or t
  misc_feature (3509)..(3511): n is a, c, g, or t
  misc_feature (3513)..(3516): n is a, c, g, or t
  misc_feature (3518)..(3519): n is a, c, g, or t
  misc_feature (3521)..(3525): n is a, c, g, or t
  misc_feature (3527)..(3528): n is a, c, g, or t
  misc_feature (3530)..(3530): n is a, c, g, or t
  misc_feature (3533)..(3534): n is a, c, g, or t
  misc_feature (3536)..(3540): n is a, c, g, or t
  misc_feature (3543)..(3544): n is a, c, g, or t
  misc_feature (3546)..(3548): n is a, c, g, or t
  misc_feature (3551)..(3555): n is a, c, g, or t
  misc_feature (3557)..(3557): n is a, c, g, or t
  misc_feature (3560)..(3563): n is a, c, g, or t
  misc_feature (3566)..(3568): n is a, c, g, or t
  misc_feature (3571)..(3573): n is a, c, g, or t
  misc_feature (3575)..(3579): n is a, c, g, or t
  misc_feature (3581)..(3582): n is a, c, g, or t
  misc_feature (3584)..(3586): n is a, c, g, or t
  misc_feature (3588)..(3591): n is a, c, g, or t
  misc_feature (3593)..(3594): n is a, c, g, or t
  misc_feature (3596)..(3598): n is a, c, g, or t
  misc_feature (3600)..(3605): n is a, c, g, or t
  misc_feature (3607)..(3609): n is a, c, g, or t
  misc_feature (3611)..(3613): n is a, c, g, or t
  misc_feature (3616)..(3619): n is a, c, g, or t
  misc_feature (3621)..(3622): n is a, c, g, or t
  misc_feature (3624)..(3625): n is a, c, g, or t
  misc_feature (3628)..(3629): n is a, c, g, or t
  misc_feature (3632)..(3632): n is a, c, g, or t
  misc_feature (3635)..(3636): n is a, c, g, or t
  misc_feature (3638)..(3638): n is a, c, g, or t
  misc_feature (3642)..(3645): n is a, c, g, or t
  misc_feature (3647)..(3647): n is a, c, g, or t
  misc_feature (3649)..(3651): n is a, c, g, or t
  misc_feature (3653)..(3654): n is a, c, g, or t
  misc_feature (3656)..(3658): n is a, c, g, or t
  misc_feature (3660)..(3661): n is a, c, g, or t
  misc_feature (3663)..(3664): n is a, c, g, or t
  misc_feature (3666)..(3668): n is a, c, g, or t
  misc_feature (3670)..(3671): n is a, c, g, or t
  misc_feature (3674)..(3674): n is a, c, g, or t
  misc_feature (3676)..(3679): n is a, c, g, or t
  misc_feature (3681)..(3687): n is a, c, g, or t
  misc_feature (3689)..(3692): n is a, c, g, or t
  misc_feature (3694)..(3711): n is a, c, g, or t
  misc_feature (3716)..(3717): n is a, c, g, or t
  misc_feature (3719)..(3719): n is a, c, g, or t
  misc_feature (3721)..(3721): n is a, c, g, or t
  misc_feature (3723)..(3728): n is a, c, g, or t
  misc_feature (3730)..(3730): n is a, c, g, or t
  misc_feature (3732)..(3735): n is a, c, g, or t
  misc_feature (3737)..(3740): n is a, c, g, or t
  misc_feature (3742)..(3743): n is a, c, g, or t
  misc_feature (3745)..(3745): n is a, c, g, or t
  misc_feature (3747)..(3749): n is a, c, g, or t
  misc_feature (3751)..(3755): n is a, c, g, or t
  misc_feature (3758)..(3762): n is a, c, g, or t
  misc_feature (3764)..(3764): n is a, c, g, or t
  misc_feature (3769)..(3769): n is a, c, g, or t
  misc_feature (3773)..(3777): n is a, c, g, or t
  misc_feature (3779)..(3779): n is a, c, g, or t
  misc_feature (3781)..(3787): n is a, c, g, or t
  misc_feature (3789)..(3794): n is a, c, g, or t
  misc_feature (3797)..(3801): n is a, c, g, or t
  misc_feature (3804)..(3807): n is a, c, g, or t
  misc_feature (3810)..(3812): n is a, c, g, or t
  misc_feature (3816)..(3817): n is a, c, g, or t
  misc_feature (3819)..(3822): n is a, c, g, or t
  misc_feature (3824)..(3825): n is a, c, g, or t
  misc_feature (3828)..(3832): n is a, c, g, or t
  misc_feature (3834)..(3847): n is a, c, g, or t
  misc_feature (3849)..(3850): n is a, c, g, or t
  misc_feature (3852)..(3865): n is a, c, g, or t
  misc_feature (3867)..(3869): n is a, c, g, or t
  misc_feature (3871)..(3871): n is a, c, g, or t
  misc_feature (3874)..(3876): n is a, c, g, or t
  misc_feature (3878)..(3880): n is a, c, g, or t
  misc_feature (3882)..(3884): n is a, c, g, or t
  misc_feature (3886)..(3890): n is a, c, g, or t
  misc_feature (3892)..(3893): n is a, c, g, or t
  misc_feature (3895)..(3896): n is a, c, g, or t
  misc_feature (3898)..(3898): n is a, c, g, or t
  misc_feature (3901)..(3903): n is a, c, g, or t
  misc_feature (3905)..(3905): n is a, c, g, or t
  misc_feature (3907)..(3910): n is a, c, g, or t
  misc_feature (3913)..(3916): n is a, c, g, or t
  misc_feature (3918)..(3918): n is a, c, g, or t
  misc_feature (3920)..(3921): n is a, c, g, or t
  misc_feature (3923)..(3927): n is a, c, g, or t
  misc_feature (3929)..(3931): n is a, c, g, or t
  misc_feature (3933)..(3935): n is a, c, g, or t
  misc_feature (3937)..(3942): n is a, c, g, or t
  misc_feature (3946)..(3946): n is a, c, g, or t
  misc_feature (3949)..(3958): n is a, c, g, or t
  misc_feature (3960)..(3965): n is a, c, g, or t
  misc_feature (3968)..(3968): n is a, c, g, or t
  misc_feature (3970)..(3974): n is a, c, g, or t
  misc_feature (3976)..(3977): n is a, c, g, or t
  misc_feature (3979)..(3982): n is a, c, g, or t
  misc_feature (3984)..(3990): n is a, c, g, or t
  misc_feature (3992)..(3993): n is a, c, g, or t
  misc_feature (3995)..(3995): n is a, c, g, or t
  misc_feature (3997)..(4000): n is a, c, g, or t
nnnnnangnngnnnnnggntnnnnngnnnngggnngngngnncnncnnannngnngnnnncnnnngnnnccnngannnnnnngnanannnnnncnnngnnngcgnnnnccnngccnnaggggnccnnngncccnnggnnnnnnncnnnnnnnnnntnngnnncnngnnnnnngnnnnnnnnnatttnnnnnanttnncnnnantnnnntnnntnnggngcnnnnnnggnnnnnggnggngnngnnnnnnnnngnggncnannnncnctttnnancncnnnannnnnnnnaaaanncntnntnntncntnnnnnntnnnnncnnnnntnnngggttattnannctngnnnnngnntctctgaccgaaaacacagtcacgtttctgagaagtatattcggaaattgattccattttccaggaataataccttcagggatcatctcctccgtcaaaatataaaatattcttttttgaaatattccattgcccactgtgtcgcgtcactcttcccgcgcaattggttggttatgggccaaattgtgctcatcatgactagccatcatacgtcgtttattatttcgcgcgcgatttataactggcacacgtacgttttggccgagatgcgattattaagcgagtaccgttgacctctcgctgctggtgngacacaacaacgttcgtgtcgccctccgcatggaccggcgttcgctcctcgccaccggacttctcgcttgggcgggtgcgctgcaggtgcacgtctggtacgtcacctccacggacgagtacaagtcctcctccatcgccaagtccggcgtcgcggactggacgttcaggcttccaacatcgctgggagggggcgggtcggaggaagggggcgggtcggaggaaggncgcgacgggggtgagcgcggcgcgtgagagccggggtcgatatcgtcatgacagttccgctgcccgcggtcgaggatggaccccggggggccgagacgaagcgcaagttcttcgaggacacgcgaacggcggggttgaacgataggagcctcgaacggcgcgcactgggcgtggttctcgcncacgcgcacgcggacgtcgccgcgcggttggcgtccgtcaaccgagcgctccgtgcggacgcgaggagggtgccgcagctcgcgttcggacccgaatccgcgctgtggagacgcgcgggcgncgacgccgacgcgacgctgattgagatcctcacgcgtcaccggcctggaagactccaacgcctggtgctctgcccgccgacgacgcgcgacgatgatcacgaactcccctgcgccatctcgcccgcgaccgtgcagttcgcggcgcgcgcgcagctccgcctgcgatgcctctggacggagcccggcgccatgcgacccgatccgacggctcgcgtcccggctgcgcgcggcgtcgtcacggtgacgctcgatcgcgaggactgcgtcgcgatcgtgacccggggtcagtgcagtgggataccgagggcggtgcacaacaccggcgtgttcgcgcccgggctcacgcggctctccgtgggcgcggcggctgagatgaccgacgcnggcgttcgcgtcgtttttcgctcgtgttcgaggctcgagtcgctggaggtgacggacggcgactcgagtgggctgacgggttcggactggggcggcgcgggtgtcgacgcggcggtaccggagctcaccgagctgaggttagcgcggtgtgccggtctgcgcgcgcttcggttgcgacgcgttgaacggttgaacgcgttggcggcgactgattgcgacgcgntgacggatttggcgttgacggcgtcgagcgaatcgggcgacggcgaggtggacggtgacggggctgacatgcccgcgcttcgtgcgctgaccttggggtcgttcagctcgcgtcgtgtgggtgccggctcgaacgtgcccggtggtgcgctcgcggcgatcgtgcgcaggtgcgtcnntctngtttttttggctatacccgcgagctgcggcgccggttcgggcgacgacgagacggcggaggtttggtcccacgcgttggctcgaagcgcgccgtcgatcacgaccctctgcttccaggtgccgatcacgaccaccgcgctgatgctgatggtgtccggcgcgggcgagttaccgcggctcgaggcgctgagcgcggcgatgagagtcgggagcgacggcgactcggagggtggcgagcccttcgtcgtcgacgcggcgcacgtcgcggacgatttggtggcgtgcgtctctccgtgccccgcgcttcgcgtgttgaccctcgtggacccgccgcccggtgtcccgacgagtgtcgacgaggcgacggggatgcacgcgaagatgcgagcgagcgtggagttggccaggggcgcgttgtcggcgcggtgcgggctcgcttnagaggagtcagagtcggcgctgggtcgggagctggtcatcgacgtggcggatgatttccgcggcgtggcgggggcggcgcgcacggcggacgcgccgacgccgggtgggatagatgccgtgctgagagaatgcgacgaatgcgcgccgctcgagtggtcnctcgacgacgcgtgatggtgaatggcgcgtactcaaaagtagcggattttaatacaaagtgagagaaccgccgcgcgtttagatctcgtcgtcggagaagtcgaagtcgtcgactgggggaaagtccccgacctgcacgttgaccgggcgctgaaaggacccgtagccgtcggggcactcgaagtacctcttccccttggcggtgccgtcgtttttgcccacgggttcgtcgaactggatgccgatccaccaacccttgggcagcgtctcgcacttgcccacgaacttgacctcgccgcgcttactcccggggttgatctccgcgcgcatgcccaccgtgatcacgccggcctccgccgcctggtgctcgtcgtcctcgacgggccccgcgggcgggacccagacctcgccgcgcttctcagccatggccttctccaggcaccacgtcgggtccttggcgagttgcgccttcttccactcgcggtaggtgccctccctcgtgtcgtagtcctggtcggacatgatgtacttgtccaccttgctgacgtcctcgagccagccgttggcggacatggagttggtgtcgatgtcgttgatgtggatggtccacccgtcctcgggcgagtagtagccgagcatcttggtgtcgtcgcccagntcggagacggtggtgccgtcccagtccttcagcaccaggcgcatggtgctcacgttgctgccgacgtgggtcatgagcttctccttgacgcggaggatggtcatctgtcgcgggaaaggagcggaaagaggggacggggacgggtcaacgtcgggtcggcacgcgagatctgagggtcggcaaaaggcagatcgggatcgaggcgcgacgnnnngnggnnnnannnncgnngnnnnnannnnnnnnnnnnnngnngnngnnnnncnnnannnncnncnnnnngnngntgnngnnnnncannannngcnnnnngntgnnnnccnnnttnnncnnnnngnngnnntnnnngnngnnntnnnnnngnnngnnnagnnnntnntnnttnntgntgnngncgtnnnncntnnngnngnnngnngnngnnngnnggngnnnncnnnnnnngnnnngnnnnnnnnnnnnnnnnnnagaannangntnnnnnntngnnnncnnnngnngngnnncnnnnngtnnnnncngcggnggannnnngncnnnnnnntnnnnnnttnnnnnaannnncgnnngacnncnnnnannaannnnngnnnnnnnnnnnnnntnntnnnnnnnnnnnnnncnnngnacnnngnnngnnngnnnnntnncnncnccnnncngnnnncannnncnanntnnnnnannncnnncnnnnnncgcnccnnnnnnnnnngnnnnnncangnnnnntnntnnnnannnnnnngnngngnnnn

SEQ ID NO: 1214 - DNA, 4000 bp, Escherichia coli
  misc_feature (1985)..(1985): n is a, c, g, or t
  misc_feature (2347)..(2347): n is a, c, g, or t
  misc_feature (2351)..(2351): n is a, c, g, or t
  misc_feature (3218)..(3218): n is a, c, g, or t
ctgaacccgcgctggatgaatggcaacgcgccggcatccccgcccttctcgccggtttcgacgccgagtgcttcggcgcgtctcgcgccatcgacgacttgcacggccgcgccgcgcccgccgtcgacgtcacgggcgccacgatcggcgcgaagcgcaaagccatcgaagctccgaaacctcgttcgccgcccgcgcgggcgcgggcgcacagacccgaacccatcatgaccatcgcgccgcaccacgcgttcgtcatcgagcgcgtgaaagccgacgccctgacgtctctcaccaccgacgccctgaaacgattcttagccgcgcacaacctttcgtgcgccggttccaaggcgcagctctgcgatcgagtcgaatgtcacgttcgcatgtgcgccggagacgcactagactagctccggaaccgactgtaaaccgacgcgcgcgccgcacaacgcgaagcaccatgtccacgcccgcggcgcccgagccgcccgctcccgaggccccgcccgagccaccgagccttttgattcccggctacattccgtttccgcccgcgcgcgagggcgagatggcggaaccgacggtgcaaatcgcgcagccgccgccgctgtacccaccgctcccgcgcggtctcaagcccttcaccgacgccacgcccgaggaactgcgcctcgtgcgcctgtcgcgcgcgattcgagggttcttccgcgcgtcggcgtatcatcacggcgatcgggacgacgagctcgagcgccgcgcgcgcgagggcgacgtctcgcgatggcgggacgaggaggcgagcgggacgagctcggacgaggacgatgaaaggggcgataaggacgacgaggacgcgatcgatgaacgatggatacgaagcatgcgacgggcgttcacgctggaggatttaaaggtgacggatgagcggatcgtgcccagggagatattagaggcggcgttcggcgcgagggcgaacgcgccgaacggaaagggtaagaaacgcgccgcgaacgacgcgagcgcgagcggtggagacaagaagcgcggtaaggcgaacgaagacggtgaacgcgacgatcaaggggcgacggcgtcgacgaaacagagaaagggtgatatttcgcgtctcgagcgtctggcgcgtttagaagagtcgagcgcggccaaggagctcgacggcgacgccgtcgagggcaagtctcgcggtcgtctccaatcgcgcgcgagcgatcgtcagcgtcgcgcgcgatcgccgtccaaaaatgcgcgcgccggggacgaggacgacgacgaagccgacgaagacgccgtcgaccgcgccgcggacgacgacgacgagctcgacagcgacgacgactacgcccgcgccgccggtttcgacgacgacgacggctacgacgacgacatcgccgaccacgccgacaccgaggccttctattagctcgctcgtctctttcatgcgtcattcaaaacctaagcttcgtcttctacgtcgcgtctcgctacgaccctcccatgttttgcagcctcccgagcacgacttgcccgctctccaggtaccgcagcgcgcagttcgtcaggcagctcgactcgctcgacgaaaacttcgcgcccggcgcgtacgtcacgcacttctcgaagcacgtctccgtgagcttcgcgacgacctcgttgaacaccgccttgcgcttttcctcctgcggcgcgatgaaacgtcagtcgtgcgacgcgcgacggcgaacgcggcgaatcgagcgcacctcgaggaactgttgcatgtgcgcgtcgttggcctgcatcgcgacgcggcctcgacggatcgaggatcgcgcgcgcgggtgtgacgacgagacgcgaattcgagccgagtcgcgagcgcgagcgcggcgagacgacgcgaaggacgcgacgcgcgcgcggcgatcggtcgacggcgacgcgccgcgccgtcgactcgcatttcaattccaactcgcatnacaatgtacgtttcaattcgcgtttcaattcgcgtttcgattcgcgcgttcgacggacgctcgcgcgtccttgcgcctcggcacgacgaagacgccgaagtcggcggcgcgatcgcgccgaacctcccacggcgtcgaatcgtcgggctcggcgaacgcaccgtcgcgctcgaagtccacgcacgcgtccagggcgtcgacgcacgtgacgatgcgaaaatctccaatctcccaggcgcgccgcagcgtcggcgacagtcgacgcaggcccgcgcccgtgagccacgcgaacgcgcacgtcggcgcgggtgaatcgagcacgccgcgcgccagcgcctcggcggtcaacgtggtgagatctncctngtgcacggtgatcaagtcctcgagattctcgcgcgcgacgcgttcgcgcgcgtctcgcgcgagcgcgtcgtcgagctcgaggcccacgcagcggcagcccctcgccttggcggcgtccacgagcacgcgcccgtcgccgcatccgaggtcgtacaggacgtcggaggacgacagcgcgcacgcgtcgaaggcgacggcgcgtcgacgcggctccgtgggcgcccacggggcgagggacgtcgccgccgcctcggcgcacttttcgtcgtttcgagcggcgagcgcggcgcgcagcagcgcgttctgcgcgcgcgcgacgtcggcgggatcgaaatcgtacgcgtcttcgtcgtcgcgcatcgcgcgagcgcgcggtcgagcgcgagctcgatcgaccgcgcgctgtgcggtcggggacgcgcttcgagtcgaatcgcgtcgcgttacatgacgagtcgaatcgcggccaaagacagcgcgccgagcgataccagcgtccccacgctgtatcgaataatttccgtcttcgccgcctctatctgcgttcgcatctgatgcaactctcgatcgacgcgcgcctcgacctctttcatctgactctcctgaatcccgtgcaactctcgcagtcgtcccttctccagattcaaatccaacttttgcgactgcgtgatcctatcgatgttatacttgagatcggcgcgcagcttctcgttctccgcctgcagggtttcggtggagtgtttcatcgacgcgctcgcctcgcgcagcgacgacgccacctcctgcttgagcgcctgcgtctccgcgcgtccgtgcatcaactctcgctccagttcgtttctcgcgacgaatcccgcgcgcgtcatngacgtcagcgcgctcgcgacgatggcctccgcctgcggttcgccgaacccgcccgctttcgcgagctgcttgatgatggcgtgcgagtcgaaccggtcgaccgtcgccgcgggcgggtcccacgccgtcgccggcgacgccgcggacgcgcgcgcgcgtcgcgcgacgccgcgcgcgtcgaaacgatcgaccgtcgcgagtcgcgggtcgagcgcgcgcgcgcgtcgcgcgacgcgcgtcgcgacgccgcgcgcgaacatcgatttgaaggatgaattcaaagccgtcgtcgcgcggcgtcgcgcggcgtcgccgaagcgcgggcgtcgagacgcgcgcgcgagcgtgcgaacctcgagacgcgcgcgcgacgcggacgcgcgacgcgcgcgcgacgcgacgcgaacgcggtgatgtgaagcgacgcggtcgttagtcccgcggtacttcgtcgcgccgcgcgccgcgatggcgacgcgatcgacgctcgagcgcgccgtcgcgcgcgcgggcggtgcgcgcgcgtcgcgcgcgcgatcgcgcgcgacgcggcgacgacgggtgacgacgcgcgcggcgccgaagggtgagaggaggcgcggcggcggcgccggagcggagacgaaacgcgcgcccgcgcgcgcgaacgacgacgacgacggcgacgcgtggcgcgtgtacgacgtgcacgtgccgctcgatcgtgacctgggtaaggactcgagcgaggcgtcgcccgcggtgctggaggcggtgcaaaagattttggggacggcgcggac
